United States Patent Application Publication US 2026/0258424 A1, published September 3, 2026 (application 18/878,367).

The application's sequence listing, which the Patent Office published only in electronic form, follows.

SEQUENCE LISTING (18216 sequences)

SEQ ID NO: 1 - protein, 2133 aa, synthetic construct
MPAAKRVKLDGGDKKYSIGLDIGTNSVGWAVITDEYKVPSKKFKVLGNTDRHSIKKNLIGALLFDSGETAEATRLKRTARRRYTRRKNRICYLQEIFSNEMAKVDDSFFHRLEESFLVEEDKKHERHPIFGNIVDEVAYHEKYPTIYHLRKKLVDSTDKADLRLIYLALAHMIKFRGHFLIEGDLNPDNSDVDKLFIQLVQTYNQLFEENPINASGVDAKAILSARLSKSRRLENLIAQLPGEKKNGLFGNLIALSLGLTPNFKSNFDLAEDAKLQLSKDTYDDDLDNLLAQIGDQYADLFLAAKNLSDAILLSDILRVNTEITKAPLSASMIKRYDEHHQDLTLLKALVRQQLPEKYKEIFFDQSKNGYAGYIDGGASQEEFYKFIKPILEKMDGTEELLVKLNREDLLRKQRTFDNGSIPHQIHLGELHAILRRQEDFYPFLKDNREKIEKILTFRIPYYVGPLARGNSRFAWMTRKSEETITPWNFEEVVDKGASAQSFIERMTNFDKNLPNEKVLPKHSLLYEYFTVYNELTKVKYVTEGMRKPAFLSGEQKKAIVDLLFKTNRKVTVKQLKEDYFKKIECFDSVEISGVEDRFNASLGTYHDLLKIIKDKDFLDNEENEDILEDIVLTLTLFEDREMIEERLKTYAHLFDDKVMKQLKRRRYTGWGRLSRKLINGIRDKQSGKTILDFLKSDGFANRNFMQLIHDDSLTFKEDIQKAQVSGQGDSLHEHIANLAGSPAIKKGILQTVKVVDELVKVMGRHKPENIVIEMARENQTTQKGQKNSRERMKRIEEGIKELGSQILKEHPVENTQLQNEKLYLYYLQNGRDMYVDQELDINRLSDYDVDHIVPQSFLKDDSIDNKVLTRSDKARGKSDNVPSEEVVKKMKNYWRQLLNAKLITQRKFDNLTKAERGGLSELDKAGFIKRQLVETRQITKHVAQILDSRMNTKYDENDKLIREVKVITLKSKLVSDFRKDFQFYKVREINNYHHAHDAYLNAVVGTALIKKYPKLESEFVYGDYKVYDVRKMIAKSEQEIGKATAKYFFYSNIMNFFKTEITLANGEIRKRPLIETNGETGEIVWDKGRDFATVRKVLSMPQVNIVKKTEVQTGGFSKESILPKRNSDKLIARKKDWDPKKYGGFDSPTVAYSVLVVAKVEKGKSKKLKSVKELLGITIMERSSFEKNPIDFLEAKGYKEVKKDLIIKLPKYSLFELENGRKRMLASAGELQKGNELALPSKYVNFLYLASHYEKLKGSPEDNEQKQLFVEQHKHYLDEIIEQISEFSKRVILADANLDKVLSAYNKHRDKPIREQAENIIHLFTLTNLGAPAAFKYFDTTIDRKRYTSTKEVLDATLIHQSITGLYETRIDLSQLGGDGGAEAAAKEAAAKEAAAKEAAAKALEAEAAAKEAAAKEAAAKEAAAKAGGTAPLEEEYRLFLEAPIQNVTLLEQWKREIPKVWAEINPPGLASTQAPIHVQLLSTALPVRVRQYPITLEAKRSLRETIRKFRAAGILRPVHSPWNTPLLPVRKSGTSEYRMVQDLREVNKRVETIHPTVPNPYTLLSLLPPDRIWYSVLDLKDAFFCIPLAPESQLIFAFEWADAEEGESGQLTWTRLPQGFKNSPTLFDEALNRDLQGFRLDHPSVSLLQYVDDLLIAADTQAACLSATRDLLMTLAELGYRVSGKKAQLCQEEVTYLGFKIHKGSRSLSNSRTQAILQIPVPKTKRQVREFLGTIGYCRLWIPGFAELAQPLYAATRGGNDPLVWGEKEEEAFQSLKLALTQPPALALPSLDKPFQLFVEETSGAAKGVLTQALGPWKRPVAYLSKRLDPVAAGWPRCLRAIAAAALLTREASKLTFGQDIEITSSHNLESLLRSPPDKWLTNARITQYQVLLLDPPRVRFKQTAALNPATLLPETDDTLPIHHCLDTLDSLTSTRPDLTDQPLAQAEATLFTDGSSYIRDGKRYAGAAVVTLDSVIWAEPLPIGTSAQKAELIALTKALEWSKDKSVNIYTDSRYAFATLHVHGMIYRERGLLTAGGKAIKNAPEILALLTAVWLPKRVAVMHCKGHQKDDAPTSTGNRRADEVAREVAIRPLSTQATISAGKRTADGSEFEKRTADGSEFESPKKKAKVE

SEQ ID NO: 2 - protein, 2112 aa, synthetic construct
MPAAKRVKLDGGDKKYSIGLDIGTNSVGWAVITDEYKVPSKKFKVLGNTDRHSIKKNLIGALLFDSGETAEATRLKRTARRRYTRRKNRICYLQEIFSNEMAKVDDSFFHRLEESFLVEEDKKHERHPIFGNIVDEVAYHEKYPTIYHLRKKLVDSTDKADLRLIYLALAHMIKFRGHFLIEGDLNPDNSDVDKLFIQLVQTYNQLFEENPINASGVDAKAILSARLSKSRRLENLIAQLPGEKKNGLFGNLIALSLGLTPNFKSNFDLAEDAKLQLSKDTYDDDLDNLLAQIGDQYADLFLAAKNLSDAILLSDILRVNTEITKAPLSASMIKRYDEHHQDLTLLKALVRQQLPEKYKEIFFDQSKNGYAGYIDGGASQEEFYKFIKPILEKMDGTEELLVKLNREDLLRKQRTFDNGSIPHQIHLGELHAILRRQEDFYPFLKDNREKIEKILTFRIPYYVGPLARGNSRFAWMTRKSEETITPWNFEEVVDKGASAQSFIERMTNFDKNLPNEKVLPKHSLLYEYFTVYNELTKVKYVTEGMRKPAFLSGEQKKAIVDLLFKTNRKVTVKQLKEDYFKKIECFDSVEISGVEDRFNASLGTYHDLLKIIKDKDFLDNEENEDILEDIVLTLTLFEDREMIEERLKTYAHLFDDKVMKQLKRRRYTGWGRLSRKLINGIRDKQSGKTILDFLKSDGFANRNFMQLIHDDSLTFKEDIQKAQVSGQGDSLHEHIANLAGSPAIKKGILQTVKVVDELVKVMGRHKPENIVIEMARENQTTQKGQKNSRERMKRIEEGIKELGSQILKEHPVENTQLQNEKLYLYYLQNGRDMYVDQELDINRLSDYDVDHIVPQSFLKDDSIDNKVLTRSDKARGKSDNVPSEEVVKKMKNYWRQLLNAKLITQRKFDNLTKAERGGLSELDKAGFIKRQLVETRQITKHVAQILDSRMNTKYDENDKLIREVKVITLKSKLVSDFRKDFQFYKVREINNYHHAHDAYLNAVVGTALIKKYPKLESEFVYGDYKVYDVRKMIAKSEQEIGKATAKYFFYSNIMNFFKTEITLANGEIRKRPLIETNGETGEIVWDKGRDFATVRKVLSMPQVNIVKKTEVQTGGFSKESILPKRNSDKLIARKKDWDPKKYGGFDSPTVAYSVLVVAKVEKGKSKKLKSVKELLGITIMERSSFEKNPIDFLEAKGYKEVKKDLIIKLPKYSLFELENGRKRMLASAGELQKGNELALPSKYVNFLYLASHYEKLKGSPEDNEQKQLFVEQHKHYLDEIIEQISEFSKRVILADANLDKVLSAYNKHRDKPIREQAENIIHLFTLTNLGAPAAFKYFDTTIDRKRYTSTKEVLDATLIHQSITGLYETRIDLSQLGGDGGGGGGSGGGGSGGGGSGGGGSGGGGSGGTAPLEEEYRLFLEAPIQNVTLLEQWKREIPKVWAEINPPGLASTQAPIHVQLLSTALPVRVRQYPITLEAKRSLRETIRKFRAAGILRPVHSPWNTPLLPVRKSGTSEYRMVQDLREVNKRVETIHPTVPNPYTLLSLLPPDRIWYSVLDLKDAFFCIPLAPESQLIFAFEWADAEEGESGQLTWTRLPQGFKNSPTLFDEALNRDLQGFRLDHPSVSLLQYVDDLLIAADTQAACLSATRDLLMTLAELGYRVSGKKAQLCQEEVTYLGFKIHKGSRSLSNSRTQAILQIPVPKTKRQVREFLGTIGYCRLWIPGFAELAQPLYAATRGGNDPLVWGEKEEEAFQSLKLALTQPPALALPSLDKPFQLFVEETSGAAKGVLTQALGPWKRPVAYLSKRLDPVAAGWPRCLRAIAAAALLTREASKLTFGQDIEITSSHNLESLLRSPPDKWLTNARITQYQVLLLDPPRVRFKQTAALNPATLLPETDDTLPIHHCLDTLDSLTSTRPDLTDQPLAQAEATLFTDGSSYIRDGKRYAGAAVVTLDSVIWAEPLPIGTSAQKAELIALTKALEWSKDKSVNIYTDSRYAFATLHVHGMIYRERGLLTAGGKAIKNAPEILALLTAVWLPKRVAVMHCKGHQKDDAPTSTGNRRADEVAREVAIRPLSTQATISAGKRTADGSEFEKRTADGSEFESPKKKAKVE

SEQ ID NO: 3 - protein, 2098 aa, synthetic construct
MPAAKRVKLDGGDKKYSIGLDIGTNSVGWAVITDEYKVPSKKFKVLGNTDRHSIKKNLIGALLFDSGETAEATRLKRTARRRYTRRKNRICYLQEIFSNEMAKVDDSFFHRLEESFLVEEDKKHERHPIFGNIVDEVAYHEKYPTIYHLRKKLVDSTDKADLRLIYLALAHMIKFRGHFLIEGDLNPDNSDVDKLFIQLVQTYNQLFEENPINASGVDAKAILSARLSKSRRLENLIAQLPGEKKNGLFGNLIALSLGLTPNFKSNFDLAEDAKLQLSKDTYDDDLDNLLAQIGDQYADLFLAAKNLSDAILLSDILRVNTEITKAPLSASMIKRYDEHHQDLTLLKALVRQQLPEKYKEIFFDQSKNGYAGYIDGGASQEEFYKFIKPILEKMDGTEELLVKLNREDLLRKQRTFDNGSIPHQIHLGELHAILRRQEDFYPFLKDNREKIEKILTFRIPYYVGPLARGNSRFAWMTRKSEETITPWNFEEVVDKGASAQSFIERMTNFDKNLPNEKVLPKHSLLYEYFTVYNELTKVKYVTEGMRKPAFLSGEQKKAIVDLLFKTNRKVTVKQLKEDYFKKIECFDSVEISGVEDRFNASLGTYHDLLKIIKDKDFLDNEENEDILEDIVLTLTLFEDREMIEERLKTYAHLFDDKVMKQLKRRRYTGWGRLSRKLINGIRDKQSGKTILDFLKSDGFANRNFMQLIHDDSLTFKEDIQKAQVSGQGDSLHEHIANLAGSPAIKKGILQTVKVVDELVKVMGRHKPENIVIEMARENQTTQKGQKNSRERMKRIEEGIKELGSQILKEHPVENTQLQNEKLYLYYLQNGRDMYVDQELDINRLSDYDVDHIVPQSFLKDDSIDNKVLTRSDKARGKSDNVPSEEVVKKMKNYWRQLLNAKLITQRKFDNLTKAERGGLSELDKAGFIKRQLVETRQITKHVAQILDSRMNTKYDENDKLIREVKVITLKSKLVSDFRKDFQFYKVREINNYHHAHDAYLNAVVGTALIKKYPKLESEFVYGDYKVYDVRKMIAKSEQEIGKATAKYFFYSNIMNFFKTEITLANGEIRKRPLIETNGETGEIVWDKGRDFATVRKVLSMPQVNIVKKTEVQTGGFSKESILPKRNSDKLIARKKDWDPKKYGGFDSPTVAYSVLVVAKVEKGKSKKLKSVKELLGITIMERSSFEKNPIDFLEAKGYKEVKKDLIIKLPKYSLFELENGRKRMLASAGELQKGNELALPSKYVNFLYLASHYEKLKGSPEDNEQKQLFVEQHKHYLDEIIEQISEFSKRVILADANLDKVLSAYNKHRDKPIREQAENIIHLFTLTNLGAPAAFKYFDTTIDRKRYTSTKEVLDATLIHQSITGLYETRIDLSQLGGDGGPAPEAAAKGGGGGTAPLEEEYRLFLEAPIQNVTLLEQWKREIPKVWAEINPPGLASTQAPIHVQLLSTALPVRVRQYPITLEAKRSLRETIRKFRAAGILRPVHSPWNTPLLPVRKSGTSEYRMVQDLREVNKRVETIHPTVPNPYTLLSLLPPDRIWYSVLDLKDAFFCIPLAPESQLIFAFEWADAEEGESGQLTWTRLPQGFKNSPTLFDEALNRDLQGFRLDHPSVSLLQYVDDLLIAADTQAACLSATRDLLMTLAELGYRVSGKKAQLCQEEVTYLGFKIHKGSRSLSNSRTQAILQIPVPKTKRQVREFLGTIGYCRLWIPGFAELAQPLYAATRGGNDPLVWGEKEEEAFQSLKLALTQPPALALPSLDKPFQLFVEETSGAAKGVLTQALGPWKRPVAYLSKRLDPVAAGWPRCLRAIAAAALLTREASKLTFGQDIEITSSHNLESLLRSPPDKWLTNARITQYQVLLLDPPRVRFKQTAALNPATLLPETDDTLPIHHCLDTLDSLTSTRPDLTDQPLAQAEATLFTDGSSYIRDGKRYAGAAVVTLDSVIWAEPLPIGTSAQKAELIALTKALEWSKDKSVNIYTDSRYAFATLHVHGMIYRERGLLTAGGKAIKNAPEILALLTAVWLPKRVAVMHCKGHQKDDAPTSTGNRRADEVAREVAIRPLSTQATISAGKRTADGSEFEKRTADGSEFESPKKKAKVE

SEQ ID NO: 4 - protein, 2090 aa, synthetic construct
MPAAKRVKLDGGDKKYSIGLDIGTNSVGWAVITDEYKVPSKKFKVLGNTDRHSIKKNLIGALLFDSGETAEATRLKRTARRRYTRRKNRICYLQEIFSNEMAKVDDSFFHRLEESFLVEEDKKHERHPIFGNIVDEVAYHEKYPTIYHLRKKLVDSTDKADLRLIYLALAHMIKFRGHFLIEGDLNPDNSDVDKLFIQLVQTYNQLFEENPINASGVDAKAILSARLSKSRRLENLIAQLPGEKKNGLFGNLIALSLGLTPNFKSNFDLAEDAKLQLSKDTYDDDLDNLLAQIGDQYADLFLAAKNLSDAILLSDILRVNTEITKAPLSASMIKRYDEHHQDLTLLKALVRQQLPEKYKEIFFDQSKNGYAGYIDGGASQEEFYKFIKPILEKMDGTEELLVKLNREDLLRKQRTFDNGSIPHQIHLGELHAILRRQEDFYPFLKDNREKIEKILTFRIPYYVGPLARGNSRFAWMTRKSEETITPWNFEEVVDKGASAQSFIERMTNFDKNLPNEKVLPKHSLLYEYFTVYNELTKVKYVTEGMRKPAFLSGEQKKAIVDLLFKTNRKVTVKQLKEDYFKKIECFDSVEISGVEDRFNASLGTYHDLLKIIKDKDFLDNEENEDILEDIVLTLTLFEDREMIEERLKTYAHLFDDKVMKQLKRRRYTGWGRLSRKLINGIRDKQSGKTILDFLKSDGFANRNFMQLIHDDSLTFKEDIQKAQVSGQGDSLHEHIANLAGSPAIKKGILQTVKVVDELVKVMGRHKPENIVIEMARENQTTQKGQKNSRERMKRIEEGIKELGSQILKEHPVENTQLQNEKLYLYYLQNGRDMYVDQELDINRLSDYDVDHIVPQSFLKDDSIDNKVLTRSDKARGKSDNVPSEEVVKKMKNYWRQLLNAKLITQRKFDNLTKAERGGLSELDKAGFIKRQLVETRQITKHVAQILDSRMNTKYDENDKLIREVKVITLKSKLVSDFRKDFQFYKVREINNYHHAHDAYLNAVVGTALIKKYPKLESEFVYGDYKVYDVRKMIAKSEQEIGKATAKYFFYSNIMNFFKTEITLANGEIRKRPLIETNGETGEIVWDKGRDFATVRKVLSMPQVNIVKKTEVQTGGFSKESILPKRNSDKLIARKKDWDPKKYGGFDSPTVAYSVLVVAKVEKGKSKKLKSVKELLGITIMERSSFEKNPIDFLEAKGYKEVKKDLIIKLPKYSLFELENGRKRMLASAGELQKGNELALPSKYVNFLYLASHYEKLKGSPEDNEQKQLFVEQHKHYLDEIIEQISEFSKRVILADANLDKVLSAYNKHRDKPIREQAENIIHLFTLTNLGAPAAFKYFDTTIDRKRYTSTKEVLDATLIHQSITGLYETRIDLSQLGGDGGGGGGGTAPLEEEYRLFLEAPIQNVTLLEQWKREIPKVWAEINPPGLASTQAPIHVQLLSTALPVRVRQYPITLEAKRSLRETIRKFRAAGILRPVHSPWNTPLLPVRKSGTSEYRMVQDLREVNKRVETIHPTVPNPYTLLSLLPPDRIWYSVLDLKDAFFCIPLAPESQLIFAFEWADAEEGESGQLTWTRLPQGFKNSPTLFDEALNRDLQGFRLDHPSVSLLQYVDDLLIAADTQAACLSATRDLLMTLAELGYRVSGKKAQLCQEEVTYLGFKIHKGSRSLSNSRTQAILQIPVPKTKRQVREFLGTIGYCRLWIPGFAELAQPLYAATRGGNDPLVWGEKEEEAFQSLKLALTQPPALALPSLDKPFQLFVEETSGAAKGVLTQALGPWKRPVAYLSKRLDPVAAGWPRCLRAIAAAALLTREASKLTFGQDIEITSSHNLESLLRSPPDKWLTNARITQYQVLLLDPPRVRFKQTAALNPATLLPETDDTLPIHHCLDTLDSLTSTRPDLTDQPLAQAEATLFTDGSSYIRDGKRYAGAAVVTLDSVIWAEPLPIGTSAQKAELIALTKALEWSKDKSVNIYTDSRYAFATLHVHGMIYRERGLLTAGGKAIKNAPEILALLTAVWLPKRVAVMHCKGHQKDDAPTSTGNRRADEVAREVAIRPLSTQATISAGKRTADGSEFEKRTADGSEFESPKKKAKVE

SEQ ID NO: 5 - protein, 2098 aa, synthetic construct
MPAAKRVKLDGGDKKYSIGLDIGTNSVGWAVITDEYKVPSKKFKVLGNTDRHSIKKNLIGALLFDSGETAEATRLKRTARRRYTRRKNRICYLQEIFSNEMAKVDDSFFHRLEESFLVEEDKKHERHPIFGNIVDEVAYHEKYPTIYHLRKKLVDSTDKADLRLIYLALAHMIKFRGHFLIEGDLNPDNSDVDKLFIQLVQTYNQLFEENPINASGVDAKAILSARLSKSRRLENLIAQLPGEKKNGLFGNLIALSLGLTPNFKSNFDLAEDAKLQLSKDTYDDDLDNLLAQIGDQYADLFLAAKNLSDAILLSDILRVNTEITKAPLSASMIKRYDEHHQDLTLLKALVRQQLPEKYKEIFFDQSKNGYAGYIDGGASQEEFYKFIKPILEKMDGTEELLVKLNREDLLRKQRTFDNGSIPHQIHLGELHAILRRQEDFYPFLKDNREKIEKILTFRIPYYVGPLARGNSRFAWMTRKSEETITPWNFEEVVDKGASAQSFIERMTNFDKNLPNEKVLPKHSLLYEYFTVYNELTKVKYVTEGMRKPAFLSGEQKKAIVDLLFKTNRKVTVKQLKEDYFKKIECFDSVEISGVEDRFNASLGTYHDLLKIIKDKDFLDNEENEDILEDIVLTLTLFEDREMIEERLKTYAHLFDDKVMKQLKRRRYTGWGRLSRKLINGIRDKQSGKTILDFLKSDGFANRNFMQLIHDDSLTFKEDIQKAQVSGQGDSLHEHIANLAGSPAIKKGILQTVKVVDELVKVMGRHKPENIVIEMARENQTTQKGQKNSRERMKRIEEGIKELGSQILKEHPVENTQLQNEKLYLYYLQNGRDMYVDQELDINRLSDYDVDHIVPQSFLKDDSIDNKVLTRSDKARGKSDNVPSEEVVKKMKNYWRQLLNAKLITQRKFDNLTKAERGGLSELDKAGFIKRQLVETRQITKHVAQILDSRMNTKYDENDKLIREVKVITLKSKLVSDFRKDFQFYKVREINNYHHAHDAYLNAVVGTALIKKYPKLESEFVYGDYKVYDVRKMIAKSEQEIGKATAKYFFYSNIMNFFKTEITLANGEIRKRPLIETNGETGEIVWDKGRDFATVRKVLSMPQVNIVKKTEVQTGGFSKESILPKRNSDKLIARKKDWDPKKYGGFDSPTVAYSVLVVAKVEKGKSKKLKSVKELLGITIMERSSFEKNPIDFLEAKGYKEVKKDLIIKLPKYSLFELENGRKRMLASAGELQKGNELALPSKYVNFLYLASHYEKLKGSPEDNEQKQLFVEQHKHYLDEIIEQISEFSKRVILADANLDKVLSAYNKHRDKPIREQAENIIHLFTLTNLGAPAAFKYFDTTIDRKRYTSTKEVLDATLIHQSITGLYETRIDLSQLGGDGGGGGGSSEAAAKGGTAPLEEEYRLFLEAPIQNVTLLEQWKREIPKVWAEINPPGLASTQAPIHVQLLSTALPVRVRQYPITLEAKRSLRETIRKFRAAGILRPVHSPWNTPLLPVRKSGTSEYRMVQDLREVNKRVETIHPTVPNPYTLLSLLPPDRIWYSVLDLKDAFFCIPLAPESQLIFAFEWADAEEGESGQLTWTRLPQGFKNSPTLFDEALNRDLQGFRLDHPSVSLLQYVDDLLIAADTQAACLSATRDLLMTLAELGYRVSGKKAQLCQEEVTYLGFKIHKGSRSLSNSRTQAILQIPVPKTKRQVREFLGTIGYCRLWIPGFAELAQPLYAATRGGNDPLVWGEKEEEAFQSLKLALTQPPALALPSLDKPFQLFVEETSGAAKGVLTQALGPWKRPVAYLSKRLDPVAAGWPRCLRAIAAAALLTREASKLTFGQDIEITSSHNLESLLRSPPDKWLTNARITQYQVLLLDPPRVRFKQTAALNPATLLPETDDTLPIHHCLDTLDSLTSTRPDLTDQPLAQAEATLFTDGSSYIRDGKRYAGAAVVTLDSVIWAEPLPIGTSAQKAELIALTKALEWSKDKSVNIYTDSRYAFATLHVHGMIYRERGLLTAGGKAIKNAPEILALLTAVWLPKRVAVMHCKGHQKDDAPTSTGNRRADEVAREVAIRPLSTQATISAGKRTADGSEFEKRTADGSEFESPKKKAKVE

SEQ ID NO: 6 - protein, 2098 aa, synthetic construct
MPAAKRVKLDGGDKKYSIGLDIGTNSVGWAVITDEYKVPSKKFKVLGNTDRHSIKKNLIGALLFDSGETAEATRLKRTARRRYTRRKNRICYLQEIFSNEMAKVDDSFFHRLEESFLVEEDKKHERHPIFGNIVDEVAYHEKYPTIYHLRKKLVDSTDKADLRLIYLALAHMIKFRGHFLIEGDLNPDNSDVDKLFIQLVQTYNQLFEENPINASGVDAKAILSARLSKSRRLENLIAQLPGEKKNGLFGNLIALSLGLTPNFKSNFDLAEDAKLQLSKDTYDDDLDNLLAQIGDQYADLFLAAKNLSDAILLSDILRVNTEITKAPLSASMIKRYDEHHQDLTLLKALVRQQLPEKYKEIFFDQSKNGYAGYIDGGASQEEFYKFIKPILEKMDGTEELLVKLNREDLLRKQRTFDNGSIPHQIHLGELHAILRRQEDFYPFLKDNREKIEKILTFRIPYYVGPLARGNSRFAWMTRKSEETITPWNFEEVVDKGASAQSFIERMTNFDKNLPNEKVLPKHSLLYEYFTVYNELTKVKYVTEGMRKPAFLSGEQKKAIVDLLFKTNRKVTVKQLKEDYFKKIECFDSVEISGVEDRFNASLGTYHDLLKIIKDKDFLDNEENEDILEDIVLTLTLFEDREMIEERLKTYAHLFDDKVMKQLKRRRYTGWGRLSRKLINGIRDKQSGKTILDFLKSDGFANRNFMQLIHDDSLTFKEDIQKAQVSGQGDSLHEHIANLAGSPAIKKGILQTVKVVDELVKVMGRHKPENIVIEMARENQTTQKGQKNSRERMKRIEEGIKELGSQILKEHPVENTQLQNEKLYLYYLQNGRDMYVDQELDINRLSDYDVDHIVPQSFLKDDSIDNKVLTRSDKARGKSDNVPSEEVVKKMKNYWRQLLNAKLITQRKFDNLTKAERGGLSELDKAGFIKRQLVETRQITKHVAQILDSRMNTKYDENDKLIREVKVITLKSKLVSDFRKDFQFYKVREINNYHHAHDAYLNAVVGTALIKKYPKLESEFVYGDYKVYDVRKMIAKSEQEIGKATAKYFFYSNIMNFFKTEITLANGEIRKRPLIETNGETGEIVWDKGRDFATVRKVLSMPQVNIVKKTEVQTGGFSKESILPKRNSDKLIARKKDWDPKKYGGFDSPTVAYSVLVVAKVEKGKSKKLKSVKELLGITIMERSSFEKNPIDFLEAKGYKEVKKDLIIKLPKYSLFELENGRKRMLASAGELQKGNELALPSKYVNFLYLASHYEKLKGSPEDNEQKQLFVEQHKHYLDEIIEQISEFSKRVILADANLDKVLSAYNKHRDKPIREQAENIIHLFTLTNLGAPAAFKYFDTTIDRKRYTSTKEVLDATLIHQSITGLYETRIDLSQLGGDGGGGSEAAAKGGGGGTAPLEEEYRLFLEAPIQNVTLLEQWKREIPKVWAEINPPGLASTQAPIHVQLLSTALPVRVRQYPITLEAKRSLRETIRKFRAAGILRPVHSPWNTPLLPVRKSGTSEYRMVQDLREVNKRVETIHPTVPNPYTLLSLLPPDRIWYSVLDLKDAFFCIPLAPESQLIFAFEWADAEEGESGQLTWTRLPQGFKNSPTLFDEALNRDLQGFRLDHPSVSLLQYVDDLLIAADTQAACLSATRDLLMTLAELGYRVSGKKAQLCQEEVTYLGFKIHKGSRSLSNSRTQAILQIPVPKTKRQVREFLGTIGYCRLWIPGFAELAQPLYAATRGGNDPLVWGEKEEEAFQSLKLALTQPPALALPSLDKPFQLFVEETSGAAKGVLTQALGPWKRPVAYLSKRLDPVAAGWPRCLRAIAAAALLTREASKLTFGQDIEITSSHNLESLLRSPPDKWLTNARITQYQVLLLDPPRVRFKQTAALNPATLLPETDDTLPIHHCLDTLDSLTSTRPDLTDQPLAQAEATLFTDGSSYIRDGKRYAGAAVVTLDSVIWAEPLPIGTSAQKAELIALTKALEWSKDKSVNIYTDSRYAFATLHVHGMIYRERGLLTAGGKAIKNAPEILALLTAVWLPKRVAVMHCKGHQKDDAPTSTGNRRADEVAREVAIRPLSTQATISAGKRTADGSEFEKRTADGSEFESPKKKAKVE

SEQ ID NO: 7 - protein, 2093 aa, synthetic construct
MPAAKRVKLDGGDKKYSIGLDIGTNSVGWAVITDEYKVPSKKFKVLGNTDRHSIKKNLIGALLFDSGETAEATRLKRTARRRYTRRKNRICYLQEIFSNEMAKVDDSFFHRLEESFLVEEDKKHERHPIFGNIVDEVAYHEKYPTIYHLRKKLVDSTDKADLRLIYLALAHMIKFRGHFLIEGDLNPDNSDVDKLFIQLVQTYNQLFEENPINASGVDAKAILSARLSKSRRLENLIAQLPGEKKNGLFGNLIALSLGLTPNFKSNFDLAEDAKLQLSKDTYDDDLDNLLAQIGDQYADLFLAAKNLSDAILLSDILRVNTEITKAPLSASMIKRYDEHHQDLTLLKALVRQQLPEKYKEIFFDQSKNGYAGYIDGGASQEEFYKFIKPILEKMDGTEELLVKLNREDLLRKQRTFDNGSIPHQIHLGELHAILRRQEDFYPFLKDNREKIEKILTFRIPYYVGPLARGNSRFAWMTRKSEETITPWNFEEVVDKGASAQSFIERMTNFDKNLPNEKVLPKHSLLYEYFTVYNELTKVKYVTEGMRKPAFLSGEQKKAIVDLLFKTNRKVTVKQLKEDYFKKIECFDSVEISGVEDRFNASLGTYHDLLKIIKDKDFLDNEENEDILEDIVLTLTLFEDREMIEERLKTYAHLFDDKVMKQLKRRRYTGWGRLSRKLINGIRDKQSGKTILDFLKSDGFANRNFMQLIHDDSLTFKEDIQKAQVSGQGDSLHEHIANLAGSPAIKKGILQTVKVVDELVKVMGRHKPENIVIEMARENQTTQKGQKNSRERMKRIEEGIKELGSQILKEHPVENTQLQNEKLYLYYLQNGRDMYVDQELDINRLSDYDVDHIVPQSFLKDDSIDNKVLTRSDKARGKSDNVPSEEVVKKMKNYWRQLLNAKLITQRKFDNLTKAERGGLSELDKAGFIKRQLVETRQITKHVAQILDSRMNTKYDENDKLIREVKVITLKSKLVSDFRKDFQFYKVREINNYHHAHDAYLNAVVGTALIKKYPKLESEFVYGDYKVYDVRKMIAKSEQEIGKATAKYFFYSNIMNFFKTEITLANGEIRKRPLIETNGETGEIVWDKGRDFATVRKVLSMPQVNIVKKTEVQTGGFSKESILPKRNSDKLIARKKDWDPKKYGGFDSPTVAYSVLVVAKVEKGKSKKLKSVKELLGITIMERSSFEKNPIDFLEAKGYKEVKKDLIIKLPKYSLFELENGRKRMLASAGELQKGNELALPSKYVNFLYLASHYEKLKGSPEDNEQKQLFVEQHKHYLDEIIEQISEFSKRVILADANLDKVLSAYNKHRDKPIREQAENIIHLFTLTNLGAPAAFKYFDTTIDRKRYTSTKEVLDATLIHQSITGLYETRIDLSQLGGDGGGGSGSSGGTAPLEEEYRLFLEAPIQNVTLLEQWKREIPKVWAEINPPGLASTQAPIHVQLLSTALPVRVRQYPITLEAKRSLRETIRKFRAAGILRPVHSPWNTPLLPVRKSGTSEYRMVQDLREVNKRVETIHPTVPNPYTLLSLLPPDRIWYSVLDLKDAFFCIPLAPESQLIFAFEWADAEEGESGQLTWTRLPQGFKNSPTLFDEALNRDLQGFRLDHPSVSLLQYVDDLLIAADTQAACLSATRDLLMTLAELGYRVSGKKAQLCQEEVTYLGFKIHKGSRSLSNSRTQAILQIPVPKTKRQVREFLGTIGYCRLWIPGFAELAQPLYAATRGGNDPLVWGEKEEEAFQSLKLALTQPPALALPSLDKPFQLFVEETSGAAKGVLTQALGPWKRPVAYLSKRLDPVAAGWPRCLRAIAAAALLTREASKLTFGQDIEITSSHNLESLLRSPPDKWLTNARITQYQVLLLDPPRVRFKQTAALNPATLLPETDDTLPIHHCLDTLDSLTSTRPDLTDQPLAQAEATLFTDGSSYIRDGKRYAGAAVVTLDSVIWAEPLPIGTSAQKAELIALTKALEWSKDKSVNIYTDSRYAFATLHVHGMIYRERGLLTAGGKAIKNAPEILALLTAVWLPKRVAVMHCKGHQKDDAPTSTGNRRADEVAREVAIRPLSTQATISAGKRTADGSEFEKRTADGSEFESPKKKAKVE

SEQ ID NO: 8 - protein, 2093 aa, synthetic construct
MPAAKRVKLDGGDKKYSIGLDIGTNSVGWAVITDEYKVPSKKFKVLGNTDRHSIKKNLIGALLFDSGETAEATRLKRTARRRYTRRKNRICYLQEIFSNEMAKVDDSFFHRLEESFLVEEDKKHERHPIFGNIVDEVAYHEKYPTIYHLRKKLVDSTDKADLRLIYLALAHMIKFRGHFLIEGDLNPDNSDVDKLFIQLVQTYNQLFEENPINASGVDAKAILSARLSKSRRLENLIAQLPGEKKNGLFGNLIALSLGLTPNFKSNFDLAEDAKLQLSKDTYDDDLDNLLAQIGDQYADLFLAAKNLSDAILLSDILRVNTEITKAPLSASMIKRYDEHHQDLTLLKALVRQQLPEKYKEIFFDQSKNGYAGYIDGGASQEEFYKFIKPILEKMDGTEELLVKLNREDLLRKQRTFDNGSIPHQIHLGELHAILRRQEDFYPFLKDNREKIEKILTFRIPYYVGPLARGNSRFAWMTRKSEETITPWNFEEVVDKGASAQSFIERMTNFDKNLPNEKVLPKHSLLYEYFTVYNELTKVKYVTEGMRKPAFLSGEQKKAIVDLLFKTNRKVTVKQLKEDYFKKIECFDSVEISGVEDRFNASLGTYHDLLKIIKDKDFLDNEENEDILEDIVLTLTLFEDREMIEERLKTYAHLFDDKVMKQLKRRRYTGWGRLSRKLINGIRDKQSGKTILDFLKSDGFANRNFMQLIHDDSLTFKEDIQKAQVSGQGDSLHEHIANLAGSPAIKKGILQTVKVVDELVKVMGRHKPENIVIEMARENQTTQKGQKNSRERMKRIEEGIKELGSQILKEHPVENTQLQNEKLYLYYLQNGRDMYVDQELDINRLSDYDVDHIVPQSFLKDDSIDNKVLTRSDKARGKSDNVPSEEVVKKMKNYWRQLLNAKLITQRKFDNLTKAERGGLSELDKAGFIKRQLVETRQITKHVAQILDSRMNTKYDENDKLIREVKVITLKSKLVSDFRKDFQFYKVREINNYHHAHDAYLNAVVGTALIKKYPKLESEFVYGDYKVYDVRKMIAKSEQEIGKATAKYFFYSNIMNFFKTEITLANGEIRKRPLIETNGETGEIVWDKGRDFATVRKVLSMPQVNIVKKTEVQTGGFSKESILPKRNSDKLIARKKDWDPKKYGGFDSPTVAYSVLVVAKVEKGKSKKLKSVKELLGITIMERSSFEKNPIDFLEAKGYKEVKKDLIIKLPKYSLFELENGRKRMLASAGELQKGNELALPSKYVNFLYLASHYEKLKGSPEDNEQKQLFVEQHKHYLDEIIEQISEFSKRVILADANLDKVLSAYNKHRDKPIREQAENIIHLFTLTNLGAPAAFKYFDTTIDRKRYTSTKEVLDATLIHQSITGLYETRIDLSQLGGDGGGGSPAPGGTAPLEEEYRLFLEAPIQNVTLLEQWKREIPKVWAEINPPGLASTQAPIHVQLLSTALPVRVRQYPITLEAKRSLRETIRKFRAAGILRPVHSPWNTPLLPVRKSGTSEYRMVQDLREVNKRVETIHPTVPNPYTLLSLLPPDRIWYSVLDLKDAFFCIPLAPESQLIFAFEWADAEEGESGQLTWTRLPQGFKNSPTLFDEALNRDLQGFRLDHPSVSLLQYVDDLLIAADTQAACLSATRDLLMTLAELGYRVSGKKAQLCQEEVTYLGFKIHKGSRSLSNSRTQAILQIPVPKTKRQVREFLGTIGYCRLWIPGFAELAQPLYAATRGGNDPLVWGEKEEEAFQSLKLALTQPPALALPSLDKPFQLFVEETSGAAKGVLTQALGPWKRPVAYLSKRLDPVAAGWPRCLRAIAAAALLTREASKLTFGQDIEITSSHNLESLLRSPPDKWLTNARITQYQVLLLDPPRVRFKQTAALNPATLLPETDDTLPIHHCLDTLDSLTSTRPDLTDQPLAQAEATLFTDGSSYIRDGKRYAGAAVVTLDSVIWAEPLPIGTSAQKAELIALTKALEWSKDKSVNIYTDSRYAFATLHVHGMIYRERGLLTAGGKAIKNAPEILALLTAVWLPKRVAVMHCKGHQKDDAPTSTGNRRADEVAREVAIRPLSTQATISAGKRTADGSEFEKRTADGSEFESPKKKAKVE

SEQ ID NO: 9 - protein, 2097 aa, synthetic construct
MPAAKRVKLDGGDKKYSIGLDIGTNSVGWAVITDEYKVPSKKFKVLGNTDRHSIKKNLIGALLFDSGETAEATRLKRTARRRYTRRKNRICYLQEIFSNEMAKVDDSFFHRLEESFLVEEDKKHERHPIFGNIVDEVAYHEKYPTIYHLRKKLVDSTDKADLRLIYLALAHMIKFRGHFLIEGDLNPDNSDVDKLFIQLVQTYNQLFEENPINASGVDAKAILSARLSKSRRLENLIAQLPGEKKNGLFGNLIALSLGLTPNFKSNFDLAEDAKLQLSKDTYDDDLDNLLAQIGDQYADLFLAAKNLSDAILLSDILRVNTEITKAPLSASMIKRYDEHHQDLTLLKALVRQQLPEKYKEIFFDQSKNGYAGYIDGGASQEEFYKFIKPILEKMDGTEELLVKLNREDLLRKQRTFDNGSIPHQIHLGELHAILRRQEDFYPFLKDNREKIEKILTFRIPYYVGPLARGNSRFAWMTRKSEETITPWNFEEVVDKGASAQSFIERMTNFDKNLPNEKVLPKHSLLYEYFTVYNELTKVKYVTEGMRKPAFLSGEQKKAIVDLLFKTNRKVTVKQLKEDYFKKIECFDSVEISGVEDRFNASLGTYHDLLKIIKDKDFLDNEENEDILEDIVLTLTLFEDREMIEERLKTYAHLFDDKVMKQLKRRRYTGWGRLSRKLINGIRDKQSGKTILDFLKSDGFANRNFMQLIHDDSLTFKEDIQKAQVSGQGDSLHEHIANLAGSPAIKKGILQTVKVVDELVKVMGRHKPENIVIEMARENQTTQKGQKNSRERMKRIEEGIKELGSQILKEHPVENTQLQNEKLYLYYLQNGRDMYVDQELDINRLSDYDVDHIVPQSFLKDDSIDNKVLTRSDKARGKSDNVPSEEVVKKMKNYWRQLLNAKLITQRKFDNLTKAERGGLSELDKAGFIKRQLVETRQITKHVAQILDSRMNTKYDENDKLIREVKVITLKSKLVSDFRKDFQFYKVREINNYHHAHDAYLNAVVGTALIKKYPKLESEFVYGDYKVYDVRKMIAKSEQEIGKATAKYFFYSNIMNFFKTEITLANGEIRKRPLIETNGETGEIVWDKGRDFATVRKVLSMPQVNIVKKTEVQTGGFSKESILPKRNSDKLIARKKDWDPKKYGGFDSPTVAYSVLVVAKVEKGKSKKLKSVKELLGITIMERSSFEKNPIDFLEAKGYKEVKKDLIIKLPKYSLFELENGRKRMLASAGELQKGNELALPSKYVNFLYLASHYEKLKGSPEDNEQKQLFVEQHKHYLDEIIEQISEFSKRVILADANLDKVLSAYNKHRDKPIREQAENIIHLFTLTNLGAPAAFKYFDTTIDRKRYTSTKEVLDATLIHQSITGLYETRIDLSQLGGDGGGGGGSGGGGSGGTAPLEEEYRLFLEAPIQNVTLLEQWKREIPKVWAEINPPGLASTQAPIHVQLLSTALPVRVRQYPITLEAKRSLRETIRKFRAAGILRPVHSPWNTPLLPVRKSGTSEYRMVQDLREVNKRVETIHPTVPNPYTLLSLLPPDRIWYSVLDLKDAFFCIPLAPESQLIFAFEWADAEEGESGQLTWTRLPQGFKNSPTLFDEALNRDLQGFRLDHPSVSLLQYVDDLLIAADTQAACLSATRDLLMTLAELGYRVSGKKAQLCQEEVTYLGFKIHKGSRSLSNSRTQAILQIPVPKTKRQVREFLGTIGYCRLWIPGFAELAQPLYAATRGGNDPLVWGEKEEEAFQSLKLALTQPPALALPSLDKPFQLFVEETSGAAKGVLTQALGPWKRPVAYLSKRLDPVAAGWPRCLRAIAAAALLTREASKLTFGQDIEITSSHNLESLLRSPPDKWLTNARITQYQVLLLDPPRVRFKQTAALNPATLLPETDDTLPIHHCLDTLDSLTSTRPDLTDQPLAQAEATLFTDGSSYIRDGKRYAGAAVVTLDSVIWAEPLPIGTSAQKAELIALTKALEWSKDKSVNIYTDSRYAFATLHVHGMIYRERGLLTAGGKAIKNAPEILALLTAVWLPKRVAVMHCKGHQKDDAPTSTGNRRADEVAREVAIRPLSTQATISAGKRTADGSEFEKRTADGSEFESPKKKAKVE

SEQ ID NO: 10 - protein, 2097 aa, synthetic construct
MPAAKRVKLDGGDKKYSIGLDIGTNSVGWAVITDEYKVPSKKFKVLGNTDRHSIKKNLIGALLFDSGETAEATRLKRTARRRYTRRKNRICYLQEIFSNEMAKVDDSFFHRLEESFLVEEDKKHERHPIFGNIVDEVAYHEKYPTIYHLRKKLVDSTDKADLRLIYLALAHMIKFRGHFLIEGDLNPDNSDVDKLFIQLVQTYNQLFEENPINASGVDAKAILSARLSKSRRLENLIAQLPGEKKNGLFGNLIALSLGLTPNFKSNFDLAEDAKLQLSKDTYDDDLDNLLAQIGDQYADLFLAAKNLSDAILLSDILRVNTEITKAPLSASMIKRYDEHHQDLTLLKALVRQQLPEKYKEIFFDQSKNGYAGYIDGGASQEEFYKFIKPILEKMDGTEELLVKLNREDLLRKQRTFDNGSIPHQIHLGELHAILRRQEDFYPFLKDNREKIEKILTFRIPYYVGPLARGNSRFAWMTRKSEETITPWNFEEVVDKGASAQSFIERMTNFDKNLPNEKVLPKHSLLYEYFTVYNELTKVKYVTEGMRKPAFLSGEQKKAIVDLLFKTNRKVTVKQLKEDYFKKIECFDSVEISGVEDRFNASLGTYHDLLKIIKDKDFLDNEENEDILEDIVLTLTLFEDREMIEERLKTYAHLFDDKVMKQLKRRRYTGWGRLSRKLINGIRDKQSGKTILDFLKSDGFANRNFMQLIHDDSLTFKEDIQKAQVSGQGDSLHEHIANLAGSPAIKKGILQTVKVVDELVKVMGRHKPENIVIEMARENQTTQKGQKNSRERMKRIEEGIKELGSQILKEHPVENTQLQNEKLYLYYLQNGRDMYVDQELDINRLSDYDVDHIVPQSFLKDDSIDNKVLTRSDKARGKSDNVPSEEVVKKMKNYWRQLLNAKLITQRKFDNLTKAERGGLSELDKAGFIKRQLVETRQITKHVAQILDSRMNTKYDENDKLIREVKVITLKSKLVSDFRKDFQFYKVREINNYHHAHDAYLNAVVGTALIKKYPKLESEFVYGDYKVYDVRKMIAKSEQEIGKATAKYFFYSNIMNFFKTEITLANGEIRKRPLIETNGETGEIVWDKGRDFATVRKVLSMPQVNIVKKTEVQTGGFSKESILPKRNSDKLIARKKDWDPKKYGGFDSPTVAYSVLVVAKVEKGKSKKLKSVKELLGITIMERSSFEKNPIDFLEAKGYKEVKKDLIIKLPKYSLFELENGRKRMLASAGELQKGNELALPSKYVNFLYLASHYEKLKGSPEDNEQKQLFVEQHKHYLDEIIEQISEFSKRVILADANLDKVLSAYNKHRDKPIREQAENIIHLFTLTNLGAPAAFKYFDTTIDRKRYTSTKEVLDATLIHQSITGLYETRIDLSQLGGDGGEAAAKEAAAKGGTAPLEEEYRLFLEAPIQNVTLLEQWKREIPKVWAEINPPGLASTQAPIHVQLLSTALPVRVRQYPITLEAKRSLRETIRKFRAAGILRPVHSPWNTPLLPVRKSGTSEYRMVQDLREVNKRVETIHPTVPNPYTLLSLLPPDRIWYSVLDLKDAFFCIPLAPESQLIFAFEWADAEEGESGQLTWTRLPQGFKNSPTLFDEALNRDLQGFRLDHPSVSLLQYVDDLLIAADTQAACLSATRDLLMTLAELGYRVSGKKAQLCQEEVTYLGFKIHKGSRSLSNSRTQAILQIPVPKTKRQVREFLGTIGYCRLWIPGFAELAQPLYAATRGGNDPLVWGEKEEEAFQSLKLALTQPPALALPSLDKPFQLFVEETSGAAKGVLTQALGPWKRPVAYLSKRLDPVAAGWPRCLRAIAAAALLTREASKLTFGQDIEITSSHNLESLLRSPPDKWLTNARITQYQVLLLDPPRVRFKQTAALNPATLLPETDDTLPIHHCLDTLDSLTSTRPDLTDQPLAQAEATLFTDGSSYIRDGKRYAGAAVVTLDSVIWAEPLPIGTSAQKAELIALTKALEWSKDKSVNIYTDSRYAFATLHVHGMIYRERGLLTAGGKAIKNAPEILALLTAVWLPKRVAVMHCKGHQKDDAPTSTGNRRADEVAREVAIRPLSTQATISAGKRTADGSEFEKRTADGSEFESPKKKAKVE

SEQ ID NO: 11 - protein, 2098 aa, synthetic construct
MPAAKRVKLDGGDKKYSIGLDIGTNSVGWAVITDEYKVPSKKFKVLGNTDRHSIKKNLIGALLFDSGETAEATRLKRTARRRYTRRKNRICYLQEIFSNEMAKVDDSFFHRLEESFLVEEDKKHERHPIFGNIVDEVAYHEKYPTIYHLRKKLVDSTDKADLRLIYLALAHMIKFRGHFLIEGDLNPDNSDVDKLFIQLVQTYNQLFEENPINASGVDAKAILSARLSKSRRLENLIAQLPGEKKNGLFGNLIALSLGLTPNFKSNFDLAEDAKLQLSKDTYDDDLDNLLAQIGDQYADLFLAAKNLSDAILLSDILRVNTEITKAPLSASMIKRYDEHHQDLTLLKALVRQQLPEKYKEIFFDQSKNGYAGYIDGGASQEEFYKFIKPILEKMDGTEELLVKLNREDLLRKQRTFDNGSIPHQIHLGELHAILRRQEDFYPFLKDNREKIEKILTFRIPYYVGPLARGNSRFAWMTRKSEETITPWNFEEVVDKGASAQSFIERMTNFDKNLPNEKVLPKHSLLYEYFTVYNELTKVKYVTEGMRKPAFLSGEQKKAIVDLLFKTNRKVTVKQLKEDYFKKIECFDSVEISGVEDRFNASLGTYHDLLKIIKDKDFLDNEENEDILEDIVLTLTLFEDREMIEERLKTYAHLFDDKVMKQLKRRRYTGWGRLSRKLINGIRDKQSGKTILDFLKSDGFANRNFMQLIHDDSLTFKEDIQKAQVSGQGDSLHEHIANLAGSPAIKKGILQTVKVVDELVKVMGRHKPENIVIEMARENQTTQKGQKNSRERMKRIEEGIKELGSQILKEHPVENTQLQNEKLYLYYLQNGRDMYVDQELDINRLSDYDVDHIVPQSFLKDDSIDNKVLTRSDKARGKSDNVPSEEVVKKMKNYWRQLLNAKLITQRKFDNLTKAERGGLSELDKAGFIKRQLVETRQITKHVAQILDSRMNTKYDENDKLIREVKVITLKSKLVSDFRKDFQFYKVREINNYHHAHDAYLNAVVGTALIKKYPKLESEFVYGDYKVYDVRKMIAKSEQEIGKATAKYFFYSNIMNFFKTEITLANGEIRKRPLIETNGETGEIVWDKGRDFATVRKVLSMPQVNIVKKTEVQTGGFSKESILPKRNSDKLIARKKDWDPKKYGGFDSPTVAYSVLVVAKVEKGKSKKLKSVKELLGITIMERSSFEKNPIDFLEAKGYKEVKKDLIIKLPKYSLFELENGRKRMLASAGELQKGNELALPSKYVNFLYLASHYEKLKGSPEDNEQKQLFVEQHKHYLDEIIEQISEFSKRVILADANLDKVLSAYNKHRDKPIREQAENIIHLFTLTNLGAPAAFKYFDTTIDRKRYTSTKEVLDATLIHQSITGLYETRIDLSQLGGDGGGGSEAAAKPAPGGTAPLEEEYRLFLEAPIQNVTLLEQWKREIPKVWAEINPPGLASTQAPIHVQLLSTALPVRVRQYPITLEAKRSLRETIRKFRAAGILRPVHSPWNTPLLPVRKSGTSEYRMVQDLREVNKRVETIHPTVPNPYTLLSLLPPDRIWYSVLDLKDAFFCIPLAPESQLIFAFEWADAEEGESGQLTWTRLPQGFKNSPTLFDEALNRDLQGFRLDHPSVSLLQYVDDLLIAADTQAACLSATRDLLMTLAELGYRVSGKKAQLCQEEVTYLGFKIHKGSRSLSNSRTQAILQIPVPKTKRQVREFLGTIGYCRLWIPGFAELAQPLYAATRGGNDPLVWGEKEEEAFQSLKLALTQPPALALPSLDKPFQLFVEETSGAAKGVLTQALGPWKRPVAYLSKRLDPVAAGWPRCLRAIAAAALLTREASKLTFGQDIEITSSHNLESLLRSPPDKWLTNARITQYQVLLLDPPRVRFKQTAALNPATLLPETDDTLPIHHCLDTLDSLTSTRPDLTDQPLAQAEATLFTDGSSYIRDGKRYAGAAVVTLDSVIWAEPLPIGTSAQKAELIALTKALEWSKDKSVNIYTDSRYAFATLHVHGMIYRERGLLTAGGKAIKNAPEILALLTAVWLPKRVAVMHCKGHQKDDAPTSTGNRRADEVAREVAIRPLSTQATISAGKRTADGSEFEKRTADGSEFESPKKKAKVE

SEQ ID NO: 12 - protein, 2093 aa, synthetic construct
MPAAKRVKLDGGDKKYSIGLDIGTNSVGWAVITDEYKVPSKKFKVLGNTDRHSIKKNLIGALLFDSGETAEATRLKRTARRRYTRRKNRICYLQEIFSNEMAKVDDSFFHRLEESFLVEEDKKHERHPIFGNIVDEVAYHEKYPTIYHLRKKLVDSTDKADLRLIYLALAHMIKFRGHFLIEGDLNPDNSDVDKLFIQLVQTYNQLFEENPINASGVDAKAILSARLSKSRRLENLIAQLPGEKKNGLFGNLIALSLGLTPNFKSNFDLAEDAKLQLSKDTYDDDLDNLLAQIGDQYADLFLAAKNLSDAILLSDILRVNTEITKAPLSASMIKRYDEHHQDLTLLKALVRQQLPEKYKEIFFDQSKNGYAGYIDGGASQEEFYKFIKPILEKMDGTEELLVKLNREDLLRKQRTFDNGSIPHQIHLGELHAILRRQEDFYPFLKDNREKIEKILTFRIPYYVGPLARGNSRFAWMTRKSEETITPWNFEEVVDKGASAQSFIERMTNFDKNLPNEKVLPKHSLLYEYFTVYNELTKVKYVTEGMRKPAFLSGEQKKAIVDLLFKTNRKVTVKQLKEDYFKKIECFDSVEISGVEDRFNASLGTYHDLLKIIKDKDFLDNEENEDILEDIVLTLTLFEDREMIEERLKTYAHLFDDKVMKQLKRRRYTGWGRLSRKLINGIRDKQSGKTILDFLKSDGFANRNFMQLIHDDSLTFKEDIQKAQVSGQGDSLHEHIANLAGSPAIKKGILQTVKVVDELVKVMGRHKPENIVIEMARENQTTQKGQKNSRERMKRIEEGIKELGSQILKEHPVENTQLQNEKLYLYYLQNGRDMYVDQELDINRLSDYDVDHIVPQSFLKDDSIDNKVLTRSDKARGKSDNVPSEEVVKKMKNYWRQLLNAKLITQRKFDNLTKAERGGLSELDKAGFIKRQLVETRQITKHVAQILDSRMNTKYDENDKLIREVKVITLKSKLVSDFRKDFQFYKVREINNYHHAHDAYLNAVVGTALIKKYPKLESEFVYGDYKVYDVRKMIAKSEQEIGKATAKYFFYSNIMNFFKTEITLANGEIRKRPLIETNGETGEIVWDKGRDFATVRKVLSMPQVNIVKKTEVQTGGFSKESILPKRNSDKLIARKKDWDPKKYGGFDSPTVAYSVLVVAKVEKGKSKKLKSVKELLGITIMERSSFEKNPIDFLEAKGYKEVKKDLIIKLPKYSLFELENGRKRMLASAGELQKGNELALPSKYVNFLYLASHYEKLKGSPEDNEQKQLFVEQHKHYLDEIIEQISEFSKRVILADANLDKVLSAYNKHRDKPIREQAENIIHLFTLTNLGAPAAFKYFDTTIDRKRYTSTKEVLDATLIHQSITGLYETRIDLSQLGGDGGGGSGGGGGTAPLEEEYRLFLEAPIQNVTLLEQWKREIPKVWAEINPPGLASTQAPIHVQLLSTALPVRVRQYPITLEAKRSLRETIRKFRAAGILRPVHSPWNTPLLPVRKSGTSEYRMVQDLREVNKRVETIHPTVPNPYTLLSLLPPDRIWYSVLDLKDAFFCIPLAPESQLIFAFEWADAEEGESGQLTWTRLPQGFKNSPTLFDEALNRDLQGFRLDHPSVSLLQYVDDLLIAADTQAACLSATRDLLMTLAELGYRVSGKKAQLCQEEVTYLGFKIHKGSRSLSNSRTQAILQIPVPKTKRQVREFLGTIGYCRLWIPGFAELAQPLYAATRGGNDPLVWGEKEEEAFQSLKLALTQPPALALPSLDKPFQLFVEETSGAAKGVLTQALGPWKRPVAYLSKRLDPVAAGWPRCLRAIAAAALLTREASKLTFGQDIEITSSHNLESLLRSPPDKWLTNARITQYQVLLLDPPRVRFKQTAALNPATLLPETDDTLPIHHCLDTLDSLTSTRPDLTDQPLAQAEATLFTDGSSYIRDGKRYAGAAVVTLDSVIWAEPLPIGTSAQKAELIALTKALEWSKDKSVNIYTDSRYAFATLHVHGMIYRERGLLTAGGKAIKNAPEILALLTAVWLPKRVAVMHCKGHQKDDAPTSTGNRRADEVAREVAIRPLSTQATISAGKRTADGSEFEKRTADGSEFESPKKKAKVE

SEQ ID NO: 13 - protein, 2103 aa, synthetic construct
MPAAKRVKLDGGDKKYSIGLDIGTNSVGWAVITDEYKVPSKKFKVLGNTDRHSIKKNLIGALLFDSGETAEATRLKRTARRRYTRRKNRICYLQEIFSNEMAKVDDSFFHRLEESFLVEEDKKHERHPIFGNIVDEVAYHEKYPTIYHLRKKLVDSTDKADLRLIYLALAHMIKFRGHFLIEGDLNPDNSDVDKLFIQLVQTYNQLFEENPINASGVDAKAILSARLSKSRRLENLIAQLPGEKKNGLFGNLIALSLGLTPNFKSNFDLAEDAKLQLSKDTYDDDLDNLLAQIGDQYADLFLAAKNLSDAILLSDILRVNTEITKAPLSASMIKRYDEHHQDLTLLKALVRQQLPEKYKEIFFDQSKNGYAGYIDGGASQEEFYKFIKPILEKMDGTEELLVKLNREDLLRKQRTFDNGSIPHQIHLGELHAILRRQEDFYPFLKDNREKIEKILTFRIPYYVGPLARGNSRFAWMTRKSEETITPWNFEEVVDKGASAQSFIERMTNFDKNLPNEKVLPKHSLLYEYFTVYNELTKVKYVTEGMRKPAFLSGEQKKAIVDLLFKTNRKVTVKQLKEDYFKKIECFDSVEISGVEDRFNASLGTYHDLLKIIKDKDFLDNEENEDILEDIVLTLTLFEDREMIEERLKTYAHLFDDKVMKQLKRRRYTGWGRLSRKLINGIRDKQSGKTILDFLKSDGFANRNFMQLIHDDSLTFKEDIQKAQVSGQGDSLHEHIANLAGSPAIKKGILQTVKVVDELVKVMGRHKPENIVIEMARENQTTQKGQKNSRERMKRIEEGIKELGSQILKEHPVENTQLQNEKLYLYYLQNGRDMYVDQELDINRLSDYDVDHIVPQSFLKDDSIDNKVLTRSDKARGKSDNVPSEEVVKKMKNYWRQLLNAKLITQRKFDNLTKAERGGLSELDKAGFIKRQLVETRQITKHVAQILDSRMNTKYDENDKLIREVKVITLKSKLVSDFRKDFQFYKVREINNYHHAHDAYLNAVVGTALIKKYPKLESEFVYGDYKVYDVRKMIAKSEQEIGKATAKYFFYSNIMNFFKTEITLANGEIRKRPLIETNGETGEIVWDKGRDFATVRKVLSMPQVNIVKKTEVQTGGFSKESILPKRNSDKLIARKKDWDPKKYGGFDSPTVAYSVLVVAKVEKGKSKKLKSVKELLGITIMERSSFEKNPIDFLEAKGYKEVKKDLIIKLPKYSLFELENGRKRMLASAGELQKGNELALPSKYVNFLYLASHYEKLKGSPEDNEQKQLFVEQHKHYLDEIIEQISEFSKRVILADANLDKVLSAYNKHRDKPIREQAENIIHLFTLTNLGAPAAFKYFDTTIDRKRYTSTKEVLDATLIHQSITGLYETRIDLSQLGGDGGSGSETPGTSESATPESGGTAPLEEEYRLFLEAPIQNVTLLEQWKREIPKVWAEINPPGLASTQAPIHVQLLSTALPVRVRQYPITLEAKRSLRETIRKFRAAGILRPVHSPWNTPLLPVRKSGTSEYRMVQDLREVNKRVETIHPTVPNPYTLLSLLPPDRIWYSVLDLKDAFFCIPLAPESQLIFAFEWADAEEGESGQLTWTRLPQGFKNSPTLFDEALNRDLQGFRLDHPSVSLLQYVDDLLIAADTQAACLSATRDLLMTLAELGYRVSGKKAQLCQEEVTYLGFKIHKGSRSLSNSRTQAILQIPVPKTKRQVREFLGTIGYCRLWIPGFAELAQPLYAATRGGNDPLVWGEKEEEAFQSLKLALTQPPALALPSLDKPFQLFVEETSGAAKGVLTQALGPWKRPVAYLSKRLDPVAAGWPRCLRAIAAAALLTREASKLTFGQDIEITSSHNLESLLRSPPDKWLTNARITQYQVLLLDPPRVRFKQTAALNPATLLPETDDTLPIHHCLDTLDSLTSTRPDLTDQPLAQAEATLFTDGSSYIRDGKRYAGAAVVTLDSVIWAEPLPIGTSAQKAELIALTKALEWSKDKSVNIYTDSRYAFATLHVHGMIYRERGLLTAGGKAIKNAPEILALLTAVWLPKRVAVMHCKGHQKDDAPTSTGNRRADEVAREVAIRPLSTQATISAGKRTADGSEFEKRTADGSEFESPKKKAKVE

SEQ ID NO: 14 - protein, 2099 aa, synthetic construct
MPAAKRVKLDGGDKKYSIGLDIGTNSVGWAVITDEYKVPSKKFKVLGNTDRHSIKKNLIGALLFDSGETAEATRLKRTARRRYTRRKNRICYLQEIFSNEMAKVDDSFFHRLEESFLVEEDKKHERHPIFGNIVDEVAYHEKYPTIYHLRKKLVDSTDKADLRLIYLALAHMIKFRGHFLIEGDLNPDNSDVDKLFIQLVQTYNQLFEENPINASGVDAKAILSARLSKSRRLENLIAQLPGEKKNGLFGNLIALSLGLTPNFKSNFDLAEDAKLQLSKDTYDDDLDNLLAQIGDQYADLFLAAKNLSDAILLSDILRVNTEITKAPLSASMIKRYDEHHQDLTLLKALVRQQLPEKYKEIFFDQSKNGYAGYIDGGASQEEFYKFIKPILEKMDGTEELLVKLNREDLLRKQRTFDNGSIPHQIHLGELHAILRRQEDFYPFLKDNREKIEKILTFRIPYYVGPLARGNSRFAWMTRKSEETITPWNFEEVVDKGASAQSFIERMTNFDKNLPNEKVLPKHSLLYEYFTVYNELTKVKYVTEGMRKPAFLSGEQKKAIVDLLFKTNRKVTVKQLKEDYFKKIECFDSVEISGVEDRFNASLGTYHDLLKIIKDKDFLDNEENEDILEDIVLTLTLFEDREMIEERLKTYAHLFDDKVMKQLKRRRYTGWGRLSRKLINGIRDKQSGKTILDFLKSDGFANRNFMQLIHDDSLTFKEDIQKAQVSGQGDSLHEHIANLAGSPAIKKGILQTVKVVDELVKVMGRHKPENIVIEMARENQTTQKGQKNSRERMKRIEEGIKELGSQILKEHPVENTQLQNEKLYLYYLQNGRDMYVDQELDINRLSDYDVDHIVPQSFLKDDSIDNKVLTRSDKARGKSDNVPSEEVVKKMKNYWRQLLNAKLITQRKFDNLTKAERGGLSELDKAGFIKRQLVETRQITKHVAQILDSRMNTKYDENDKLIREVKVITLKSKLVSDFRKDFQFYKVREINNYHHAHDAYLNAVVGTALIKKYPKLESEFVYGDYKVYDVRKMIAKSEQEIGKATAKYFFYSNIMNFFKTEITLANGEIRKRPLIETNGETGEIVWDKGRDFATVRKVLSMPQVNIVKKTEVQTGGFSKESILPKRNSDKLIARKKDWDPKKYGGFDSPTVAYSVLVVAKVEKGKSKKLKSVKELLGITIMERSSFEKNPIDFLEAKGYKEVKKDLIIKLPKYSLFELENGRKRMLASAGELQKGNELALPSKYVNFLYLASHYEKLKGSPEDNEQKQLFVEQHKHYLDEIIEQISEFSKRVILADANLDKVLSAYNKHRDKPIREQAENIIHLFTLTNLGAPAAFKYFDTTIDRKRYTSTKEVLDATLIHQSITGLYETRIDLSQLGGDGGGSAGSAAGSGEFGGTAPLEEEYRLFLEAPIQNVTLLEQWKREIPKVWAEINPPGLASTQAPIHVQLLSTALPVRVRQYPITLEAKRSLRETIRKFRAAGILRPVHSPWNTPLLPVRKSGTSEYRMVQDLREVNKRVETIHPTVPNPYTLLSLLPPDRIWYSVLDLKDAFFCIPLAPESQLIFAFEWADAEEGESGQLTWTRLPQGFKNSPTLFDEALNRDLQGFRLDHPSVSLLQYVDDLLIAADTQAACLSATRDLLMTLAELGYRVSGKKAQLCQEEVTYLGFKIHKGSRSLSNSRTQAILQIPVPKTKRQVREFLGTIGYCRLWIPGFAELAQPLYAATRGGNDPLVWGEKEEEAFQSLKLALTQPPALALPSLDKPFQLFVEETSGAAKGVLTQALGPWKRPVAYLSKRLDPVAAGWPRCLRAIAAAALLTREASKLTFGQDIEITSSHNLESLLRSPPDKWLTNARITQYQVLLLDPPRVRFKQTAALNPATLLPETDDTLPIHHCLDTLDSLTSTRPDLTDQPLAQAEATLFTDGSSYIRDGKRYAGAAVVTLDSVIWAEPLPIGTSAQKAELIALTKALEWSKDKSVNIYTDSRYAFATLHVHGMIYRERGLLTAGGKAIKNAPEILALLTAVWLPKRVAVMHCKGHQKDDAPTSTGNRRADEVAREVAIRPLSTQATISAGKRTADGSEFEKRTADGSEFESPKKKAKVE

SEQ ID NO: 15 - protein, 2096 aa, synthetic construct
MPAAKRVKLDGGDKKYSIGLDIGTNSVGWAVITDEYKVPSKKFKVLGNTDRHSIKKNLIGALLFDSGETAEATRLKRTARRRYTRRKNRICYLQEIFSNEMAKVDDSFFHRLEESFLVEEDKKHERHPIFGNIVDEVAYHEKYPTIYHLRKKLVDSTDKADLRLIYLALAHMIKFRGHFLIEGDLNPDNSDVDKLFIQLVQTYNQLFEENPINASGVDAKAILSARLSKSRRLENLIAQLPGEKKNGLFGNLIALSLGLTPNFKSNFDLAEDAKLQLSKDTYDDDLDNLLAQIGDQYADLFLAAKNLSDAILLSDILRVNTEITKAPLSASMIKRYDEHHQDLTLLKALVRQQLPEKYKEIFFDQSKNGYAGYIDGGASQEEFYKFIKPILEKMDGTEELLVKLNREDLLRKQRTFDNGSIPHQIHLGELHAILRRQEDFYPFLKDNREKIEKILTFRIPYYVGPLARGNSRFAWMTRKSEETITPWNFEEVVDKGASAQSFIERMTNFDKNLPNEKVLPKHSLLYEYFTVYNELTKVKYVTEGMRKPAFLSGEQKKAIVDLLFKTNRKVTVKQLKEDYFKKIECFDSVEISGVEDRFNASLGTYHDLLKIIKDKDFLDNEENEDILEDIVLTLTLFEDREMIEERLKTYAHLFDDKVMKQLKRRRYTGWGRLSRKLINGIRDKQSGKTILDFLKSDGFANRNFMQLIHDDSLTFKEDIQKAQVSGQGDSLHEHIANLAGSPAIKKGILQTVKVVDELVKVMGRHKPENIVIEMARENQTTQKGQKNSRERMKRIEEGIKELGSQILKEHPVENTQLQNEKLYLYYLQNGRDMYVDQELDINRLSDYDVDHIVPQSFLKDDSIDNKVLTRSDKARGKSDNVPSEEVVKKMKNYWRQLLNAKLITQRKFDNLTKAERGGLSELDKAGFIKRQLVETRQITKHVAQILDSRMNTKYDENDKLIREVKVITLKSKLVSDFRKDFQFYKVREINNYHHAHDAYLNAVVGTALIKKYPKLESEFVYGDYKVYDVRKMIAKSEQEIGKATAKYFFYSNIMNFFKTEITLANGEIRKRPLIETNGETGEIVWDKGRDFATVRKVLSMPQVNIVKKTEVQTGGFSKESILPKRNSDKLIARKKDWDPKKYGGFDSPTVAYSVLVVAKVEKGKSKKLKSVKELLGITIMERSSFEKNPIDFLEAKGYKEVKKDLIIKLPKYSLFELENGRKRMLASAGELQKGNELALPSKYVNFLYLASHYEKLKGSPEDNEQKQLFVEQHKHYLDEIIEQISEFSKRVILADANLDKVLSAYNKHRDKPIREQAENIIHLFTLTNLGAPAAFKYFDTTIDRKRYTSTKEVLDATLIHQSITGLYETRIDLSQLGGDGGGGGPAPGGSGGTAPLEEEYRLFLEAPIQNVTLLEQWKREIPKVWAEINPPGLASTQAPIHVQLLSTALPVRVRQYPITLEAKRSLRETIRKFRAAGILRPVHSPWNTPLLPVRKSGTSEYRMVQDLREVNKRVETIHPTVPNPYTLLSLLPPDRIWYSVLDLKDAFFCIPLAPESQLIFAFEWADAEEGESGQLTWTRLPQGFKNSPTLFDEALNRDLQGFRLDHPSVSLLQYVDDLLIAADTQAACLSATRDLLMTLAELGYRVSGKKAQLCQEEVTYLGFKIHKGSRSLSNSRTQAILQIPVPKTKRQVREFLGTIGYCRLWIPGFAELAQPLYAATRGGNDPLVWGEKEEEAFQSLKLALTQPPALALPSLDKPFQLFVEETSGAAKGVLTQALGPWKRPVAYLSKRLDPVAAGWPRCLRAIAAAALLTREASKLTFGQDIEITSSHNLESLLRSPPDKWLTNARITQYQVLLLDPPRVRFKQTAALNPATLLPETDDTLPIHHCLDTLDSLTSTRPDLTDQPLAQAEATLFTDGSSYIRDGKRYAGAAVVTLDSVIWAEPLPIGTSAQKAELIALTKALEWSKDKSVNIYTDSRYAFATLHVHGMIYRERGLLTAGGKAIKNAPEILALLTAVWLPKRVAVMHCKGHQKDDAPTSTGNRRADEVAREVAIRPLSTQATISAGKRTADGSEFEKRTADGSEFESPKKKAKVE

SEQ ID NO: 16 - protein, 2098 aa, synthetic construct
MPAAKRVKLDGGDKKYSIGLDIGTNSVGWAVITDEYKVPSKKFKVLGNTDRHSIKKNLIGALLFDSGETAEATRLKRTARRRYTRRKNRICYLQEIFSNEMAKVDDSFFHRLEESFLVEEDKKHERHPIFGNIVDEVAYHEKYPTIYHLRKKLVDSTDKADLRLIYLALAHMIKFRGHFLIEGDLNPDNSDVDKLFIQLVQTYNQLFEENPINASGVDAKAILSARLSKSRRLENLIAQLPGEKKNGLFGNLIALSLGLTPNFKSNFDLAEDAKLQLSKDTYDDDLDNLLAQIGDQYADLFLAAKNLSDAILLSDILRVNTEITKAPLSASMIKRYDEHHQDLTLLKALVRQQLPEKYKEIFFDQSKNGYAGYIDGGASQEEFYKFIKPILEKMDGTEELLVKLNREDLLRKQRTFDNGSIPHQIHLGELHAILRRQEDFYPFLKDNREKIEKILTFRIPYYVGPLARGNSRFAWMTRKSEETITPWNFEEVVDKGASAQSFIERMTNFDKNLPNEKVLPKHSLLYEYFTVYNELTKVKYVTEGMRKPAFLSGEQKKAIVDLLFKTNRKVTVKQLKEDYFKKIECFDSVEISGVEDRFNASLGTYHDLLKIIKDKDFLDNEENEDILEDIVLTLTLFEDREMIEERLKTYAHLFDDKVMKQLKRRRYTGWGRLSRKLINGIRDKQSGKTILDFLKSDGFANRNFMQLIHDDSLTFKEDIQKAQVSGQGDSLHEHIANLAGSPAIKKGILQTVKVVDELVKVMGRHKPENIVIEMARENQTTQKGQKNSRERMKRIEEGIKELGSQILKEHPVENTQLQNEKLYLYYLQNGRDMYVDQELDINRLSDYDVDHIVPQSFLKDDSIDNKVLTRSDKARGKSDNVPSEEVVKKMKNYWRQLLNAKLITQRKFDNLTKAERGGLSELDKAGFIKRQLVETRQITKHVAQILDSRMNTKYDENDKLIREVKVITLKSKLVSDFRKDFQFYKVREINNYHHAHDAYLNAVVGTALIKKYPKLESEFVYGDYKVYDVRKMIAKSEQEIGKATAKYFFYSNIMNFFKTEITLANGEIRKRPLIETNGETGEIVWDKGRDFATVRKVLSMPQVNIVKKTEVQTGGFSKESILPKRNSDKLIARKKDWDPKKYGGFDSPTVAYSVLVVAKVEKGKSKKLKSVKELLGITIMERSSFEKNPIDFLEAKGYKEVKKDLIIKLPKYSLFELENGRKRMLASAGELQKGNELALPSKYVNFLYLASHYEKLKGSPEDNEQKQLFVEQHKHYLDEIIEQISEFSKRVILADANLDKVLSAYNKHRDKPIREQAENIIHLFTLTNLGAPAAFKYFDTTIDRKRYTSTKEVLDATLIHQSITGLYETRIDLSQLGGDGGGSSGGGEAAAKGGTAPLEEEYRLFLEAPIQNVTLLEQWKREIPKVWAEINPPGLASTQAPIHVQLLSTALPVRVRQYPITLEAKRSLRETIRKFRAAGILRPVHSPWNTPLLPVRKSGTSEYRMVQDLREVNKRVETIHPTVPNPYTLLSLLPPDRIWYSVLDLKDAFFCIPLAPESQLIFAFEWADAEEGESGQLTWTRLPQGFKNSPTLFDEALNRDLQGFRLDHPSVSLLQYVDDLLIAADTQAACLSATRDLLMTLAELGYRVSGKKAQLCQEEVTYLGFKIHKGSRSLSNSRTQAILQIPVPKTKRQVREFLGTIGYCRLWIPGFAELAQPLYAATRGGNDPLVWGEKEEEAFQSLKLALTQPPALALPSLDKPFQLFVEETSGAAKGVLTQALGPWKRPVAYLSKRLDPVAAGWPRCLRAIAAAALLTREASKLTFGQDIEITSSHNLESLLRSPPDKWLTNARITQYQVLLLDPPRVRFKQTAALNPATLLPETDDTLPIHHCLDTLDSLTSTRPDLTDQPLAQAEATLFTDGSSYIRDGKRYAGAAVVTLDSVIWAEPLPIGTSAQKAELIALTKALEWSKDKSVNIYTDSRYAFATLHVHGMIYRERGLLTAGGKAIKNAPEILALLTAVWLPKRVAVMHCKGHQKDDAPTSTGNRRADEVAREVAIRPLSTQATISAGKRTADGSEFEKRTADGSEFESPKKKAKVE

SEQ ID NO: 17 - protein, 1998 aa, synthetic construct
MPAAKRVKLDGGDKKYSIGLDIGTNSVGWAVITDEYKVPSKKFKVLGNTDRHSIKKNLIGALLFDSGETAEATRLKRTARRRYTRRKNRICYLQEIFSNEMAKVDDSFFHRLEESFLVEEDKKHERHPIFGNIVDEVAYHEKYPTIYHLRKKLVDSTDKADLRLIYLALAHMIKFRGHFLIEGDLNPDNSDVDKLFIQLVQTYNQLFEENPINASGVDAKAILSARLSKSRRLENLIAQLPGEKKNGLFGNLIALSLGLTPNFKSNFDLAEDAKLQLSKDTYDDDLDNLLAQIGDQYADLFLAAKNLSDAILLSDILRVNTEITKAPLSASMIKRYDEHHQDLTLLKALVRQQLPEKYKEIFFDQSKNGYAGYIDGGASQEEFYKFIKPILEKMDGTEELLVKLNREDLLRKQRTFDNGSIPHQIHLGELHAILRRQEDFYPFLKDNREKIEKILTFRIPYYVGPLARGNSRFAWMTRKSEETITPWNFEEVVDKGASAQSFIERMTNFDKNLPNEKVLPKHSLLYEYFTVYNELTKVKYVTEGMRKPAFLSGEQKKAIVDLLFKTNRKVTVKQLKEDYFKKIECFDSVEISGVEDRFNASLGTYHDLLKIIKDKDFLDNEENEDILEDIVLTLTLFEDREMIEERLKTYAHLFDDKVMKQLKRRRYTGWGRLSRKLINGIRDKQSGKTILDFLKSDGFANRNFMQLIHDDSLTFKEDIQKAQVSGQGDSLHEHIANLAGSPAIKKGILQTVKVVDELVKVMGRHKPENIVIEMARENQTTQKGQKNSRERMKRIEEGIKELGSQILKEHPVENTQLQNEKLYLYYLQNGRDMYVDQELDINRLSDYDVDHIVPQSFLKDDSIDNKVLTRSDKARGKSDNVPSEEVVKKMKNYWRQLLNAKLITQRKFDNLTKAERGGLSELDKAGFIKRQLVETRQITKHVAQILDSRMNTKYDENDKLIREVKVITLKSKLVSDFRKDFQFYKVREINNYHHAHDAYLNAVVGTALIKKYPKLESEFVYGDYKVYDVRKMIAKSEQEIGKATAKYFFYSNIMNFFKTEITLANGEIRKRPLIETNGETGEIVWDKGRDFATVRKVLSMPQVNIVKKTEVQTGGFSKESILPKRNSDKLIARKKDWDPKKYGGFDSPTVAYSVLVVAKVEKGKSKKLKSVKELLGITIMERSSFEKNPIDFLEAKGYKEVKKDLIIKLPKYSLFELENGRKRMLASAGELQKGNELALPSKYVNFLYLASHYEKLKGSPEDNEQKQLFVEQHKHYLDEIIEQISEFSKRVILADANLDKVLSAYNKHRDKPIREQAENIIHLFTLTNLGAPAAFKYFDTTIDRKRYTSTKEVLDATLIHQSITGLYETRIDLSQLGGDGGPAPEAAAKGGGVLDTPPSHIGLEHLPPPPEVPQFPLNLERLQALQDLVHRSLEAGYISPWDGPGNNPVFPVRKPNGAWRFVHDLRATNALTKPIPALSPGPPDLTAIPTHPPHIICLDLKDAFFQIPVEDRFRFYLSFTLPSPGGLQPHRRFAWRVLPQGFINSPALFERALQEPLRQVSAAFSQSLLVSYMDDILYASPTEEQRSQCYQALAARLRDLGFQVASEKTSQTPSPVPFLGQMVHEQIVTYQSLPTLQISSPISLHQLQAVLGDLQWVSRGTPTTRRPLQLLYSSLKRHHDPRAIIQLSPEQLQGIAELRQALSHNARSRYNEQEPLLAYVHLTRAGSTLVLFQKGAQFPLAYFQTPLTDNQASPWGLLLLLGCQYLQTQALSSYAKPILKYYHNLPKTSLDNWIQSSEDPRVQELLQLWPQISSQGIQPPGPWKTLITRAEVFLTPQFSPDPIPAALCLFSDGATGRGAYCLWKDHLLDFQAVPAPESAQKGELAGLLAGLAAAPPEPVNIWVDSKYLYSLLRTLVLGAWLQPDPVPSYALLYKSLLRHPAIVVGHVRSHSSASHPIASLNNYVDQLAGKRTADGSEFEKRTADGSEFESPKKKAKVE

SEQ ID NO: 18 - protein, 2116 aa, synthetic construct
MPAAKRVKLDGGDKKYSIGLDIGTNSVGWAVITDEYKVPSKKFKVLGNTDRHSIKKNLIGALLFDSGETAEATRLKRTARRRYTRRKNRICYLQEIFSNEMAKVDDSFFHRLEESFLVEEDKKHERHPIFGNIVDEVAYHEKYPTIYHLRKKLVDSTDKADLRLIYLALAHMIKFRGHFLIEGDLNPDNSDVDKLFIQLVQTYNQLFEENPINASGVDAKAILSARLSKSRRLENLIAQLPGEKKNGLFGNLIALSLGLTPNFKSNFDLAEDAKLQLSKDTYDDDLDNLLAQIGDQYADLFLAAKNLSDAILLSDILRVNTEITKAPLSASMIKRYDEHHQDLTLLKALVRQQLPEKYKEIFFDQSKNGYAGYIDGGASQEEFYKFIKPILEKMDGTEELLVKLNREDLLRKQRTFDNGSIPHQIHLGELHAILRRQEDFYPFLKDNREKIEKILTFRIPYYVGPLARGNSRFAWMTRKSEETITPWNFEEVVDKGASAQSFIERMTNFDKNLPNEKVLPKHSLLYEYFTVYNELTKVKYVTEGMRKPAFLSGEQKKAIVDLLFKTNRKVTVKQLKEDYFKKIECFDSVEISGVEDRFNASLGTYHDLLKIIKDKDFLDNEENEDILEDIVLTLTLFEDREMIEERLKTYAHLFDDKVMKQLKRRRYTGWGRLSRKLINGIRDKQSGKTILDFLKSDGFANRNFMQLIHDDSLTFKEDIQKAQVSGQGDSLHEHIANLAGSPAIKKGILQTVKVVDELVKVMGRHKPENIVIEMARENQTTQKGQKNSRERMKRIEEGIKELGSQILKEHPVENTQLQNEKLYLYYLQNGRDMYVDQELDINRLSDYDVDHIVPQSFLKDDSIDNKVLTRSDKARGKSDNVPSEEVVKKMKNYWRQLLNAKLITQRKFDNLTKAERGGLSELDKAGFIKRQLVETRQITKHVAQILDSRMNTKYDENDKLIREVKVITLKSKLVSDFRKDFQFYKVREINNYHHAHDAYLNAVVGTALIKKYPKLESEFVYGDYKVYDVRKMIAKSEQEIGKATAKYFFYSNIMNFFKTEITLANGEIRKRPLIETNGETGEIVWDKGRDFATVRKVLSMPQVNIVKKTEVQTGGFSKESILPKRNSDKLIARKKDWDPKKYGGFDSPTVAYSVLVVAKVEKGKSKKLKSVKELLGITIMERSSFEKNPIDFLEAKGYKEVKKDLIIKLPKYSLFELENGRKRMLASAGELQKGNELALPSKYVNFLYLASHYEKLKGSPEDNEQKQLFVEQHKHYLDEIIEQISEFSKRVILADANLDKVLSAYNKHRDKPIREQAENIIHLFTLTNLGAPAAFKYFDTTIDRKRYTSTKEVLDATLIHQSITGLYETRIDLSQLGGDGGEAAAKPAPGGGGGWVQEISDSRPMLHIYLNGRRFLGLLNTGADKTCIAGRDWPANWPIHQTESSLQGLGMACGVARSSQPLRWQHEDKSGIIHPFVIPTLPFTLWGRDIMKDIKVRLMTDSPDDSQDLMIGAIESNLFADQISWKSDQPVWLNQWPLKQEKLQALQQLVTEQLQLGHLEESNSPWNTPVFVIKKKSGKWRLLQDLRAVNATMHDMGALQPGLPSPVAPPKGWEIIIIDLQDCFFNIKLHPEDCKRFAFSVPSPNFKRPYQRFQWKVLPQGMKNSPTLCQKFVDKAILTVRDKYQDSYIVHYMDDILLAHPSRSIVDEILTSMIQALNKHGLVVSTEKIQKYDNLKYLGTHIQGDSVSYQKLQIRTDKLRTLNDFQKLLGNINWIRPFLKLTTGELKPLFEILNPDSNPISTRKLTPEACKALQLMNERLSTARVKRLDLSQPWSLCILKTEYTPTACLWQDGVVEWIHLPHISPKVITPYDIFCTQLIIKGRHRSKELFSKDPDYIVVPYTKVQFDLLLQEKEDWPISLLGFLGEVHFHLPKDPLLTFTLQTAIIFPHMTSTTPLEKGIVIFTDGSANGRSVTYIQGREPIIKENTQNTAQQAEIVAVITAFEEVSQPFNLYTDSKYVTGLFPEIETATLSPRTKIYTELKHLQRLIHKRQEKFYIGHIRGHTGLPGPLAQGNAYADSLTRILTAGKRTADGSEFEKRTADGSEFESPKKKAKVE

SEQ ID NO: 19 - protein, 2114 aa, synthetic construct
MPAAKRVKLDGGDKKYSIGLDIGTNSVGWAVITDEYKVPSKKFKVLGNTDRHSIKKNLIGALLFDSGETAEATRLKRTARRRYTRRKNRICYLQEIFSNEMAKVDDSFFHRLEESFLVEEDKKHERHPIFGNIVDEVAYHEKYPTIYHLRKKLVDSTDKADLRLIYLALAHMIKFRGHFLIEGDLNPDNSDVDKLFIQLVQTYNQLFEENPINASGVDAKAILSARLSKSRRLENLIAQLPGEKKNGLFGNLIALSLGLTPNFKSNFDLAEDAKLQLSKDTYDDDLDNLLAQIGDQYADLFLAAKNLSDAILLSDILRVNTEITKAPLSASMIKRYDEHHQDLTLLKALVRQQLPEKYKEIFFDQSKNGYAGYIDGGASQEEFYKFIKPILEKMDGTEELLVKLNREDLLRKQRTFDNGSIPHQIHLGELHAILRRQEDFYPFLKDNREKIEKILTFRIPYYVGPLARGNSRFAWMTRKSEETITPWNFEEVVDKGASAQSFIERMTNFDKNLPNEKVLPKHSLLYEYFTVYNELTKVKYVTEGMRKPAFLSGEQKKAIVDLLFKTNRKVTVKQLKEDYFKKIECFDSVEISGVEDRFNASLGTYHDLLKIIKDKDFLDNEENEDILEDIVLTLTLFEDREMIEERLKTYAHLFDDKVMKQLKRRRYTGWGRLSRKLINGIRDKQSGKTILDFLKSDGFANRNFMQLIHDDSLTFKEDIQKAQVSGQGDSLHEHIANLAGSPAIKKGILQTVKVVDELVKVMGRHKPENIVIEMARENQTTQKGQKNSRERMKRIEEGIKELGSQILKEHPVENTQLQNEKLYLYYLQNGRDMYVDQELDINRLSDYDVDHIVPQSFLKDDSIDNKVLTRSDKARGKSDNVPSEEVVKKMKNYWRQLLNAKLITQRKFDNLTKAERGGLSELDKAGFIKRQLVETRQITKHVAQILDSRMNTKYDENDKLIREVKVITLKSKLVSDFRKDFQFYKVREINNYHHAHDAYLNAVVGTALIKKYPKLESEFVYGDYKVYDVRKMIAKSEQEIGKATAKYFFYSNIMNFFKTEITLANGEIRKRPLIETNGETGEIVWDKGRDFATVRKVLSMPQVNIVKKTEVQTGGFSKESILPKRNSDKLIARKKDWDPKKYGGFDSPTVAYSVLVVAKVEKGKSKKLKSVKELLGITIMERSSFEKNPIDFLEAKGYKEVKKDLIIKLPKYSLFELENGRKRMLASAGELQKGNELALPSKYVNFLYLASHYEKLKGSPEDNEQKQLFVEQHKHYLDEIIEQISEFSKRVILADANLDKVLSAYNKHRDKPIREQAENIIHLFTLTNLGAPAAFKYFDTTIDRKRYTSTKEVLDATLIHQSITGLYETRIDLSQLGGDGGPAPGGGGGSGGWVQEISDSRPMLHIYLNGRRFLGLLNTGADKTCIAGRDWPANWPIHQTESSLQGLGMACGVARSSQPLRWQHEDKSGIIHPFVIPTLPFTLWGRDIMKDIKVRLMTDSPDDSQDLMIGAIESNLFADQISWKSDQPVWLNQWPLKQEKLQALQQLVTEQLQLGHLEESNSPWNTPVFVIKKKSGKWRLLQDLRAVNATMHDMGALQPGLPSPVAPPKGWEIIIIDLQDCFFNIKLHPEDCKRFAFSVPSPNFKRPYQRFQWKVLPQGMKNSPTLCQKFVDKAILTVRDKYQDSYIVHYMDDILLAHPSRSIVDEILTSMIQALNKHGLVVSTEKIQKYDNLKYLGTHIQGDSVSYQKLQIRTDKLRTLNDFQKLLGNINWIRPFLKLTTGELKPLFEILNPDSNPISTRKLTPEACKALQLMNERLSTARVKRLDLSQPWSLCILKTEYTPTACLWQDGVVEWIHLPHISPKVITPYDIFCTQLIIKGRHRSKELFSKDPDYIVVPYTKVQFDLLLQEKEDWPISLLGFLGEVHFHLPKDPLLTFTLQTAIIFPHMTSTTPLEKGIVIFTDGSANGRSVTYIQGREPIIKENTQNTAQQAEIVAVITAFEEVSQPFNLYTDSKYVTGLFPEIETATLSPRTKIYTELKHLQRLIHKRQEKFYIGHIRGHTGLPGPLAQGNAYADSLTRILTAGKRTADGSEFEKRTADGSEFESPKKKAKVE

SEQ ID NO: 20 - protein, 2114 aa, synthetic construct
MPAAKRVKLDGGDKKYSIGLDIGTNSVGWAVITDEYKVPSKKFKVLGNTDRHSIKKNLIGALLFDSGETAEATRLKRTARRRYTRRKNRICYLQEIFSNEMAKVDDSFFHRLEESFLVEEDKKHERHPIFGNIVDEVAYHEKYPTIYHLRKKLVDSTDKADLRLIYLALAHMIKFRGHFLIEGDLNPDNSDVDKLFIQLVQTYNQLFEENPINASGVDAKAILSARLSKSRRLENLIAQLPGEKKNGLFGNLIALSLGLTPNFKSNFDLAEDAKLQLSKDTYDDDLDNLLAQIGDQYADLFLAAKNLSDAILLSDILRVNTEITKAPLSASMIKRYDEHHQDLTLLKALVRQQLPEKYKEIFFDQSKNGYAGYIDGGASQEEFYKFIKPILEKMDGTEELLVKLNREDLLRKQRTFDNGSIPHQIHLGELHAILRRQEDFYPFLKDNREKIEKILTFRIPYYVGPLARGNSRFAWMTRKSEETITPWNFEEVVDKGASAQSFIERMTNFDKNLPNEKVLPKHSLLYEYFTVYNELTKVKYVTEGMRKPAFLSGEQKKAIVDLLFKTNRKVTVKQLKEDYFKKIECFDSVEISGVEDRFNASLGTYHDLLKIIKDKDFLDNEENEDILEDIVLTLTLFEDREMIEERLKTYAHLFDDKVMKQLKRRRYTGWGRLSRKLINGIRDKQSGKTILDFLKSDGFANRNFMQLIHDDSLTFKEDIQKAQVSGQGDSLHEHIANLAGSPAIKKGILQTVKVVDELVKVMGRHKPENIVIEMARENQTTQKGQKNSRERMKRIEEGIKELGSQILKEHPVENTQLQNEKLYLYYLQNGRDMYVDQELDINRLSDYDVDHIVPQSFLKDDSIDNKVLTRSDKARGKSDNVPSEEVVKKMKNYWRQLLNAKLITQRKFDNLTKAERGGLSELDKAGFIKRQLVETRQITKHVAQILDSRMNTKYDENDKLIREVKVITLKSKLVSDFRKDFQFYKVREINNYHHAHDAYLNAVVGTALIKKYPKLESEFVYGDYKVYDVRKMIAKSEQEIGKATAKYFFYSNIMNFFKTEITLANGEIRKRPLIETNGETGEIVWDKGRDFATVRKVLSMPQVNIVKKTEVQTGGFSKESILPKRNSDKLIARKKDWDPKKYGGFDSPTVAYSVLVVAKVEKGKSKKLKSVKELLGITIMERSSFEKNPIDFLEAKGYKEVKKDLIIKLPKYSLFELENGRKRMLASAGELQKGNELALPSKYVNFLYLASHYEKLKGSPEDNEQKQLFVEQHKHYLDEIIEQISEFSKRVILADANLDKVLSAYNKHRDKPIREQAENIIHLFTLTNLGAPAAFKYFDTTIDRKRYTSTKEVLDATLIHQSITGLYETRIDLSQLGGDGGGGSGSSGGGGGWVQEISDSRPMLHIYLNGRRFLGLLNTGADKTCIAGRDWPANWPIHQTESSLQGLGMACGVARSSQPLRWQHEDKSGIIHPFVIPTLPFTLWGRDIMKDIKVRLMTDSPDDSQDLMIGAIESNLFADQISWKSDQPVWLNQWPLKQEKLQALQQLVTEQLQLGHLEESNSPWNTPVFVIKKKSGKWRLLQDLRAVNATMHDMGALQPGLPSPVAPPKGWEIIIIDLQDCFFNIKLHPEDCKRFAFSVPSPNFKRPYQRFQWKVLPQGMKNSPTLCQKFVDKAILTVRDKYQDSYIVHYMDDILLAHPSRSIVDEILTSMIQALNKHGLVVSTEKIQKYDNLKYLGTHIQGDSVSYQKLQIRTDKLRTLNDFQKLLGNINWIRPFLKLTTGELKPLFEILNPDSNPISTRKLTPEACKALQLMNERLSTARVKRLDLSQPWSLCILKTEYTPTACLWQDGVVEWIHLPHISPKVITPYDIFCTQLIIKGRHRSKELFSKDPDYIVVPYTKVQFDLLLQEKEDWPISLLGFLGEVHFHLPKDPLLTFTLQTAIIFPHMTSTTPLEKGIVIFTDGSANGRSVTYIQGREPIIKENTQNTAQQAEIVAVITAFEEVSQPFNLYTDSKYVTGLFPEIETATLSPRTKIYTELKHLQRLIHKRQEKFYIGHIRGHTGLPGPLAQGNAYADSLTRILTAGKRTADGSEFEKRTADGSEFESPKKKAKVE

SEQ ID NO: 21 - protein, 2116 aa, synthetic construct
MPAAKRVKLDGGDKKYSIGLDIGTNSVGWAVITDEYKVPSKKFKVLGNTDRHSIKKNLIGALLFDSGETAEATRLKRTARRRYTRRKNRICYLQEIFSNEMAKVDDSFFHRLEESFLVEEDKKHERHPIFGNIVDEVAYHEKYPTIYHLRKKLVDSTDKADLRLIYLALAHMIKFRGHFLIEGDLNPDNSDVDKLFIQLVQTYNQLFEENPINASGVDAKAILSARLSKSRRLENLIAQLPGEKKNGLFGNLIALSLGLTPNFKSNFDLAEDAKLQLSKDTYDDDLDNLLAQIGDQYADLFLAAKNLSDAILLSDILRVNTEITKAPLSASMIKRYDEHHQDLTLLKALVRQQLPEKYKEIFFDQSKNGYAGYIDGGASQEEFYKFIKPILEKMDGTEELLVKLNREDLLRKQRTFDNGSIPHQIHLGELHAILRRQEDFYPFLKDNREKIEKILTFRIPYYVGPLARGNSRFAWMTRKSEETITPWNFEEVVDKGASAQSFIERMTNFDKNLPNEKVLPKHSLLYEYFTVYNELTKVKYVTEGMRKPAFLSGEQKKAIVDLLFKTNRKVTVKQLKEDYFKKIECFDSVEISGVEDRFNASLGTYHDLLKIIKDKDFLDNEENEDILEDIVLTLTLFEDREMIEERLKTYAHLFDDKVMKQLKRRRYTGWGRLSRKLINGIRDKQSGKTILDFLKSDGFANRNFMQLIHDDSLTFKEDIQKAQVSGQGDSLHEHIANLAGSPAIKKGILQTVKVVDELVKVMGRHKPENIVIEMARENQTTQKGQKNSRERMKRIEEGIKELGSQILKEHPVENTQLQNEKLYLYYLQNGRDMYVDQELDINRLSDYDVDHIVPQSFLKDDSIDNKVLTRSDKARGKSDNVPSEEVVKKMKNYWRQLLNAKLITQRKFDNLTKAERGGLSELDKAGFIKRQLVETRQITKHVAQILDSRMNTKYDENDKLIREVKVITLKSKLVSDFRKDFQFYKVREINNYHHAHDAYLNAVVGTALIKKYPKLESEFVYGDYKVYDVRKMIAKSEQEIGKATAKYFFYSNIMNFFKTEITLANGEIRKRPLIETNGETGEIVWDKGRDFATVRKVLSMPQVNIVKKTEVQTGGFSKESILPKRNSDKLIARKKDWDPKKYGGFDSPTVAYSVLVVAKVEKGKSKKLKSVKELLGITIMERSSFEKNPIDFLEAKGYKEVKKDLIIKLPKYSLFELENGRKRMLASAGELQKGNELALPSKYVNFLYLASHYEKLKGSPEDNEQKQLFVEQHKHYLDEIIEQISEFSKRVILADANLDKVLSAYNKHRDKPIREQAENIIHLFTLTNLGAPAAFKYFDTTIDRKRYTSTKEVLDATLIHQSITGLYETRIDLSQLGGDGGPAPGGSEAAAKGGVQEISDSRPMLHIYLNGRRFLGLLDTGADKTCIAGRDWPANWPIHQTESSLQGLGMACGVARSSQPLRWQHEDKSGIIHPFVIPTLPFTLWGRDIMKDIKVRLMTDSPDDSQDLMIGAIESNLFADQISWKSDQPVWLNQWPLKQEKLQALQQLVTEQLQLGHLEESNSPWNTPVFVIKKKSGKWRLLQDLRAVNATMHDMGALQPGLPSPPAVPKGWEIIIIDLQDCFFNIKLHPEDCKRFAFSVPSPNFKRPYQRFQWKVLPQGMKNSPTLCQKFVDKAILTVRDKYQDSYIVHYMDDILLAHPSRSIVDEILTSMIQALNKHGLVVSTEKIQKYDNLKYLGTHIQGDSVSYQKLQIRTDKLRTLNDFQKLLGNINWIRPFLKLTTGELKPLFEILNPDSNPISTRKLTPEACKALQLMNERLSTARVKRLDLSQPWSLCILKTEYTPTACLWQDGVVEWIHLPHISPKVITPYDIFCTQLIIKGRHRSKELFSKDPDYIVVPYTKVQFDLLLQEKEDWPISLLGFLGEVHFHLPKDPLLTFTLQTAIIFPHMTSTTPLEKGIVIFTDGSANGRSVTYIQGREPIIKENTQNTAQQAEIVAVITAFEEVSQPFNLYTDSKYVTGLFPEIETATLSPRTKIYTELKHLQRLIHKRQEKFYIGHIRGHTGLPGPLAQGNAYADSLTRILTAAGKRTADGSEFEKRTADGSEFESPKKKAKVE

SEQ ID NO: 22 - protein, 2116 aa, synthetic construct
MPAAKRVKLDGGDKKYSIGLDIGTNSVGWAVITDEYKVPSKKFKVLGNTDRHSIKKNLIGALLFDSGETAEATRLKRTARRRYTRRKNRICYLQEIFSNEMAKVDDSFFHRLEESFLVEEDKKHERHPIFGNIVDEVAYHEKYPTIYHLRKKLVDSTDKADLRLIYLALAHMIKFRGHFLIEGDLNPDNSDVDKLFIQLVQTYNQLFEENPINASGVDAKAILSARLSKSRRLENLIAQLPGEKKNGLFGNLIALSLGLTPNFKSNFDLAEDAKLQLSKDTYDDDLDNLLAQIGDQYADLFLAAKNLSDAILLSDILRVNTEITKAPLSASMIKRYDEHHQDLTLLKALVRQQLPEKYKEIFFDQSKNGYAGYIDGGASQEEFYKFIKPILEKMDGTEELLVKLNREDLLRKQRTFDNGSIPHQIHLGELHAILRRQEDFYPFLKDNREKIEKILTFRIPYYVGPLARGNSRFAWMTRKSEETITPWNFEEVVDKGASAQSFIERMTNFDKNLPNEKVLPKHSLLYEYFTVYNELTKVKYVTEGMRKPAFLSGEQKKAIVDLLFKTNRKVTVKQLKEDYFKKIECFDSVEISGVEDRFNASLGTYHDLLKIIKDKDFLDNEENEDILEDIVLTLTLFEDREMIEERLKTYAHLFDDKVMKQLKRRRYTGWGRLSRKLINGIRDKQSGKTILDFLKSDGFANRNFMQLIHDDSLTFKEDIQKAQVSGQGDSLHEHIANLAGSPAIKKGILQTVKVVDELVKVMGRHKPENIVIEMARENQTTQKGQKNSRERMKRIEEGIKELGSQILKEHPVENTQLQNEKLYLYYLQNGRDMYVDQELDINRLSDYDVDHIVPQSFLKDDSIDNKVLTRSDKARGKSDNVPSEEVVKKMKNYWRQLLNAKLITQRKFDNLTKAERGGLSELDKAGFIKRQLVETRQITKHVAQILDSRMNTKYDENDKLIREVKVITLKSKLVSDFRKDFQFYKVREINNYHHAHDAYLNAVVGTALIKKYPKLESEFVYGDYKVYDVRKMIAKSEQEIGKATAKYFFYSNIMNFFKTEITLANGEIRKRPLIETNGETGEIVWDKGRDFATVRKVLSMPQVNIVKKTEVQTGGFSKESILPKRNSDKLIARKKDWDPKKYGGFDSPTVAYSVLVVAKVEKGKSKKLKSVKELLGITIMERSSFEKNPIDFLEAKGYKEVKKDLIIKLPKYSLFELENGRKRMLASAGELQKGNELALPSKYVNFLYLASHYEKLKGSPEDNEQKQLFVEQHKHYLDEIIEQISEFSKRVILADANLDKVLSAYNKHRDKPIREQAENIIHLFTLTNLGAPAAFKYFDTTIDRKRYTSTKEVLDATLIHQSITGLYETRIDLSQLGGDGGGGSEAAAKGGGGGVQEISDSRPMLHIYLNGRRFLGLLDTGADKTCIAGRDWPANWPIHQTESSLQGLGMACGVARSSQPLRWQHEDKSGIIHPFVIPTLPFTLWGRDIMKDIKVRLMTDSPDDSQDLMIGAIESNLFADQISWKSDQPVWLNQWPLKQEKLQALQQLVTEQLQLGHLEESNSPWNTPVFVIKKKSGKWRLLQDLRAVNATMHDMGALQPGLPSPPAVPKGWEIIIIDLQDCFFNIKLHPEDCKRFAFSVPSPNFKRPYQRFQWKVLPQGMKNSPTLCQKFVDKAILTVRDKYQDSYIVHYMDDILLAHPSRSIVDEILTSMIQALNKHGLVVSTEKIQKYDNLKYLGTHIQGDSVSYQKLQIRTDKLRTLNDFQKLLGNINWIRPFLKLTTGELKPLFEILNPDSNPISTRKLTPEACKALQLMNERLSTARVKRLDLSQPWSLCILKTEYTPTACLWQDGVVEWIHLPHISPKVITPYDIFCTQLIIKGRHRSKELFSKDPDYIVVPYTKVQFDLLLQEKEDWPISLLGFLGEVHFHLPKDPLLTFTLQTAIIFPHMTSTTPLEKGIVIFTDGSANGRSVTYIQGREPIIKENTQNTAQQAEIVAVITAFEEVSQPFNLYTDSKYVTGLFPEIETATLSPRTKIYTELKHLQRLIHKRQEKFYIGHIRGHTGLPGPLAQGNAYADSLTRILTAAGKRTADGSEFEKRTADGSEFESPKKKAKVE

SEQ ID NO: 23 - protein, 2116 aa, synthetic construct
MPAAKRVKLDGGDKKYSIGLDIGTNSVGWAVITDEYKVPSKKFKVLGNTDRHSIKKNLIGALLFDSGETAEATRLKRTARRRYTRRKNRICYLQEIFSNEMAKVDDSFFHRLEESFLVEEDKKHERHPIFGNIVDEVAYHEKYPTIYHLRKKLVDSTDKADLRLIYLALAHMIKFRGHFLIEGDLNPDNSDVDKLFIQLVQTYNQLFEENPINASGVDAKAILSARLSKSRRLENLIAQLPGEKKNGLFGNLIALSLGLTPNFKSNFDLAEDAKLQLSKDTYDDDLDNLLAQIGDQYADLFLAAKNLSDAILLSDILRVNTEITKAPLSASMIKRYDEHHQDLTLLKALVRQQLPEKYKEIFFDQSKNGYAGYIDGGASQEEFYKFIKPILEKMDGTEELLVKLNREDLLRKQRTFDNGSIPHQIHLGELHAILRRQEDFYPFLKDNREKIEKILTFRIPYYVGPLARGNSRFAWMTRKSEETITPWNFEEVVDKGASAQSFIERMTNFDKNLPNEKVLPKHSLLYEYFTVYNELTKVKYVTEGMRKPAFLSGEQKKAIVDLLFKTNRKVTVKQLKEDYFKKIECFDSVEISGVEDRFNASLGTYHDLLKIIKDKDFLDNEENEDILEDIVLTLTLFEDREMIEERLKTYAHLFDDKVMKQLKRRRYTGWGRLSRKLINGIRDKQSGKTILDFLKSDGFANRNFMQLIHDDSLTFKEDIQKAQVSGQGDSLHEHIANLAGSPAIKKGILQTVKVVDELVKVMGRHKPENIVIEMARENQTTQKGQKNSRERMKRIEEGIKELGSQILKEHPVENTQLQNEKLYLYYLQNGRDMYVDQELDINRLSDYDVDHIVPQSFLKDDSIDNKVLTRSDKARGKSDNVPSEEVVKKMKNYWRQLLNAKLITQRKFDNLTKAERGGLSELDKAGFIKRQLVETRQITKHVAQILDSRMNTKYDENDKLIREVKVITLKSKLVSDFRKDFQFYKVREINNYHHAHDAYLNAVVGTALIKKYPKLESEFVYGDYKVYDVRKMIAKSEQEIGKATAKYFFYSNIMNFFKTEITLANGEIRKRPLIETNGETGEIVWDKGRDFATVRKVLSMPQVNIVKKTEVQTGGFSKESILPKRNSDKLIARKKDWDPKKYGGFDSPTVAYSVLVVAKVEKGKSKKLKSVKELLGITIMERSSFEKNPIDFLEAKGYKEVKKDLIIKLPKYSLFELENGRKRMLASAGELQKGNELALPSKYVNFLYLASHYEKLKGSPEDNEQKQLFVEQHKHYLDEIIEQISEFSKRVILADANLDKVLSAYNKHRDKPIREQAENIIHLFTLTNLGAPAAFKYFDTTIDRKRYTSTKEVLDATLIHQSITGLYETRIDLSQLGGDGGGGGGGSEAAAKGGVQEISDSRPMLHIYLNGRRFLGLLDTGADKTCIAGRDWPANWPIHQTESSLQGLGMACGVARSSQPLRWQHEDKSGIIHPFVIPTLPFTLWGRDIMKDIKVRLMTDSPDDSQDLMIGAIESNLFADQISWKSDQPVWLNQWPLKQEKLQALQQLVTEQLQLGHLEESNSPWNTPVFVIKKKSGKWRLLQDLRAVNATMHDMGALQPGLPSPPAVPKGWEIIIIDLQDCFFNIKLHPEDCKRFAFSVPSPNFKRPYQRFQWKVLPQGMKNSPTLCQKFVDKAILTVRDKYQDSYIVHYMDDILLAHPSRSIVDEILTSMIQALNKHGLVVSTEKIQKYDNLKYLGTHIQGDSVSYQKLQIRTDKLRTLNDFQKLLGNINWIRPFLKLTTGELKPLFEILNPDSNPISTRKLTPEACKALQLMNERLSTARVKRLDLSQPWSLCILKTEYTPTACLWQDGVVEWIHLPHISPKVITPYDIFCTQLIIKGRHRSKELFSKDPDYIVVPYTKVQFDLLLQEKEDWPISLLGFLGEVHFHLPKDPLLTFTLQTAIIFPHMTSTTPLEKGIVIFTDGSANGRSVTYIQGREPIIKENTQNTAQQAEIVAVITAFEEVSQPFNLYTDSKYVTGLFPEIETATLSPRTKIYTELKHLQRLIHKRQEKFYIGHIRGHTGLPGPLAQGNAYADSLTRILTAAGKRTADGSEFEKRTADGSEFESPKKKAKVE

SEQ ID NO: 24 - protein, 2116 aa, synthetic construct
MPAAKRVKLDGGDKKYSIGLDIGTNSVGWAVITDEYKVPSKKFKVLGNTDRHSIKKNLIGALLFDSGETAEATRLKRTARRRYTRRKNRICYLQEIFSNEMAKVDDSFFHRLEESFLVEEDKKHERHPIFGNIVDEVAYHEKYPTIYHLRKKLVDSTDKADLRLIYLALAHMIKFRGHFLIEGDLNPDNSDVDKLFIQLVQTYNQLFEENPINASGVDAKAILSARLSKSRRLENLIAQLPGEKKNGLFGNLIALSLGLTPNFKSNFDLAEDAKLQLSKDTYDDDLDNLLAQIGDQYADLFLAAKNLSDAILLSDILRVNTEITKAPLSASMIKRYDEHHQDLTLLKALVRQQLPEKYKEIFFDQSKNGYAGYIDGGASQEEFYKFIKPILEKMDGTEELLVKLNREDLLRKQRTFDNGSIPHQIHLGELHAILRRQEDFYPFLKDNREKIEKILTFRIPYYVGPLARGNSRFAWMTRKSEETITPWNFEEVVDKGASAQSFIERMTNFDKNLPNEKVLPKHSLLYEYFTVYNELTKVKYVTEGMRKPAFLSGEQKKAIVDLLFKTNRKVTVKQLKEDYFKKIECFDSVEISGVEDRFNASLGTYHDLLKIIKDKDFLDNEENEDILEDIVLTLTLFEDREMIEERLKTYAHLFDDKVMKQLKRRRYTGWGRLSRKLINGIRDKQSGKTILDFLKSDGFANRNFMQLIHDDSLTFKEDIQKAQVSGQGDSLHEHIANLAGSPAIKKGILQTVKVVDELVKVMGRHKPENIVIEMARENQTTQKGQKNSRERMKRIEEGIKELGSQILKEHPVENTQLQNEKLYLYYLQNGRDMYVDQELDINRLSDYDVDHIVPQSFLKDDSIDNKVLTRSDKARGKSDNVPSEEVVKKMKNYWRQLLNAKLITQRKFDNLTKAERGGLSELDKAGFIKRQLVETRQITKHVAQILDSRMNTKYDENDKLIREVKVITLKSKLVSDFRKDFQFYKVREINNYHHAHDAYLNAVVGTALIKKYPKLESEFVYGDYKVYDVRKMIAKSEQEIGKATAKYFFYSNIMNFFKTEITLANGEIRKRPLIETNGETGEIVWDKGRDFATVRKVLSMPQVNIVKKTEVQTGGFSKESILPKRNSDKLIARKKDWDPKKYGGFDSPTVAYSVLVVAKVEKGKSKKLKSVKELLGITIMERSSFEKNPIDFLEAKGYKEVKKDLIIKLPKYSLFELENGRKRMLASAGELQKGNELALPSKYVNFLYLASHYEKLKGSPEDNEQKQLFVEQHKHYLDEIIEQISEFSKRVILADANLDKVLSAYNKHRDKPIREQAENIIHLFTLTNLGAPAAFKYFDTTIDRKRYTSTKEVLDATLIHQSITGLYETRIDLSQLGGDGGPAPEAAAKGSSGGVQEISDSRPMLHIYLNGRRFLGLLDTGADKTCIAGRDWPANWPIHQTESSLQGLGMACGVARSSQPLRWQHEDKSGIIHPFVIPTLPFTLWGRDIMKDIKVRLMTDSPDDSQDLMIGAIESNLFADQISWKSDQPVWLNQWPLKQEKLQALQQLVTEQLQLGHLEESNSPWNTPVFVIKKKSGKWRLLQDLRAVNATMHDMGALQPGLPSPPAVPKGWEIIIIDLQDCFFNIKLHPEDCKRFAFSVPSPNFKRPYQRFQWKVLPQGMKNSPTLCQKFVDKAILTVRDKYQDSYIVHYMDDILLAHPSRSIVDEILTSMIQALNKHGLVVSTEKIQKYDNLKYLGTHIQGDSVSYQKLQIRTDKLRTLNDFQKLLGNINWIRPFLKLTTGELKPLFEILNPDSNPISTRKLTPEACKALQLMNERLSTARVKRLDLSQPWSLCILKTEYTPTACLWQDGVVEWIHLPHISPKVITPYDIFCTQLIIKGRHRSKELFSKDPDYIVVPYTKVQFDLLLQEKEDWPISLLGFLGEVHFHLPKDPLLTFTLQTAIIFPHMTSTTPLEKGIVIFTDGSANGRSVTYIQGREPIIKENTQNTAQQAEIVAVITAFEEVSQPFNLYTDSKYVTGLFPEIETATLSPRTKIYTELKHLQRLIHKRQEKFYIGHIRGHTGLPGPLAQGNAYADSLTRILTAAGKRTADGSEFEKRTADGSEFESPKKKAKVE

SEQ ID NO: 25 - protein, 2116 aa, synthetic construct
MPAAKRVKLDGGDKKYSIGLDIGTNSVGWAVITDEYKVPSKKFKVLGNTDRHSIKKNLIGALLFDSGETAEATRLKRTARRRYTRRKNRICYLQEIFSNEMAKVDDSFFHRLEESFLVEEDKKHERHPIFGNIVDEVAYHEKYPTIYHLRKKLVDSTDKADLRLIYLALAHMIKFRGHFLIEGDLNPDNSDVDKLFIQLVQTYNQLFEENPINASGVDAKAILSARLSKSRRLENLIAQLPGEKKNGLFGNLIALSLGLTPNFKSNFDLAEDAKLQLSKDTYDDDLDNLLAQIGDQYADLFLAAKNLSDAILLSDILRVNTEITKAPLSASMIKRYDEHHQDLTLLKALVRQQLPEKYKEIFFDQSKNGYAGYIDGGASQEEFYKFIKPILEKMDGTEELLVKLNREDLLRKQRTFDNGSIPHQIHLGELHAILRRQEDFYPFLKDNREKIEKILTFRIPYYVGPLARGNSRFAWMTRKSEETITPWNFEEVVDKGASAQSFIERMTNFDKNLPNEKVLPKHSLLYEYFTVYNELTKVKYVTEGMRKPAFLSGEQKKAIVDLLFKTNRKVTVKQLKEDYFKKIECFDSVEISGVEDRFNASLGTYHDLLKIIKDKDFLDNEENEDILEDIVLTLTLFEDREMIEERLKTYAHLFDDKVMKQLKRRRYTGWGRLSRKLINGIRDKQSGKTILDFLKSDGFANRNFMQLIHDDSLTFKEDIQKAQVSGQGDSLHEHIANLAGSPAIKKGILQTVKVVDELVKVMGRHKPENIVIEMARENQTTQKGQKNSRERMKRIEEGIKELGSQILKEHPVENTQLQNEKLYLYYLQNGRDMYVDQELDINRLSDYDVDHIVPQSFLKDDSIDNKVLTRSDKARGKSDNVPSEEVVKKMKNYWRQLLNAKLITQRKFDNLTKAERGGLSELDKAGFIKRQLVETRQITKHVAQILDSRMNTKYDENDKLIREVKVITLKSKLVSDFRKDFQFYKVREINNYHHAHDAYLNAVVGTALIKKYPKLESEFVYGDYKVYDVRKMIAKSEQEIGKATAKYFFYSNIMNFFKTEITLANGEIRKRPLIETNGETGEIVWDKGRDFATVRKVLSMPQVNIVKKTEVQTGGFSKESILPKRNSDKLIARKKDWDPKKYGGFDSPTVAYSVLVVAKVEKGKSKKLKSVKELLGITIMERSSFEKNPIDFLEAKGYKEVKKDLIIKLPKYSLFELENGRKRMLASAGELQKGNELALPSKYVNFLYLASHYEKLKGSPEDNEQKQLFVEQHKHYLDEIIEQISEFSKRVILADANLDKVLSAYNKHRDKPIREQAENIIHLFTLTNLGAPAAFKYFDTTIDRKRYTSTKEVLDATLIHQSITGLYETRIDLSQLGGDGGGGSGSSEAAAKGGVQEISDSRPMLHIYLNGRRFLGLLDTGADKTCIAGRDWPANWPIHQTESSLQGLGMACGVARSSQPLRWQHEDKSGIIHPFVIPTLPFTLWGRDIMKDIKVRLMTDSPDDSQDLMIGAIESNLFADQISWKSDQPVWLNQWPLKQEKLQALQQLVTEQLQLGHLEESNSPWNTPVFVIKKKSGKWRLLQDLRAVNATMHDMGALQPGLPSPPAVPKGWEIIIIDLQDCFFNIKLHPEDCKRFAFSVPSPNFKRPYQRFQWKVLPQGMKNSPTLCQKFVDKAILTVRDKYQDSYIVHYMDDILLAHPSRSIVDEILTSMIQALNKHGLVVSTEKIQKYDNLKYLGTHIQGDSVSYQKLQIRTDKLRTLNDFQKLLGNINWIRPFLKLTTGELKPLFEILNPDSNPISTRKLTPEACKALQLMNERLSTARVKRLDLSQPWSLCILKTEYTPTACLWQDGVVEWIHLPHISPKVITPYDIFCTQLIIKGRHRSKELFSKDPDYIVVPYTKVQFDLLLQEKEDWPISLLGFLGEVHFHLPKDPLLTFTLQTAIIFPHMTSTTPLEKGIVIFTDGSANGRSVTYIQGREPIIKENTQNTAQQAEIVAVITAFEEVSQPFNLYTDSKYVTGLFPEIETATLSPRTKIYTELKHLQRLIHKRQEKFYIGHIRGHTGLPGPLAQGNAYADSLTRILTAAGKRTADGSEFEKRTADGSEFESPKKKAKVE

SEQ ID NO: 26 - protein, 2116 aa, synthetic construct
MPAAKRVKLDGGDKKYSIGLDIGTNSVGWAVITDEYKVPSKKFKVLGNTDRHSIKKNLIGALLFDSGETAEATRLKRTARRRYTRRKNRICYLQEIFSNEMAKVDDSFFHRLEESFLVEEDKKHERHPIFGNIVDEVAYHEKYPTIYHLRKKLVDSTDKADLRLIYLALAHMIKFRGHFLIEGDLNPDNSDVDKLFIQLVQTYNQLFEENPINASGVDAKAILSARLSKSRRLENLIAQLPGEKKNGLFGNLIALSLGLTPNFKSNFDLAEDAKLQLSKDTYDDDLDNLLAQIGDQYADLFLAAKNLSDAILLSDILRVNTEITKAPLSASMIKRYDEHHQDLTLLKALVRQQLPEKYKEIFFDQSKNGYAGYIDGGASQEEFYKFIKPILEKMDGTEELLVKLNREDLLRKQRTFDNGSIPHQIHLGELHAILRRQEDFYPFLKDNREKIEKILTFRIPYYVGPLARGNSRFAWMTRKSEETITPWNFEEVVDKGASAQSFIERMTNFDKNLPNEKVLPKHSLLYEYFTVYNELTKVKYVTEGMRKPAFLSGEQKKAIVDLLFKTNRKVTVKQLKEDYFKKIECFDSVEISGVEDRFNASLGTYHDLLKIIKDKDFLDNEENEDILEDIVLTLTLFEDREMIEERLKTYAHLFDDKVMKQLKRRRYTGWGRLSRKLINGIRDKQSGKTILDFLKSDGFANRNFMQLIHDDSLTFKEDIQKAQVSGQGDSLHEHIANLAGSPAIKKGILQTVKVVDELVKVMGRHKPENIVIEMARENQTTQKGQKNSRERMKRIEEGIKELGSQILKEHPVENTQLQNEKLYLYYLQNGRDMYVDQELDINRLSDYDVDHIVPQSFLKDDSIDNKVLTRSDKARGKSDNVPSEEVVKKMKNYWRQLLNAKLITQRKFDNLTKAERGGLSELDKAGFIKRQLVETRQITKHVAQILDSRMNTKYDENDKLIREVKVITLKSKLVSDFRKDFQFYKVREINNYHHAHDAYLNAVVGTALIKKYPKLESEFVYGDYKVYDVRKMIAKSEQEIGKATAKYFFYSNIMNFFKTEITLANGEIRKRPLIETNGETGEIVWDKGRDFATVRKVLSMPQVNIVKKTEVQTGGFSKESILPKRNSDKLIARKKDWDPKKYGGFDSPTVAYSVLVVAKVEKGKSKKLKSVKELLGITIMERSSFEKNPIDFLEAKGYKEVKKDLIIKLPKYSLFELENGRKRMLASAGELQKGNELALPSKYVNFLYLASHYEKLKGSPEDNEQKQLFVEQHKHYLDEIIEQISEFSKRVILADANLDKVLSAYNKHRDKPIREQAENIIHLFTLTNLGAPAAFKYFDTTIDRKRYTSTKEVLDATLIHQSITGLYETRIDLSQLGGDGGEAAAKGGSGSSGGVQEISDSRPMLHIYLNGRRFLGLLDTGADKTCIAGRDWPANWPIHQTESSLQGLGMACGVARSSQPLRWQHEDKSGIIHPFVIPTLPFTLWGRDIMKDIKVRLMTDSPDDSQDLMIGAIESNLFADQISWKSDQPVWLNQWPLKQEKLQALQQLVTEQLQLGHLEESNSPWNTPVFVIKKKSGKWRLLQDLRAVNATMHDMGALQPGLPSPVAVPKGWEIIIIDLQDCFFNIKLHPEDCKRFAFSVPSPNFKRPYQRFQWKVLPQGMKNSPTLCQKFVDKAILTVRDKYQDSYIVHYMDDILLAHPSRSIVDEILTSMIQALNKHGLVVSTEKIQKYDNLKYLGTHIQGDSVSYQKLQIRTDKLRTLNDFQKLLGNINWIRPFLKLTTGELKPLFEILNPDSNPISTRKLTPEACKALQLMNERLSTARVKRLDLSQPWSLCILKTEYTPTACLWQDGVVEWIHLPHISPKVITPYDIFCTQLIIKGRHRSKELFSKDPDYIVVPYTKVQFDLLLQEKEDWPISLLGFLGEVHFHLPKDPLLTFTLQTAIIFPHMTSTTPLEKGIVIFTDGSANGRSVTYIQGREPIIKENTQNTAQQAEIVAVITAFEEVSQPFNLYTDSKYVTGLFPEIETATLSPRTKIYTELKHLQRLIHKRQEKFYIGHIRGHTGLPGPLAQGNAYADSLTRILTAAGKRTADGSEFEKRTADGSEFESPKKKAKVE

SEQ ID NO: 27 - protein, 2116 aa, synthetic construct
MPAAKRVKLDGGDKKYSIGLDIGTNSVGWAVITDEYKVPSKKFKVLGNTDRHSIKKNLIGALLFDSGETAEATRLKRTARRRYTRRKNRICYLQEIFSNEMAKVDDSFFHRLEESFLVEEDKKHERHPIFGNIVDEVAYHEKYPTIYHLRKKLVDSTDKADLRLIYLALAHMIKFRGHFLIEGDLNPDNSDVDKLFIQLVQTYNQLFEENPINASGVDAKAILSARLSKSRRLENLIAQLPGEKKNGLFGNLIALSLGLTPNFKSNFDLAEDAKLQLSKDTYDDDLDNLLAQIGDQYADLFLAAKNLSDAILLSDILRVNTEITKAPLSASMIKRYDEHHQDLTLLKALVRQQLPEKYKEIFFDQSKNGYAGYIDGGASQEEFYKFIKPILEKMDGTEELLVKLNREDLLRKQRTFDNGSIPHQIHLGELHAILRRQEDFYPFLKDNREKIEKILTFRIPYYVGPLARGNSRFAWMTRKSEETITPWNFEEVVDKGASAQSFIERMTNFDKNLPNEKVLPKHSLLYEYFTVYNELTKVKYVTEGMRKPAFLSGEQKKAIVDLLFKTNRKVTVKQLKEDYFKKIECFDSVEISGVEDRFNASLGTYHDLLKIIKDKDFLDNEENEDILEDIVLTLTLFEDREMIEERLKTYAHLFDDKVMKQLKRRRYTGWGRLSRKLINGIRDKQSGKTILDFLKSDGFANRNFMQLIHDDSLTFKEDIQKAQVSGQGDSLHEHIANLAGSPAIKKGILQTVKVVDELVKVMGRHKPENIVIEMARENQTTQKGQKNSRERMKRIEEGIKELGSQILKEHPVENTQLQNEKLYLYYLQNGRDMYVDQELDINRLSDYDVDHIVPQSFLKDDSIDNKVLTRSDKARGKSDNVPSEEVVKKMKNYWRQLLNAKLITQRKFDNLTKAERGGLSELDKAGFIKRQLVETRQITKHVAQILDSRMNTKYDENDKLIREVKVITLKSKLVSDFRKDFQFYKVREINNYHHAHDAYLNAVVGTALIKKYPKLESEFVYGDYKVYDVRKMIAKSEQEIGKATAKYFFYSNIMNFFKTEITLANGEIRKRPLIETNGETGEIVWDKGRDFATVRKVLSMPQVNIVKKTEVQTGGFSKESILPKRNSDKLIARKKDWDPKKYGGFDSPTVAYSVLVVAKVEKGKSKKLKSVKELLGITIMERSSFEKNPIDFLEAKGYKEVKKDLIIKLPKYSLFELENGRKRMLASAGELQKGNELALPSKYVNFLYLASHYEKLKGSPEDNEQKQLFVEQHKHYLDEIIEQISEFSKRVILADANLDKVLSAYNKHRDKPIREQAENIIHLFTLTNLGAPAAFKYFDTTIDRKRYTSTKEVLDATLIHQSITGLYETRIDLSQLGGDGGEAAAKGGGGGSGGVQEISDSRPMLHIYLNGRRFLGLLDTGADKTCIAGRDWPANWPIHQTESSLQGLGMACGVARSSQPLRWQHEDKSGIIHPFVIPTLPFTLWGRDIMKDIKVRLMTDSPDDSQDLMIGAIESNLFADQISWKSDQPVWLNQWPLKQEKLQALQQLVTEQLQLGHLEESNSPWNTPVFVIKKKSGKWRLLQDLRAVNATMHDMGALQPGLPSPVAVPKGWEIIIIDLQDCFFNIKLHPEDCKRFAFSVPSPNFKRPYQRFQWKVLPQGMKNSPTLCQKFVDKAILTVRDKYQDSYIVHYMDDILLAHPSRSIVDEILTSMIQALNKHGLVVSTEKIQKYDNLKYLGTHIQGDSVSYQKLQIRTDKLRTLNDFQKLLGNINWIRPFLKLTTGELKPLFEILNPDSNPISTRKLTPEACKALQLMNERLSTARVKRLDLSQPWSLCILKTEYTPTACLWQDGVVEWIHLPHISPKVITPYDIFCTQLIIKGRHRSKELFSKDPDYIVVPYTKVQFDLLLQEKEDWPISLLGFLGEVHFHLPKDPLLTFTLQTAIIFPHMTSTTPLEKGIVIFTDGSANGRSVTYIQGREPIIKENTQNTAQQAEIVAVITAFEEVSQPFNLYTDSKYVTGLFPEIETATLSPRTKIYTELKHLQRLIHKRQEKFYIGHIRGHTGLPGPLAQGNAYADSLTRILTAAGKRTADGSEFEKRTADGSEFESPKKKAKVE

SEQ ID NO: 28 - protein, 2116 aa, synthetic construct
MPAAKRVKLDGGDKKYSIGLDIGTNSVGWAVITDEYKVPSKKFKVLGNTDRHSIKKNLIGALLFDSGETAEATRLKRTARRRYTRRKNRICYLQEIFSNEMAKVDDSFFHRLEESFLVEEDKKHERHPIFGNIVDEVAYHEKYPTIYHLRKKLVDSTDKADLRLIYLALAHMIKFRGHFLIEGDLNPDNSDVDKLFIQLVQTYNQLFEENPINASGVDAKAILSARLSKSRRLENLIAQLPGEKKNGLFGNLIALSLGLTPNFKSNFDLAEDAKLQLSKDTYDDDLDNLLAQIGDQYADLFLAAKNLSDAILLSDILRVNTEITKAPLSASMIKRYDEHHQDLTLLKALVRQQLPEKYKEIFFDQSKNGYAGYIDGGASQEEFYKFIKPILEKMDGTEELLVKLNREDLLRKQRTFDNGSIPHQIHLGELHAILRRQEDFYPFLKDNREKIEKILTFRIPYYVGPLARGNSRFAWMTRKSEETITPWNFEEVVDKGASAQSFIERMTNFDKNLPNEKVLPKHSLLYEYFTVYNELTKVKYVTEGMRKPAFLSGEQKKAIVDLLFKTNRKVTVKQLKEDYFKKIECFDSVEISGVEDRFNASLGTYHDLLKIIKDKDFLDNEENEDILEDIVLTLTLFEDREMIEERLKTYAHLFDDKVMKQLKRRRYTGWGRLSRKLINGIRDKQSGKTILDFLKSDGFANRNFMQLIHDDSLTFKEDIQKAQVSGQGDSLHEHIANLAGSPAIKKGILQTVKVVDELVKVMGRHKPENIVIEMARENQTTQKGQKNSRERMKRIEEGIKELGSQILKEHPVENTQLQNEKLYLYYLQNGRDMYVDQELDINRLSDYDVDHIVPQSFLKDDSIDNKVLTRSDKARGKSDNVPSEEVVKKMKNYWRQLLNAKLITQRKFDNLTKAERGGLSELDKAGFIKRQLVETRQITKHVAQILDSRMNTKYDENDKLIREVKVITLKSKLVSDFRKDFQFYKVREINNYHHAHDAYLNAVVGTALIKKYPKLESEFVYGDYKVYDVRKMIAKSEQEIGKATAKYFFYSNIMNFFKTEITLANGEIRKRPLIETNGETGEIVWDKGRDFATVRKVLSMPQVNIVKKTEVQTGGFSKESILPKRNSDKLIARKKDWDPKKYGGFDSPTVAYSVLVVAKVEKGKSKKLKSVKELLGITIMERSSFEKNPIDFLEAKGYKEVKKDLIIKLPKYSLFELENGRKRMLASAGELQKGNELALPSKYVNFLYLASHYEKLKGSPEDNEQKQLFVEQHKHYLDEIIEQISEFSKRVILADANLDKVLSAYNKHRDKPIREQAENIIHLFTLTNLGAPAAFKYFDTTIDRKRYTSTKEVLDATLIHQSITGLYETRIDLSQLGGDGGEAAAKPAPGGSGGVQEISDSRPMLHIYLNGRRFLGLLDTGADKTCIAGRDWPANWPIHQTESSLQGLGMACGVARSSQPLRWQHEDKSGIIHPFVIPTLPFTLWGRDIMKDIKVRLMTDSPDDSQDLMIGAIESNLFADQISWKSDQPVWLNQWPLKQEKLQALQQLVTEQLQLGHLEESNSPWNTPVFVIKKKSGKWRLLQDLRAVNATMHDMGALQPGLPSPVAVPKGWEIIIIDLQDCFFNIKLHPEDCKRFAFSVPSPNFKRPYQRFQWKVLPQGMKNSPTLCQKFVDKAILTVRDKYQDSYIVHYMDDILLAHPSRSIVDEILTSMIQALNKHGLVVSTEKIQKYDNLKYLGTHIQGDSVSYQKLQIRTDKLRTLNDFQKLLGNINWIRPFLKLTTGELKPLFEILNPDSNPISTRKLTPEACKALQLMNERLSTARVKRLDLSQPWSLCILKTEYTPTACLWQDGVVEWIHLPHISPKVITPYDIFCTQLIIKGRHRSKELFSKDPDYIVVPYTKVQFDLLLQEKEDWPISLLGFLGEVHFHLPKDPLLTFTLQTAIIFPHMTSTTPLEKGIVIFTDGSANGRSVTYIQGREPIIKENTQNTAQQAEIVAVITAFEEVSQPFNLYTDSKYVTGLFPEIETATLSPRTKIYTELKHLQRLIHKRQEKFYIGHIRGHTGLPGPLAQGNAYADSLTRILTAAGKRTADGSEFEKRTADGSEFESPKKKAKVE

SEQ ID NO: 29 - protein, 2113 aa, synthetic construct
MPAAKRVKLDGGDKKYSIGLDIGTNSVGWAVITDEYKVPSKKFKVLGNTDRHSIKKNLIGALLFDSGETAEATRLKRTARRRYTRRKNRICYLQEIFSNEMAKVDDSFFHRLEESFLVEEDKKHERHPIFGNIVDEVAYHEKYPTIYHLRKKLVDSTDKADLRLIYLALAHMIKFRGHFLIEGDLNPDNSDVDKLFIQLVQTYNQLFEENPINASGVDAKAILSARLSKSRRLENLIAQLPGEKKNGLFGNLIALSLGLTPNFKSNFDLAEDAKLQLSKDTYDDDLDNLLAQIGDQYADLFLAAKNLSDAILLSDILRVNTEITKAPLSASMIKRYDEHHQDLTLLKALVRQQLPEKYKEIFFDQSKNGYAGYIDGGASQEEFYKFIKPILEKMDGTEELLVKLNREDLLRKQRTFDNGSIPHQIHLGELHAILRRQEDFYPFLKDNREKIEKILTFRIPYYVGPLARGNSRFAWMTRKSEETITPWNFEEVVDKGASAQSFIERMTNFDKNLPNEKVLPKHSLLYEYFTVYNELTKVKYVTEGMRKPAFLSGEQKKAIVDLLFKTNRKVTVKQLKEDYFKKIECFDSVEISGVEDRFNASLGTYHDLLKIIKDKDFLDNEENEDILEDIVLTLTLFEDREMIEERLKTYAHLFDDKVMKQLKRRRYTGWGRLSRKLINGIRDKQSGKTILDFLKSDGFANRNFMQLIHDDSLTFKEDIQKAQVSGQGDSLHEHIANLAGSPAIKKGILQTVKVVDELVKVMGRHKPENIVIEMARENQTTQKGQKNSRERMKRIEEGIKELGSQILKEHPVENTQLQNEKLYLYYLQNGRDMYVDQELDINRLSDYDVDHIVPQSFLKDDSIDNKVLTRSDKARGKSDNVPSEEVVKKMKNYWRQLLNAKLITQRKFDNLTKAERGGLSELDKAGFIKRQLVETRQITKHVAQILDSRMNTKYDENDKLIREVKVITLKSKLVSDFRKDFQFYKVREINNYHHAHDAYLNAVVGTALIKKYPKLESEFVYGDYKVYDVRKMIAKSEQEIGKATAKYFFYSNIMNFFKTEITLANGEIRKRPLIETNGETGEIVWDKGRDFATVRKVLSMPQVNIVKKTEVQTGGFSKESILPKRNSDKLIARKKDWDPKKYGGFDSPTVAYSVLVVAKVEKGKSKKLKSVKELLGITIMERSSFEKNPIDFLEAKGYKEVKKDLIIKLPKYSLFELENGRKRMLASAGELQKGNELALPSKYVNFLYLASHYEKLKGSPEDNEQKQLFVEQHKHYLDEIIEQISEFSKRVILADANLDKVLSAYNKHRDKPIREQAENIIHLFTLTNLGAPAAFKYFDTTIDRKRYTSTKEVLDATLIHQSITGLYETRIDLSQLGGDGGGGSEAAAKGGVQEISDSRPMLHIYLNGRRFLGLLDTGADKTCIAGRDWPANWPIHQTESSLQGLGMACGVARSSQPLRWQHEDKSGIIHPFVIPTLPFTLWGRDIMKDIKVRLMTDSPDDSQDLMIGAIESNLFADQISWKSDQPVWLNQWPLKQEKLQALQQLVTEQLQLGHLEESNSPWNTPVFVIKKKSGKWRLLQDLRAVNATMHDMGALQPGLPSPVAVPKGWEIIIIDLQDCFFNIKLHPEDCKRFAFSVPSPNFKRPYQRFQWKVLPQGMKNSPTLCQKFVDKAILTVRDKYQDSYIVHYMDDILLAHPSRSIVDEILTSMIQALNKHGLVVSTEKIQKYDNLKYLGTHIQGDSVSYQKLQIRTDKLRTLNDFQKLLGNINWIRPFLKLTTGELKPLFEILNPDSNPISTRKLTPEACKALQLMNERLSTARVKRLDLSQPWSLCILKTEYTPTACLWQDGVVEWIHLPHISPKVITPYDIFCTQLIIKGRHRSKELFSKDPDYIVVPYTKVQFDLLLQEKEDWPISLLGFLGEVHFHLPKDPLLTFTLQTAIIFPHMTSTTPLEKGIVIFTDGSANGRSVTYIQGREPIIKENTQNTAQQAEIVAVITAFEEVSQPFNLYTDSKYVTGLFPEIETATLSPRTKIYTELKHLQRLIHKRQEKFYIGHIRGHTGLPGPLAQGNAYADSLTRILTAAGKRTADGSEFEKRTADGSEFESPKKKAKVE

SEQ ID NO: 30 - protein, 2111 aa, synthetic construct
MPAAKRVKLDGGDKKYSIGLDIGTNSVGWAVITDEYKVPSKKFKVLGNTDRHSIKKNLIGALLFDSGETAEATRLKRTARRRYTRRKNRICYLQEIFSNEMAKVDDSFFHRLEESFLVEEDKKHERHPIFGNIVDEVAYHEKYPTIYHLRKKLVDSTDKADLRLIYLALAHMIKFRGHFLIEGDLNPDNSDVDKLFIQLVQTYNQLFEENPINASGVDAKAILSARLSKSRRLENLIAQLPGEKKNGLFGNLIALSLGLTPNFKSNFDLAEDAKLQLSKDTYDDDLDNLLAQIGDQYADLFLAAKNLSDAILLSDILRVNTEITKAPLSASMIKRYDEHHQDLTLLKALVRQQLPEKYKEIFFDQSKNGYAGYIDGGASQEEFYKFIKPILEKMDGTEELLVKLNREDLLRKQRTFDNGSIPHQIHLGELHAILRRQEDFYPFLKDNREKIEKILTFRIPYYVGPLARGNSRFAWMTRKSEETITPWNFEEVVDKGASAQSFIERMTNFDKNLPNEKVLPKHSLLYEYFTVYNELTKVKYVTEGMRKPAFLSGEQKKAIVDLLFKTNRKVTVKQLKEDYFKKIECFDSVEISGVEDRFNASLGTYHDLLKIIKDKDFLDNEENEDILEDIVLTLTLFEDREMIEERLKTYAHLFDDKVMKQLKRRRYTGWGRLSRKLINGIRDKQSGKTILDFLKSDGFANRNFMQLIHDDSLTFKEDIQKAQVSGQGDSLHEHIANLAGSPAIKKGILQTVKVVDELVKVMGRHKPENIVIEMARENQTTQKGQKNSRERMKRIEEGIKELGSQILKEHPVENTQLQNEKLYLYYLQNGRDMYVDQELDINRLSDYDVDHIVPQSFLKDDSIDNKVLTRSDKARGKSDNVPSEEVVKKMKNYWRQLLNAKLITQRKFDNLTKAERGGLSELDKAGFIKRQLVETRQITKHVAQILDSRMNTKYDENDKLIREVKVITLKSKLVSDFRKDFQFYKVREINNYHHAHDAYLNAVVGTALIKKYPKLESEFVYGDYKVYDVRKMIAKSEQEIGKATAKYFFYSNIMNFFKTEITLANGEIRKRPLIETNGETGEIVWDKGRDFATVRKVLSMPQVNIVKKTEVQTGGFSKESILPKRNSDKLIARKKDWDPKKYGGFDSPTVAYSVLVVAKVEKGKSKKLKSVKELLGITIMERSSFEKNPIDFLEAKGYKEVKKDLIIKLPKYSLFELENGRKRMLASAGELQKGNELALPSKYVNFLYLASHYEKLKGSPEDNEQKQLFVEQHKHYLDEIIEQISEFSKRVILADANLDKVLSAYNKHRDKPIREQAENIIHLFTLTNLGAPAAFKYFDTTIDRKRYTSTKEVLDATLIHQSITGLYETRIDLSQLGGDGGGSSGGGGGVQEISDSRPMLHIYLNGRRFLGLLDTGADKTCIAGRDWPANWPIHQTESSLQGLGMACGVARSSQPLRWQHEDKSGIIHPFVIPTLPFTLWGRDIMKDIKVRLMTDSPDDSQDLMIGAIESNLFADQISWKSDQPVWLNQWPLKQEKLQALQQLVTEQLQLGHLEESNSPWNTPVFVIKKKSGKWRLLQDLRAVNATMHDMGALQPGLPSPVAVPKGWEIIIIDLQDCFFNIKLHPEDCKRFAFSVPSPNFKRPYQRFQWKVLPQGMKNSPTLCQKFVDKAILTVRDKYQDSYIVHYMDDILLAHPSRSIVDEILTSMIQALNKHGLVVSTEKIQKYDNLKYLGTHIQGDSVSYQKLQIRTDKLRTLNDFQKLLGNINWIRPFLKLTTGELKPLFEILNPDSNPISTRKLTPEACKALQLMNERLSTARVKRLDLSQPWSLCILKTEYTPTACLWQDGVVEWIHLPHISPKVITPYDIFCTQLIIKGRHRSKELFSKDPDYIVVPYTKVQFDLLLQEKEDWPISLLGFLGEVHFHLPKDPLLTFTLQTAIIFPHMTSTTPLEKGIVIFTDGSANGRSVTYIQGREPIIKENTQNTAQQAEIVAVITAFEEVSQPFNLYTDSKYVTGLFPEIETATLSPRTKIYTELKHLQRLIHKRQEKFYIGHIRGHTGLPGPLAQGNAYADSLTRILTAAGKRTADGSEFEKRTADGSEFESPKKKAKVE

SEQ ID NO: 31 - protein, 2114 aa, synthetic construct
MPAAKRVKLDGGDKKYSIGLDIGTNSVGWAVITDEYKVPSKKFKVLGNTDRHSIKKNLIGALLFDSGETAEATRLKRTARRRYTRRKNRICYLQEIFSNEMAKVDDSFFHRLEESFLVEEDKKHERHPIFGNIVDEVAYHEKYPTIYHLRKKLVDSTDKADLRLIYLALAHMIKFRGHFLIEGDLNPDNSDVDKLFIQLVQTYNQLFEENPINASGVDAKAILSARLSKSRRLENLIAQLPGEKKNGLFGNLIALSLGLTPNFKSNFDLAEDAKLQLSKDTYDDDLDNLLAQIGDQYADLFLAAKNLSDAILLSDILRVNTEITKAPLSASMIKRYDEHHQDLTLLKALVRQQLPEKYKEIFFDQSKNGYAGYIDGGASQEEFYKFIKPILEKMDGTEELLVKLNREDLLRKQRTFDNGSIPHQIHLGELHAILRRQEDFYPFLKDNREKIEKILTFRIPYYVGPLARGNSRFAWMTRKSEETITPWNFEEVVDKGASAQSFIERMTNFDKNLPNEKVLPKHSLLYEYFTVYNELTKVKYVTEGMRKPAFLSGEQKKAIVDLLFKTNRKVTVKQLKEDYFKKIECFDSVEISGVEDRFNASLGTYHDLLKIIKDKDFLDNEENEDILEDIVLTLTLFEDREMIEERLKTYAHLFDDKVMKQLKRRRYTGWGRLSRKLINGIRDKQSGKTILDFLKSDGFANRNFMQLIHDDSLTFKEDIQKAQVSGQGDSLHEHIANLAGSPAIKKGILQTVKVVDELVKVMGRHKPENIVIEMARENQTTQKGQKNSRERMKRIEEGIKELGSQILKEHPVENTQLQNEKLYLYYLQNGRDMYVDQELDINRLSDYDVDHIVPQSFLKDDSIDNKVLTRSDKARGKSDNVPSEEVVKKMKNYWRQLLNAKLITQRKFDNLTKAERGGLSELDKAGFIKRQLVETRQITKHVAQILDSRMNTKYDENDKLIREVKVITLKSKLVSDFRKDFQFYKVREINNYHHAHDAYLNAVVGTALIKKYPKLESEFVYGDYKVYDVRKMIAKSEQEIGKATAKYFFYSNIMNFFKTEITLANGEIRKRPLIETNGETGEIVWDKGRDFATVRKVLSMPQVNIVKKTEVQTGGFSKESILPKRNSDKLIARKKDWDPKKYGGFDSPTVAYSVLVVAKVEKGKSKKLKSVKELLGITIMERSSFEKNPIDFLEAKGYKEVKKDLIIKLPKYSLFELENGRKRMLASAGELQKGNELALPSKYVNFLYLASHYEKLKGSPEDNEQKQLFVEQHKHYLDEIIEQISEFSKRVILADANLDKVLSAYNKHRDKPIREQAENIIHLFTLTNLGAPAAFKYFDTTIDRKRYTSTKEVLDATLIHQSITGLYETRIDLSQLGGDGGGGGPAPGSSGGVQEISDSRPMLHIYLNGRRFLGLLDTGADKTCIAGRDWPANWPIHQTESSLQGLGMACGVARSSQPLRWQHEDKSGIIHPFVIPTLPFTLWGRDIMKDIKVRLMTDSPDDSQDLMIGAIESNLFADQISWKSDQPVWLNQWPLKQEKLQALQQLVTEQLQLGHLEESNSPWNTPVFVIKKKSGKWRLLQDLRAVNATMHDMGALQPGLPSPVAVPKGWEIIIIDLQDCFFNIKLHPEDCKRFAFSVPSPNFKRPYQRFQWKVLPQGMKNSPTLCQKFVDKAILTVRDKYQDSYIVHYMDDILLAHPSRSIVDEILTSMIQALNKHGLVVSTEKIQKYDNLKYLGTHIQGDSVSYQKLQIRTDKLRTLNDFQKLLGNINWIRPFLKLTTGELKPLFEILNPDSNPISTRKLTPEACKALQLMNERLSTARVKRLDLSQPWSLCILKTEYTPTACLWQDGVVEWIHLPHISPKVITPYDIFCTQLIIKGRHRSKELFSKDPDYIVVPYTKVQFDLLLQEKEDWPISLLGFLGEVHFHLPKDPLLTFTLQTAIIFPHMTSTTPLEKGIVIFTDGSANGRSVTYIQGREPIIKENTQNTAQQAEIVAVITAFEEVSQPFNLYTDSKYVTGLFPEIETATLSPRTKIYTELKHLQRLIHKRQEKFYIGHIRGHTGLPGPLAQGNAYADSLTRILTAAGKRTADGSEFEKRTADGSEFESPKKKAKVE

SEQ ID NO: 32 - protein, 2010 aa, synthetic construct
MPAAKRVKLDGGDKKYSIGLDIGTNSVGWAVITDEYKVPSKKFKVLGNTDRHSIKKNLIGALLFDSGETAEATRLKRTARRRYTRRKNRICYLQEIFSNEMAKVDDSFFHRLEESFLVEEDKKHERHPIFGNIVDEVAYHEKYPTIYHLRKKLVDSTDKADLRLIYLALAHMIKFRGHFLIEGDLNPDNSDVDKLFIQLVQTYNQLFEENPINASGVDAKAILSARLSKSRRLENLIAQLPGEKKNGLFGNLIALSLGLTPNFKSNFDLAEDAKLQLSKDTYDDDLDNLLAQIGDQYADLFLAAKNLSDAILLSDILRVNTEITKAPLSASMIKRYDEHHQDLTLLKALVRQQLPEKYKEIFFDQSKNGYAGYIDGGASQEEFYKFIKPILEKMDGTEELLVKLNREDLLRKQRTFDNGSIPHQIHLGELHAILRRQEDFYPFLKDNREKIEKILTFRIPYYVGPLARGNSRFAWMTRKSEETITPWNFEEVVDKGASAQSFIERMTNFDKNLPNEKVLPKHSLLYEYFTVYNELTKVKYVTEGMRKPAFLSGEQKKAIVDLLFKTNRKVTVKQLKEDYFKKIECFDSVEISGVEDRFNASLGTYHDLLKIIKDKDFLDNEENEDILEDIVLTLTLFEDREMIEERLKTYAHLFDDKVMKQLKRRRYTGWGRLSRKLINGIRDKQSGKTILDFLKSDGFANRNFMQLIHDDSLTFKEDIQKAQVSGQGDSLHEHIANLAGSPAIKKGILQTVKVVDELVKVMGRHKPENIVIEMARENQTTQKGQKNSRERMKRIEEGIKELGSQILKEHPVENTQLQNEKLYLYYLQNGRDMYVDQELDINRLSDYDVDHIVPQSFLKDDSIDNKVLTRSDKARGKSDNVPSEEVVKKMKNYWRQLLNAKLITQRKFDNLTKAERGGLSELDKAGFIKRQLVETRQITKHVAQILDSRMNTKYDENDKLIREVKVITLKSKLVSDFRKDFQFYKVREINNYHHAHDAYLNAVVGTALIKKYPKLESEFVYGDYKVYDVRKMIAKSEQEIGKATAKYFFYSNIMNFFKTEITLANGEIRKRPLIETNGETGEIVWDKGRDFATVRKVLSMPQVNIVKKTEVQTGGFSKESILPKRNSDKLIARKKDWDPKKYGGFDSPTVAYSVLVVAKVEKGKSKKLKSVKELLGITIMERSSFEKNPIDFLEAKGYKEVKKDLIIKLPKYSLFELENGRKRMLASAGELQKGNELALPSKYVNFLYLASHYEKLKGSPEDNEQKQLFVEQHKHYLDEIIEQISEFSKRVILADANLDKVLSAYNKHRDKPIREQAENIIHLFTLTNLGAPAAFKYFDTTIDRKRYTSTKEVLDATLIHQSITGLYETRIDLSQLGGDGGGGGEAAAKGSSGGLTAAIDILAPQQCAEPITWKSDEPVWVDQWPLTNDKLAAAQQLVQEQLEAGHITESSSPWNTPIFVIKKKSGKWRLLQDLRAVNATMVLMGALQPGLPSPVAIPQGYLKIIIDLKDCFFSIPLHPSDQKRFAFSLPSTNFKEPMQRFQWKVLPQGMANSPTLCQKYVATAIHKVRHAWKQMYIIHYMDDILIAGKDGQQVLQCFDQLKQELTAAGLHIAPEKVQLQDPYTYLGFELNGPKITNQKAVIRKDKLQTLNDFQKLLGDINWLRPYLKLTTGDLKPLFDTLKGDSDPNSHRSLSKEALASLEKVETAIAEQFVTHINYSLPLIFLIFNTALTPTGLFWQDNPIMWIHLPASPKKVLLPYYDAIADLIILGRDHSKKYFGIEPSTIIQPYSKSQIDWLMQNTEMWPIACASFVGILDNHYPPNKLIQFCKLHTFVFPQIISKTPLNNALLVFTDGSSTGMAAYTLTDTTIKFQTNLNSAQLVELQALIAVLSAFPNQPLNIYTDSAYLAHSIPLLETVAQIKHISETAKLFLQCQQLIYNRSIPFYIGHVRAHSGLPGPIAQGNQRADLATKIVASNINTAGKRTADGSEFEKRTADGSEFESPKKKAKVE

SEQ ID NO: 33 - protein, 2008 aa, synthetic construct
MPAAKRVKLDGGDKKYSIGLDIGTNSVGWAVITDEYKVPSKKFKVLGNTDRHSIKKNLIGALLFDSGETAEATRLKRTARRRYTRRKNRICYLQEIFSNEMAKVDDSFFHRLEESFLVEEDKKHERHPIFGNIVDEVAYHEKYPTIYHLRKKLVDSTDKADLRLIYLALAHMIKFRGHFLIEGDLNPDNSDVDKLFIQLVQTYNQLFEENPINASGVDAKAILSARLSKSRRLENLIAQLPGEKKNGLFGNLIALSLGLTPNFKSNFDLAEDAKLQLSKDTYDDDLDNLLAQIGDQYADLFLAAKNLSDAILLSDILRVNTEITKAPLSASMIKRYDEHHQDLTLLKALVRQQLPEKYKEIFFDQSKNGYAGYIDGGASQEEFYKFIKPILEKMDGTEELLVKLNREDLLRKQRTFDNGSIPHQIHLGELHAILRRQEDFYPFLKDNREKIEKILTFRIPYYVGPLARGNSRFAWMTRKSEETITPWNFEEVVDKGASAQSFIERMTNFDKNLPNEKVLPKHSLLYEYFTVYNELTKVKYVTEGMRKPAFLSGEQKKAIVDLLFKTNRKVTVKQLKEDYFKKIECFDSVEISGVEDRFNASLGTYHDLLKIIKDKDFLDNEENEDILEDIVLTLTLFEDREMIEERLKTYAHLFDDKVMKQLKRRRYTGWGRLSRKLINGIRDKQSGKTILDFLKSDGFANRNFMQLIHDDSLTFKEDIQKAQVSGQGDSLHEHIANLAGSPAIKKGILQTVKVVDELVKVMGRHKPENIVIEMARENQTTQKGQKNSRERMKRIEEGIKELGSQILKEHPVENTQLQNEKLYLYYLQNGRDMYVDQELDINRLSDYDVDHIVPQSFLKDDSIDNKVLTRSDKARGKSDNVPSEEVVKKMKNYWRQLLNAKLITQRKFDNLTKAERGGLSELDKAGFIKRQLVETRQITKHVAQILDSRMNTKYDENDKLIREVKVITLKSKLVSDFRKDFQFYKVREINNYHHAHDAYLNAVVGTALIKKYPKLESEFVYGDYKVYDVRKMIAKSEQEIGKATAKYFFYSNIMNFFKTEITLANGEIRKRPLIETNGETGEIVWDKGRDFATVRKVLSMPQVNIVKKTEVQTGGFSKESILPKRNSDKLIARKKDWDPKKYGGFDSPTVAYSVLVVAKVEKGKSKKLKSVKELLGITIMERSSFEKNPIDFLEAKGYKEVKKDLIIKLPKYSLFELENGRKRMLASAGELQKGNELALPSKYVNFLYLASHYEKLKGSPEDNEQKQLFVEQHKHYLDEIIEQISEFSKRVILADANLDKVLSAYNKHRDKPIREQAENIIHLFTLTNLGAPAAFKYFDTTIDRKRYTSTKEVLDATLIHQSITGLYETRIDLSQLGGDGGGSSPAPGGGGGLTAAIDILAPQQCAEPITWKSDEPVWVDQWPLTNDKLAAAQQLVQEQLEAGHITESSSPWNTPIFVIKKKSGKWRLLQDLRAVNATMVLMGALQPGLPSPVAPPQGYLKIIIDLKDCFFSIPLHPSDQKRFAFSLPSTNFKEPMQRFQWKVLPQGMANSPTLCQKYVATAIHKVRHAWKQMYIIHYMDDILIAGKDGQQVLQCFDQLKQELTAAGLHIAPEKVQLQDPYTYLGFELNGPKITNQKAVIRKDKLQTLNDFQKLLGDINWLRPYLKLTTGDLKPLFDTLKPDSDPNSHRSLSKEALASLEKVETAIAEQFVTHINYSLPLIFLIFNTALTPTGLFWQDNPIMWIHLPASPKKVLLPYYDAIADLIILGRDHSKKYFGIEPSTIIQPYSKSQIDWLMQNTEMWPIACASFVGILDNHYPPNKLIQFCKLHTFVFPQIISKTPLNNALLVFTDGSSTGMAAYTLTDTTIKFQTNLNSAQLVELQALIAVLSAFPNQPLNIYTDSAYLAHSIPLLETVAQIKHISETAKLFLQCQQLIYNRSIPFYIGHVRAHSGLPGPIAQGNQRADLATKIVASNINTAGKRTADGSEFEKRTADGSEFESPKKKAKVE

SEQ ID NO: 34 - protein, 2085 aa, synthetic construct
MPAAKRVKLDGGDKKYSIGLDIGTNSVGWAVITDEYKVPSKKFKVLGNTDRHSIKKNLIGALLFDSGETAEATRLKRTARRRYTRRKNRICYLQEIFSNEMAKVDDSFFHRLEESFLVEEDKKHERHPIFGNIVDEVAYHEKYPTIYHLRKKLVDSTDKADLRLIYLALAHMIKFRGHFLIEGDLNPDNSDVDKLFIQLVQTYNQLFEENPINASGVDAKAILSARLSKSRRLENLIAQLPGEKKNGLFGNLIALSLGLTPNFKSNFDLAEDAKLQLSKDTYDDDLDNLLAQIGDQYADLFLAAKNLSDAILLSDILRVNTEITKAPLSASMIKRYDEHHQDLTLLKALVRQQLPEKYKEIFFDQSKNGYAGYIDGGASQEEFYKFIKPILEKMDGTEELLVKLNREDLLRKQRTFDNGSIPHQIHLGELHAILRRQEDFYPFLKDNREKIEKILTFRIPYYVGPLARGNSRFAWMTRKSEETITPWNFEEVVDKGASAQSFIERMTNFDKNLPNEKVLPKHSLLYEYFTVYNELTKVKYVTEGMRKPAFLSGEQKKAIVDLLFKTNRKVTVKQLKEDYFKKIECFDSVEISGVEDRFNASLGTYHDLLKIIKDKDFLDNEENEDILEDIVLTLTLFEDREMIEERLKTYAHLFDDKVMKQLKRRRYTGWGRLSRKLINGIRDKQSGKTILDFLKSDGFANRNFMQLIHDDSLTFKEDIQKAQVSGQGDSLHEHIANLAGSPAIKKGILQTVKVVDELVKVMGRHKPENIVIEMARENQTTQKGQKNSRERMKRIEEGIKELGSQILKEHPVENTQLQNEKLYLYYLQNGRDMYVDQELDINRLSDYDVDHIVPQSFLKDDSIDNKVLTRSDKARGKSDNVPSEEVVKKMKNYWRQLLNAKLITQRKFDNLTKAERGGLSELDKAGFIKRQLVETRQITKHVAQILDSRMNTKYDENDKLIREVKVITLKSKLVSDFRKDFQFYKVREINNYHHAHDAYLNAVVGTALIKKYPKLESEFVYGDYKVYDVRKMIAKSEQEIGKATAKYFFYSNIMNFFKTEITLANGEIRKRPLIETNGETGEIVWDKGRDFATVRKVLSMPQVNIVKKTEVQTGGFSKESILPKRNSDKLIARKKDWDPKKYGGFDSPTVAYSVLVVAKVEKGKSKKLKSVKELLGITIMERSSFEKNPIDFLEAKGYKEVKKDLIIKLPKYSLFELENGRKRMLASAGELQKGNELALPSKYVNFLYLASHYEKLKGSPEDNEQKQLFVEQHKHYLDEIIEQISEFSKRVILADANLDKVLSAYNKHRDKPIREQAENIIHLFTLTNLGAPAAFKYFDTTIDRKRYTSTKEVLDATLIHQSITGLYETRIDLSQLGGDGGEAAAKGSSGGLDDEYRLYSPLVKPDQNIQFWLEQFPQAWAETAGMGLAKQVPPQVIQLKASATPVSVRQYPLSKEAQEGIRPHVQRLIQQGILVPVQSPWNTPLLPVRKPGTNDYRPVQDLREVNKRVQDIHPTVPNPYNLLCALPPQRSWYTVLDLKDAFFCLRLHPTSQPLFAFEWRDPGTGRTGQLTWTRLPQGFKNSPTIFNEALHRDLANFRIQHPQVTLLQYVDDLLLAGATKQDCLEGTKALLLELSDLGYRASAKKAQICRREVTYLGYSLRDGQRWLTEARKKTVVQIPAPTTAKQVREFLGKAGFCRLFIPGFATLAAPLYPLTKPKGEFSWAPEHQKAFDAIKKALLSAPALALPDVTKPFTLYVDERKGVARGVLTQTLGPWRRPVAYLSKKLDPVASGWPVCLKAIAAVAILVKDADKLTLGQNITVIAPHALENIVRQPPDRWMTNARMTHYQSLLLTERVTFAPPAALNPATLLPEETDEPVTHDCHQLLIEETGVRKDLTDIPLTGEVLTWFTDGSSYVVEGKRMAGAAVVDGTRTIWASSLPEGTSAQKAELMALTQALRLAEGKSINIYTDSRYAFATAHVHGAIYKQRGWLTSAGREIKNKEEILSLLEALHLPKRLAIIHCPGHQKAKDPISRGNQMADRVAKQAAQGVNLLPAGKRTADGSEFEKRTADGSEFESPKKKAKVE

SEQ ID NO: 35 - protein, 2088 aa, synthetic construct
MPAAKRVKLDGGDKKYSIGLDIGTNSVGWAVITDEYKVPSKKFKVLGNTDRHSIKKNLIGALLFDSGETAEATRLKRTARRRYTRRKNRICYLQEIFSNEMAKVDDSFFHRLEESFLVEEDKKHERHPIFGNIVDEVAYHEKYPTIYHLRKKLVDSTDKADLRLIYLALAHMIKFRGHFLIEGDLNPDNSDVDKLFIQLVQTYNQLFEENPINASGVDAKAILSARLSKSRRLENLIAQLPGEKKNGLFGNLIALSLGLTPNFKSNFDLAEDAKLQLSKDTYDDDLDNLLAQIGDQYADLFLAAKNLSDAILLSDILRVNTEITKAPLSASMIKRYDEHHQDLTLLKALVRQQLPEKYKEIFFDQSKNGYAGYIDGGASQEEFYKFIKPILEKMDGTEELLVKLNREDLLRKQRTFDNGSIPHQIHLGELHAILRRQEDFYPFLKDNREKIEKILTFRIPYYVGPLARGNSRFAWMTRKSEETITPWNFEEVVDKGASAQSFIERMTNFDKNLPNEKVLPKHSLLYEYFTVYNELTKVKYVTEGMRKPAFLSGEQKKAIVDLLFKTNRKVTVKQLKEDYFKKIECFDSVEISGVEDRFNASLGTYHDLLKIIKDKDFLDNEENEDILEDIVLTLTLFEDREMIEERLKTYAHLFDDKVMKQLKRRRYTGWGRLSRKLINGIRDKQSGKTILDFLKSDGFANRNFMQLIHDDSLTFKEDIQKAQVSGQGDSLHEHIANLAGSPAIKKGILQTVKVVDELVKVMGRHKPENIVIEMARENQTTQKGQKNSRERMKRIEEGIKELGSQILKEHPVENTQLQNEKLYLYYLQNGRDMYVDQELDINRLSDYDVDHIVPQSFLKDDSIDNKVLTRSDKARGKSDNVPSEEVVKKMKNYWRQLLNAKLITQRKFDNLTKAERGGLSELDKAGFIKRQLVETRQITKHVAQILDSRMNTKYDENDKLIREVKVITLKSKLVSDFRKDFQFYKVREINNYHHAHDAYLNAVVGTALIKKYPKLESEFVYGDYKVYDVRKMIAKSEQEIGKATAKYFFYSNIMNFFKTEITLANGEIRKRPLIETNGETGEIVWDKGRDFATVRKVLSMPQVNIVKKTEVQTGGFSKESILPKRNSDKLIARKKDWDPKKYGGFDSPTVAYSVLVVAKVEKGKSKKLKSVKELLGITIMERSSFEKNPIDFLEAKGYKEVKKDLIIKLPKYSLFELENGRKRMLASAGELQKGNELALPSKYVNFLYLASHYEKLKGSPEDNEQKQLFVEQHKHYLDEIIEQISEFSKRVILADANLDKVLSAYNKHRDKPIREQAENIIHLFTLTNLGAPAAFKYFDTTIDRKRYTSTKEVLDATLIHQSITGLYETRIDLSQLGGDGGEAAAKGGSPAPGGLDDEYRLYSPLVKPDQNIQFWLEQFPQAWAETAGMGLAKQVPPQVIQLKASATPVSVRQYPLSKEAQEGIRPHVQRLIQQGILVPVQSPWNTPLLPVRKPGTNDYRPVQDLREVNKRVQDIHPTVPNPYNLLCALPPQRSWYTVLDLKDAFFCLRLHPTSQPLFAFEWRDPGTGRTGQLTWTRLPQGFKNSPTIFNEALHRDLANFRIQHPQVTLLQYVDDLLLAGATKQDCLEGTKALLLELSDLGYRASAKKAQICRREVTYLGYSLRDGQRWLTEARKKTVVQIPAPTTAKQVREFLGKAGFCRLFIPGFATLAAPLYPLTKPKGEFSWAPEHQKAFDAIKKALLSAPALALPDVTKPFTLYVDERKGVARGVLTQTLGPWRRPVAYLSKKLDPVASGWPVCLKAIAAVAILVKDADKLTLGQNITVIAPHALENIVRQPPDRWMTNARMTHYQSLLLTERVTFAPPAALNPATLLPEETDEPVTHDCHQLLIEETGVRKDLTDIPLTGEVLTWFTDGSSYVVEGKRMAGAAVVDGTRTIWASSLPEGTSAQKAELMALTQALRLAEGKSINIYTDSRYAFATAHVHGAIYKQRGWLTSAGREIKNKEEILSLLEALHLPKRLAIIHCPGHQKAKDPISRGNQMADRVAKQAAQGVNLLPAGKRTADGSEFEKRTADGSEFESPKKKAKVE

SEQ ID NO: 36 - protein, 2123 aa, synthetic construct
MPAAKRVKLDGGDKKYSIGLDIGTNSVGWAVITDEYKVPSKKFKVLGNTDRHSIKKNLIGALLFDSGETAEATRLKRTARRRYTRRKNRICYLQEIFSNEMAKVDDSFFHRLEESFLVEEDKKHERHPIFGNIVDEVAYHEKYPTIYHLRKKLVDSTDKADLRLIYLALAHMIKFRGHFLIEGDLNPDNSDVDKLFIQLVQTYNQLFEENPINASGVDAKAILSARLSKSRRLENLIAQLPGEKKNGLFGNLIALSLGLTPNFKSNFDLAEDAKLQLSKDTYDDDLDNLLAQIGDQYADLFLAAKNLSDAILLSDILRVNTEITKAPLSASMIKRYDEHHQDLTLLKALVRQQLPEKYKEIFFDQSKNGYAGYIDGGASQEEFYKFIKPILEKMDGTEELLVKLNREDLLRKQRTFDNGSIPHQIHLGELHAILRRQEDFYPFLKDNREKIEKILTFRIPYYVGPLARGNSRFAWMTRKSEETITPWNFEEVVDKGASAQSFIERMTNFDKNLPNEKVLPKHSLLYEYFTVYNELTKVKYVTEGMRKPAFLSGEQKKAIVDLLFKTNRKVTVKQLKEDYFKKIECFDSVEISGVEDRFNASLGTYHDLLKIIKDKDFLDNEENEDILEDIVLTLTLFEDREMIEERLKTYAHLFDDKVMKQLKRRRYTGWGRLSRKLINGIRDKQSGKTILDFLKSDGFANRNFMQLIHDDSLTFKEDIQKAQVSGQGDSLHEHIANLAGSPAIKKGILQTVKVVDELVKVMGRHKPENIVIEMARENQTTQKGQKNSRERMKRIEEGIKELGSQILKEHPVENTQLQNEKLYLYYLQNGRDMYVDQELDINRLSDYDVDHIVPQSFLKDDSIDNKVLTRSDKARGKSDNVPSEEVVKKMKNYWRQLLNAKLITQRKFDNLTKAERGGLSELDKAGFIKRQLVETRQITKHVAQILDSRMNTKYDENDKLIREVKVITLKSKLVSDFRKDFQFYKVREINNYHHAHDAYLNAVVGTALIKKYPKLESEFVYGDYKVYDVRKMIAKSEQEIGKATAKYFFYSNIMNFFKTEITLANGEIRKRPLIETNGETGEIVWDKGRDFATVRKVLSMPQVNIVKKTEVQTGGFSKESILPKRNSDKLIARKKDWDPKKYGGFDSPTVAYSVLVVAKVEKGKSKKLKSVKELLGITIMERSSFEKNPIDFLEAKGYKEVKKDLIIKLPKYSLFELENGRKRMLASAGELQKGNELALPSKYVNFLYLASHYEKLKGSPEDNEQKQLFVEQHKHYLDEIIEQISEFSKRVILADANLDKVLSAYNKHRDKPIREQAENIIHLFTLTNLGAPAAFKYFDTTIDRKRYTSTKEVLDATLIHQSITGLYETRIDLSQLGGDGGAEAAAKEAAAKEAAAKEAAAKALEAEAAAKEAAAKEAAAKEAAAKAGGLDDEYRLYSPLVKPDQNIQFWLEQFPQAWAETAGMGLAKQVPPQVIQLKASATPVSVRQYPLSKEAQEGIRPHVQRLIQQGILVPVQSPWNTPLLPVRKPGTNDYRPVQDLREVNKRVQDIHPTVPNPYNLLCALPPQRSWYTVLDLKDAFFCLRLHPTSQPLFAFEWRDPGTGRTGQLTWTRLPQGFKNSPTIFNEALHRDLANFRIQHPQVTLLQYVDDLLLAGATKQDCLEGTKALLLELSDLGYRASAKKAQICRREVTYLGYSLRDGQRWLTEARKKTVVQIPAPTTAKQVREFLGKAGFCRLFIPGFATLAAPLYPLTKPKGEFSWAPEHQKAFDAIKKALLSAPALALPDVTKPFTLYVDERKGVARGVLTQTLGPWRRPVAYLSKKLDPVASGWPVCLKAIAAVAILVKDADKLTLGQNITVIAPHALENIVRQPPDRWMTNARMTHYQSLLLTERVTFAPPAALNPATLLPEETDEPVTHDCHQLLIEETGVRKDLTDIPLTGEVLTWFTDGSSYVVEGKRMAGAAVVDGTRTIWASSLPEGTSAQKAELMALTQALRLAEGKSINIYTDSRYAFATAHVHGAIYKQRGWLTSAGREIKNKEEILSLLEALHLPKRLAIIHCPGHQKAKDPISRGNQMADRVAKQAAQGVNLLPAGKRTADGSEFEKRTADGSEFESPKKKAKVE

SEQ ID NO: 37 - protein, 2092 aa, synthetic construct
MPAAKRVKLDGGDKKYSIGLDIGTNSVGWAVITDEYKVPSKKFKVLGNTDRHSIKKNLIGALLFDSGETAEATRLKRTARRRYTRRKNRICYLQEIFSNEMAKVDDSFFHRLEESFLVEEDKKHERHPIFGNIVDEVAYHEKYPTIYHLRKKLVDSTDKADLRLIYLALAHMIKFRGHFLIEGDLNPDNSDVDKLFIQLVQTYNQLFEENPINASGVDAKAILSARLSKSRRLENLIAQLPGEKKNGLFGNLIALSLGLTPNFKSNFDLAEDAKLQLSKDTYDDDLDNLLAQIGDQYADLFLAAKNLSDAILLSDILRVNTEITKAPLSASMIKRYDEHHQDLTLLKALVRQQLPEKYKEIFFDQSKNGYAGYIDGGASQEEFYKFIKPILEKMDGTEELLVKLNREDLLRKQRTFDNGSIPHQIHLGELHAILRRQEDFYPFLKDNREKIEKILTFRIPYYVGPLARGNSRFAWMTRKSEETITPWNFEEVVDKGASAQSFIERMTNFDKNLPNEKVLPKHSLLYEYFTVYNELTKVKYVTEGMRKPAFLSGEQKKAIVDLLFKTNRKVTVKQLKEDYFKKIECFDSVEISGVEDRFNASLGTYHDLLKIIKDKDFLDNEENEDILEDIVLTLTLFEDREMIEERLKTYAHLFDDKVMKQLKRRRYTGWGRLSRKLINGIRDKQSGKTILDFLKSDGFANRNFMQLIHDDSLTFKEDIQKAQVSGQGDSLHEHIANLAGSPAIKKGILQTVKVVDELVKVMGRHKPENIVIEMARENQTTQKGQKNSRERMKRIEEGIKELGSQILKEHPVENTQLQNEKLYLYYLQNGRDMYVDQELDINRLSDYDVDHIVPQSFLKDDSIDNKVLTRSDKARGKSDNVPSEEVVKKMKNYWRQLLNAKLITQRKFDNLTKAERGGLSELDKAGFIKRQLVETRQITKHVAQILDSRMNTKYDENDKLIREVKVITLKSKLVSDFRKDFQFYKVREINNYHHAHDAYLNAVVGTALIKKYPKLESEFVYGDYKVYDVRKMIAKSEQEIGKATAKYFFYSNIMNFFKTEITLANGEIRKRPLIETNGETGEIVWDKGRDFATVRKVLSMPQVNIVKKTEVQTGGFSKESILPKRNSDKLIARKKDWDPKKYGGFDSPTVAYSVLVVAKVEKGKSKKLKSVKELLGITIMERSSFEKNPIDFLEAKGYKEVKKDLIIKLPKYSLFELENGRKRMLASAGELQKGNELALPSKYVNFLYLASHYEKLKGSPEDNEQKQLFVEQHKHYLDEIIEQISEFSKRVILADANLDKVLSAYNKHRDKPIREQAENIIHLFTLTNLGAPAAFKYFDTTIDRKRYTSTKEVLDATLIHQSITGLYETRIDLSQLGGDGGEAAAKEAAAKEAAAKGGLDDEYRLYSPLVKPDQNIQFWLEQFPQAWAETAGMGLAKQVPPQVIQLKASATPVSVRQYPLSKEAQEGIRPHVQRLIQQGILVPVQSPWNTPLLPVRKPGTNDYRPVQDLREVNKRVQDIHPTVPNPYNLLCALPPQRSWYTVLDLKDAFFCLRLHPTSQPLFAFEWRDPGTGRTGQLTWTRLPQGFKNSPTIFNEALHRDLANFRIQHPQVTLLQYVDDLLLAGATKQDCLEGTKALLLELSDLGYRASAKKAQICRREVTYLGYSLRDGQRWLTEARKKTVVQIPAPTTAKQVREFLGKAGFCRLFIPGFATLAAPLYPLTKPKGEFSWAPEHQKAFDAIKKALLSAPALALPDVTKPFTLYVDERKGVARGVLTQTLGPWRRPVAYLSKKLDPVASGWPVCLKAIAAVAILVKDADKLTLGQNITVIAPHALENIVRQPPDRWMTNARMTHYQSLLLTERVTFAPPAALNPATLLPEETDEPVTHDCHQLLIEETGVRKDLTDIPLTGEVLTWFTDGSSYVVEGKRMAGAAVVDGTRTIWASSLPEGTSAQKAELMALTQALRLAEGKSINIYTDSRYAFATAHVHGAIYKQRGWLTSAGREIKNKEEILSLLEALHLPKRLAIIHCPGHQKAKDPISRGNQMADRVAKQAAQGVNLLPAGKRTADGSEFEKRTADGSEFESPKKKAKVE

SEQ ID NO: 38 - protein, 2086 aa, synthetic construct
MPAAKRVKLDGGDKKYSIGLDIGTNSVGWAVITDEYKVPSKKFKVLGNTDRHSIKKNLIGALLFDSGETAEATRLKRTARRRYTRRKNRICYLQEIFSNEMAKVDDSFFHRLEESFLVEEDKKHERHPIFGNIVDEVAYHEKYPTIYHLRKKLVDSTDKADLRLIYLALAHMIKFRGHFLIEGDLNPDNSDVDKLFIQLVQTYNQLFEENPINASGVDAKAILSARLSKSRRLENLIAQLPGEKKNGLFGNLIALSLGLTPNFKSNFDLAEDAKLQLSKDTYDDDLDNLLAQIGDQYADLFLAAKNLSDAILLSDILRVNTEITKAPLSASMIKRYDEHHQDLTLLKALVRQQLPEKYKEIFFDQSKNGYAGYIDGGASQEEFYKFIKPILEKMDGTEELLVKLNREDLLRKQRTFDNGSIPHQIHLGELHAILRRQEDFYPFLKDNREKIEKILTFRIPYYVGPLARGNSRFAWMTRKSEETITPWNFEEVVDKGASAQSFIERMTNFDKNLPNEKVLPKHSLLYEYFTVYNELTKVKYVTEGMRKPAFLSGEQKKAIVDLLFKTNRKVTVKQLKEDYFKKIECFDSVEISGVEDRFNASLGTYHDLLKIIKDKDFLDNEENEDILEDIVLTLTLFEDREMIEERLKTYAHLFDDKVMKQLKRRRYTGWGRLSRKLINGIRDKQSGKTILDFLKSDGFANRNFMQLIHDDSLTFKEDIQKAQVSGQGDSLHEHIANLAGSPAIKKGILQTVKVVDELVKVMGRHKPENIVIEMARENQTTQKGQKNSRERMKRIEEGIKELGSQILKEHPVENTQLQNEKLYLYYLQNGRDMYVDQELDINRLSDYDVDHIVPQSFLKDDSIDNKVLTRSDKARGKSDNVPSEEVVKKMKNYWRQLLNAKLITQRKFDNLTKAERGGLSELDKAGFIKRQLVETRQITKHVAQILDSRMNTKYDENDKLIREVKVITLKSKLVSDFRKDFQFYKVREINNYHHAHDAYLNAVVGTALIKKYPKLESEFVYGDYKVYDVRKMIAKSEQEIGKATAKYFFYSNIMNFFKTEITLANGEIRKRPLIETNGETGEIVWDKGRDFATVRKVLSMPQVNIVKKTEVQTGGFSKESILPKRNSDKLIARKKDWDPKKYGGFDSPTVAYSVLVVAKVEKGKSKKLKSVKELLGITIMERSSFEKNPIDFLEAKGYKEVKKDLIIKLPKYSLFELENGRKRMLASAGELQKGNELALPSKYVNFLYLASHYEKLKGSPEDNEQKQLFVEQHKHYLDEIIEQISEFSKRVILADANLDKVLSAYNKHRDKPIREQAENIIHLFTLTNLGAPAAFKYFDTTIDRKRYTSTKEVLDATLIHQSITGLYETRIDLSQLGGDGGGGSGSSPAPGGLDDEYRLYSPLVKPDQNIQFWLEQFPQAWAETAGMGLAKQVPPQVIQLKASATPVSVRQYPLSKEAQEGIRPHVQRLIQQGILVPVQSPWNTPLLPVRKPGTNDYRPVQDLREVNKRVQDIHPTVPNPYNLLCALPPQRSWYTVLDLKDAFFCLRLHPTSQPLFAFEWRDPGTGRTGQLTWTRLPQGFKNSPTIFNEALHRDLANFRIQHPQVTLLQYVDDLLLAGATKQDCLEGTKALLLELSDLGYRASAKKAQICRREVTYLGYSLRDGQRWLTEARKKTVVQIPAPTTAKQVREFLGKAGFCRLFIPGFATLAAPLYPLTKPKGEFSWAPEHQKAFDAIKKALLSAPALALPDVTKPFTLYVDERKGVARGVLTQTLGPWRRPVAYLSKKLDPVASGWPVCLKAIAAVAILVKDADKLTLGQNITVIAPHALENIVRQPPDRWMTNARMTHYQSLLLTERVTFAPPAALNPATLLPEETDEPVTHDCHQLLIEETGVRKDLTDIPLTGEVLTWFTDGSSYVVEGKRMAGAAVVDGTRTIWASSLPEGTSAQKAELMALTQALRLAEGKSINIYTDSRYAFATAHVHGAIYKQRGWLTSAGREIKNKEEILSLLEALHLPKRLAIIHCPGHQKAKDPISRGNQMADRVAKQAAQGVNLLPAGKRTADGSEFEKRTADGSEFESPKKKAKVE

SEQ ID NO: 39 - protein, 2102 aa, synthetic construct
MPAAKRVKLDGGDKKYSIGLDIGTNSVGWAVITDEYKVPSKKFKVLGNTDRHSIKKNLIGALLFDSGETAEATRLKRTARRRYTRRKNRICYLQEIFSNEMAKVDDSFFHRLEESFLVEEDKKHERHPIFGNIVDEVAYHEKYPTIYHLRKKLVDSTDKADLRLIYLALAHMIKFRGHFLIEGDLNPDNSDVDKLFIQLVQTYNQLFEENPINASGVDAKAILSARLSKSRRLENLIAQLPGEKKNGLFGNLIALSLGLTPNFKSNFDLAEDAKLQLSKDTYDDDLDNLLAQIGDQYADLFLAAKNLSDAILLSDILRVNTEITKAPLSASMIKRYDEHHQDLTLLKALVRQQLPEKYKEIFFDQSKNGYAGYIDGGASQEEFYKFIKPILEKMDGTEELLVKLNREDLLRKQRTFDNGSIPHQIHLGELHAILRRQEDFYPFLKDNREKIEKILTFRIPYYVGPLARGNSRFAWMTRKSEETITPWNFEEVVDKGASAQSFIERMTNFDKNLPNEKVLPKHSLLYEYFTVYNELTKVKYVTEGMRKPAFLSGEQKKAIVDLLFKTNRKVTVKQLKEDYFKKIECFDSVEISGVEDRFNASLGTYHDLLKIIKDKDFLDNEENEDILEDIVLTLTLFEDREMIEERLKTYAHLFDDKVMKQLKRRRYTGWGRLSRKLINGIRDKQSGKTILDFLKSDGFANRNFMQLIHDDSLTFKEDIQKAQVSGQGDSLHEHIANLAGSPAIKKGILQTVKVVDELVKVMGRHKPENIVIEMARENQTTQKGQKNSRERMKRIEEGIKELGSQILKEHPVENTQLQNEKLYLYYLQNGRDMYVDQELDINRLSDYDVDHIVPQSFLKDDSIDNKVLTRSDKARGKSDNVPSEEVVKKMKNYWRQLLNAKLITQRKFDNLTKAERGGLSELDKAGFIKRQLVETRQITKHVAQILDSRMNTKYDENDKLIREVKVITLKSKLVSDFRKDFQFYKVREINNYHHAHDAYLNAVVGTALIKKYPKLESEFVYGDYKVYDVRKMIAKSEQEIGKATAKYFFYSNIMNFFKTEITLANGEIRKRPLIETNGETGEIVWDKGRDFATVRKVLSMPQVNIVKKTEVQTGGFSKESILPKRNSDKLIARKKDWDPKKYGGFDSPTVAYSVLVVAKVEKGKSKKLKSVKELLGITIMERSSFEKNPIDFLEAKGYKEVKKDLIIKLPKYSLFELENGRKRMLASAGELQKGNELALPSKYVNFLYLASHYEKLKGSPEDNEQKQLFVEQHKHYLDEIIEQISEFSKRVILADANLDKVLSAYNKHRDKPIREQAENIIHLFTLTNLGAPAAFKYFDTTIDRKRYTSTKEVLDATLIHQSITGLYETRIDLSQLGGDGGEAAAKEAAAKEAAAKEAAAKEAAAKGGLDDEYRLYSPLVKPDQNIQFWLEQFPQAWAETAGMGLAKQVPPQVIQLKASATPVSVRQYPLSKEAQEGIRPHVQRLIQQGILVPVQSPWNTPLLPVRKPGTNDYRPVQDLREVNKRVQDIHPTVPNPYNLLCALPPQRSWYTVLDLKDAFFCLRLHPTSQPLFAFEWRDPGTGRTGQLTWTRLPQGFKNSPTIFNEALHRDLANFRIQHPQVTLLQYVDDLLLAGATKQDCLEGTKALLLELSDLGYRASAKKAQICRREVTYLGYSLRDGQRWLTEARKKTVVQIPAPTTAKQVREFLGKAGFCRLFIPGFATLAAPLYPLTKPKGEFSWAPEHQKAFDAIKKALLSAPALALPDVTKPFTLYVDERKGVARGVLTQTLGPWRRPVAYLSKKLDPVASGWPVCLKAIAAVAILVKDADKLTLGQNITVIAPHALENIVRQPPDRWMTNARMTHYQSLLLTERVTFAPPAALNPATLLPEETDEPVTHDCHQLLIEETGVRKDLTDIPLTGEVLTWFTDGSSYVVEGKRMAGAAVVDGTRTIWASSLPEGTSAQKAELMALTQALRLAEGKSINIYTDSRYAFATAHVHGAIYKQRGWLTSAGREIKNKEEILSLLEALHLPKRLAIIHCPGHQKAKDPISRGNQMADRVAKQAAQGVNLLPAGKRTADGSEFEKRTADGSEFESPKKKAKVE

SEQ ID NO: 40 - protein, 2088 aa, synthetic construct
MPAAKRVKLDGGDKKYSIGLDIGTNSVGWAVITDEYKVPSKKFKVLGNTDRHSIKKNLIGALLFDSGETAEATRLKRTARRRYTRRKNRICYLQEIFSNEMAKVDDSFFHRLEESFLVEEDKKHERHPIFGNIVDEVAYHEKYPTIYHLRKKLVDSTDKADLRLIYLALAHMIKFRGHFLIEGDLNPDNSDVDKLFIQLVQTYNQLFEENPINASGVDAKAILSARLSKSRRLENLIAQLPGEKKNGLFGNLIALSLGLTPNFKSNFDLAEDAKLQLSKDTYDDDLDNLLAQIGDQYADLFLAAKNLSDAILLSDILRVNTEITKAPLSASMIKRYDEHHQDLTLLKALVRQQLPEKYKEIFFDQSKNGYAGYIDGGASQEEFYKFIKPILEKMDGTEELLVKLNREDLLRKQRTFDNGSIPHQIHLGELHAILRRQEDFYPFLKDNREKIEKILTFRIPYYVGPLARGNSRFAWMTRKSEETITPWNFEEVVDKGASAQSFIERMTNFDKNLPNEKVLPKHSLLYEYFTVYNELTKVKYVTEGMRKPAFLSGEQKKAIVDLLFKTNRKVTVKQLKEDYFKKIECFDSVEISGVEDRFNASLGTYHDLLKIIKDKDFLDNEENEDILEDIVLTLTLFEDREMIEERLKTYAHLFDDKVMKQLKRRRYTGWGRLSRKLINGIRDKQSGKTILDFLKSDGFANRNFMQLIHDDSLTFKEDIQKAQVSGQGDSLHEHIANLAGSPAIKKGILQTVKVVDELVKVMGRHKPENIVIEMARENQTTQKGQKNSRERMKRIEEGIKELGSQILKEHPVENTQLQNEKLYLYYLQNGRDMYVDQELDINRLSDYDVDHIVPQSFLKDDSIDNKVLTRSDKARGKSDNVPSEEVVKKMKNYWRQLLNAKLITQRKFDNLTKAERGGLSELDKAGFIKRQLVETRQITKHVAQILDSRMNTKYDENDKLIREVKVITLKSKLVSDFRKDFQFYKVREINNYHHAHDAYLNAVVGTALIKKYPKLESEFVYGDYKVYDVRKMIAKSEQEIGKATAKYFFYSNIMNFFKTEITLANGEIRKRPLIETNGETGEIVWDKGRDFATVRKVLSMPQVNIVKKTEVQTGGFSKESILPKRNSDKLIARKKDWDPKKYGGFDSPTVAYSVLVVAKVEKGKSKKLKSVKELLGITIMERSSFEKNPIDFLEAKGYKEVKKDLIIKLPKYSLFELENGRKRMLASAGELQKGNELALPSKYVNFLYLASHYEKLKGSPEDNEQKQLFVEQHKHYLDEIIEQISEFSKRVILADANLDKVLSAYNKHRDKPIREQAENIIHLFTLTNLGAPAAFKYFDTTIDRKRYTSTKEVLDATLIHQSITGLYETRIDLSQLGGDGGGSSGGGEAAAKGGLDDEYRLYSPLVKPDQNIQFWLEQFPQAWAETAGMGLAKQVPPQVIQLKASATPVSVRQYPLSKEAQEGIRPHVQRLIQQGILVPVQSPWNTPLLPVRKPGTNDYRPVQDLREVNKRVQDIHPTVPNPYNLLCALPPQRSWYTVLDLKDAFFCLRLHPTSQPLFAFEWRDPGTGRTGQLTWTRLPQGFKNSPTIFNEALHRDLANFRIQHPQVTLLQYVDDLLLAGATKQDCLEGTKALLLELSDLGYRASAKKAQICRREVTYLGYSLRDGQRWLTEARKKTVVQIPAPTTAKQVREFLGKAGFCRLFIPGFATLAAPLYPLTKPKGEFSWAPEHQKAFDAIKKALLSAPALALPDVTKPFTLYVDERKGVARGVLTQTLGPWRRPVAYLSKKLDPVASGWPVCLKAIAAVAILVKDADKLTLGQNITVIAPHALENIVRQPPDRWMTNARMTHYQSLLLTERVTFAPPAALNPATLLPEETDEPVTHDCHQLLIEETGVRKDLTDIPLTGEVLTWFTDGSSYVVEGKRMAGAAVVDGTRTIWASSLPEGTSAQKAELMALTQALRLAEGKSINIYTDSRYAFATAHVHGAIYKQRGWLTSAGREIKNKEEILSLLEALHLPKRLAIIHCPGHQKAKDPISRGNQMADRVAKQAAQGVNLLPAGKRTADGSEFEKRTADGSEFESPKKKAKVE

SEQ ID NO: 41 - protein, 2089 aa, synthetic construct
MPAAKRVKLDGGDKKYSIGLDIGTNSVGWAVITDEYKVPSKKFKVLGNTDRHSIKKNLIGALLFDSGETAEATRLKRTARRRYTRRKNRICYLQEIFSNEMAKVDDSFFHRLEESFLVEEDKKHERHPIFGNIVDEVAYHEKYPTIYHLRKKLVDSTDKADLRLIYLALAHMIKFRGHFLIEGDLNPDNSDVDKLFIQLVQTYNQLFEENPINASGVDAKAILSARLSKSRRLENLIAQLPGEKKNGLFGNLIALSLGLTPNFKSNFDLAEDAKLQLSKDTYDDDLDNLLAQIGDQYADLFLAAKNLSDAILLSDILRVNTEITKAPLSASMIKRYDEHHQDLTLLKALVRQQLPEKYKEIFFDQSKNGYAGYIDGGASQEEFYKFIKPILEKMDGTEELLVKLNREDLLRKQRTFDNGSIPHQIHLGELHAILRRQEDFYPFLKDNREKIEKILTFRIPYYVGPLARGNSRFAWMTRKSEETITPWNFEEVVDKGASAQSFIERMTNFDKNLPNEKVLPKHSLLYEYFTVYNELTKVKYVTEGMRKPAFLSGEQKKAIVDLLFKTNRKVTVKQLKEDYFKKIECFDSVEISGVEDRFNASLGTYHDLLKIIKDKDFLDNEENEDILEDIVLTLTLFEDREMIEERLKTYAHLFDDKVMKQLKRRRYTGWGRLSRKLINGIRDKQSGKTILDFLKSDGFANRNFMQLIHDDSLTFKEDIQKAQVSGQGDSLHEHIANLAGSPAIKKGILQTVKVVDELVKVMGRHKPENIVIEMARENQTTQKGQKNSRERMKRIEEGIKELGSQILKEHPVENTQLQNEKLYLYYLQNGRDMYVDQELDINRLSDYDVDHIVPQSFLKDDSIDNKVLTRSDKARGKSDNVPSEEVVKKMKNYWRQLLNAKLITQRKFDNLTKAERGGLSELDKAGFIKRQLVETRQITKHVAQILDSRMNTKYDENDKLIREVKVITLKSKLVSDFRKDFQFYKVREINNYHHAHDAYLNAVVGTALIKKYPKLESEFVYGDYKVYDVRKMIAKSEQEIGKATAKYFFYSNIMNFFKTEITLANGEIRKRPLIETNGETGEIVWDKGRDFATVRKVLSMPQVNIVKKTEVQTGGFSKESILPKRNSDKLIARKKDWDPKKYGGFDSPTVAYSVLVVAKVEKGKSKKLKSVKELLGITIMERSSFEKNPIDFLEAKGYKEVKKDLIIKLPKYSLFELENGRKRMLASAGELQKGNELALPSKYVNFLYLASHYEKLKGSPEDNEQKQLFVEQHKHYLDEIIEQISEFSKRVILADANLDKVLSAYNKHRDKPIREQAENIIHLFTLTNLGAPAAFKYFDTTIDRKRYTSTKEVLDATLIHQSITGLYETRIDLSQLGGDGGGSSGSSGSSGSSGGLDDEYRLYSPLVKPDQNIQFWLEQFPQAWAETAGMGLAKQVPPQVIQLKASATPVSVRQYPLSKEAQEGIRPHVQRLIQQGILVPVQSPWNTPLLPVRKPGTNDYRPVQDLREVNKRVQDIHPTVPNPYNLLCALPPQRSWYTVLDLKDAFFCLRLHPTSQPLFAFEWRDPGTGRTGQLTWTRLPQGFKNSPTIFNEALHRDLANFRIQHPQVTLLQYVDDLLLAGATKQDCLEGTKALLLELSDLGYRASAKKAQICRREVTYLGYSLRDGQRWLTEARKKTVVQIPAPTTAKQVREFLGKAGFCRLFIPGFATLAAPLYPLTKPKGEFSWAPEHQKAFDAIKKALLSAPALALPDVTKPFTLYVDERKGVARGVLTQTLGPWRRPVAYLSKKLDPVASGWPVCLKAIAAVAILVKDADKLTLGQNITVIAPHALENIVRQPPDRWMTNARMTHYQSLLLTERVTFAPPAALNPATLLPEETDEPVTHDCHQLLIEETGVRKDLTDIPLTGEVLTWFTDGSSYVVEGKRMAGAAVVDGTRTIWASSLPEGTSAQKAELMALTQALRLAEGKSINIYTDSRYAFATAHVHGAIYKQRGWLTSAGREIKNKEEILSLLEALHLPKRLAIIHCPGHQKAKDPISRGNQMADRVAKQAAQGVNLLPAGKRTADGSEFEKRTADGSEFESPKKKAKVE

SEQ ID NO: 42 - protein, 2088 aa, synthetic construct
MPAAKRVKLDGGDKKYSIGLDIGTNSVGWAVITDEYKVPSKKFKVLGNTDRHSIKKNLIGALLFDSGETAEATRLKRTARRRYTRRKNRICYLQEIFSNEMAKVDDSFFHRLEESFLVEEDKKHERHPIFGNIVDEVAYHEKYPTIYHLRKKLVDSTDKADLRLIYLALAHMIKFRGHFLIEGDLNPDNSDVDKLFIQLVQTYNQLFEENPINASGVDAKAILSARLSKSRRLENLIAQLPGEKKNGLFGNLIALSLGLTPNFKSNFDLAEDAKLQLSKDTYDDDLDNLLAQIGDQYADLFLAAKNLSDAILLSDILRVNTEITKAPLSASMIKRYDEHHQDLTLLKALVRQQLPEKYKEIFFDQSKNGYAGYIDGGASQEEFYKFIKPILEKMDGTEELLVKLNREDLLRKQRTFDNGSIPHQIHLGELHAILRRQEDFYPFLKDNREKIEKILTFRIPYYVGPLARGNSRFAWMTRKSEETITPWNFEEVVDKGASAQSFIERMTNFDKNLPNEKVLPKHSLLYEYFTVYNELTKVKYVTEGMRKPAFLSGEQKKAIVDLLFKTNRKVTVKQLKEDYFKKIECFDSVEISGVEDRFNASLGTYHDLLKIIKDKDFLDNEENEDILEDIVLTLTLFEDREMIEERLKTYAHLFDDKVMKQLKRRRYTGWGRLSRKLINGIRDKQSGKTILDFLKSDGFANRNFMQLIHDDSLTFKEDIQKAQVSGQGDSLHEHIANLAGSPAIKKGILQTVKVVDELVKVMGRHKPENIVIEMARENQTTQKGQKNSRERMKRIEEGIKELGSQILKEHPVENTQLQNEKLYLYYLQNGRDMYVDQELDINRLSDYDVDHIVPQSFLKDDSIDNKVLTRSDKARGKSDNVPSEEVVKKMKNYWRQLLNAKLITQRKFDNLTKAERGGLSELDKAGFIKRQLVETRQITKHVAQILDSRMNTKYDENDKLIREVKVITLKSKLVSDFRKDFQFYKVREINNYHHAHDAYLNAVVGTALIKKYPKLESEFVYGDYKVYDVRKMIAKSEQEIGKATAKYFFYSNIMNFFKTEITLANGEIRKRPLIETNGETGEIVWDKGRDFATVRKVLSMPQVNIVKKTEVQTGGFSKESILPKRNSDKLIARKKDWDPKKYGGFDSPTVAYSVLVVAKVEKGKSKKLKSVKELLGITIMERSSFEKNPIDFLEAKGYKEVKKDLIIKLPKYSLFELENGRKRMLASAGELQKGNELALPSKYVNFLYLASHYEKLKGSPEDNEQKQLFVEQHKHYLDEIIEQISEFSKRVILADANLDKVLSAYNKHRDKPIREQAENIIHLFTLTNLGAPAAFKYFDTTIDRKRYTSTKEVLDATLIHQSITGLYETRIDLSQLGGDGGGSSEAAAKGGGGGLDDEYRLYSPLVKPDQNIQFWLEQFPQAWAETAGMGLAKQVPPQVIQLKASATPVSVRQYPLSKEAQEGIRPHVQRLIQQGILVPVQSPWNTPLLPVRKPGTNDYRPVQDLREVNKRVQDIHPTVPNPYNLLCALPPQRSWYTVLDLKDAFFCLRLHPTSQPLFAFEWRDPGTGRTGQLTWTRLPQGFKNSPTIFNEALHRDLANFRIQHPQVTLLQYVDDLLLAGATKQDCLEGTKALLLELSDLGYRASAKKAQICRREVTYLGYSLRDGQRWLTEARKKTVVQIPAPTTAKQVREFLGKAGFCRLFIPGFATLAAPLYPLTKPKGEFSWAPEHQKAFDAIKKALLSAPALALPDVTKPFTLYVDERKGVARGVLTQTLGPWRRPVAYLSKKLDPVASGWPVCLKAIAAVAILVKDADKLTLGQNITVIAPHALENIVRQPPDRWMTNARMTHYQSLLLTERVTFAPPAALNPATLLPEETDEPVTHDCHQLLIEETGVRKDLTDIPLTGEVLTWFTDGSSYVVEGKRMAGAAVVDGTRTIWASSLPEGTSAQKAELMALTQALRLAEGKSINIYTDSRYAFATAHVHGAIYKQRGWLTSAGREIKNKEEILSLLEALHLPKRLAIIHCPGHQKAKDPISRGNQMADRVAKQAAQGVNLLPAGKRTADGSEFEKRTADGSEFESPKKKAKVE

SEQ ID NO: 43 - protein, 2086 aa, synthetic construct
MPAAKRVKLDGGDKKYSIGLDIGTNSVGWAVITDEYKVPSKKFKVLGNTDRHSIKKNLIGALLFDSGETAEATRLKRTARRRYTRRKNRICYLQEIFSNEMAKVDDSFFHRLEESFLVEEDKKHERHPIFGNIVDEVAYHEKYPTIYHLRKKLVDSTDKADLRLIYLALAHMIKFRGHFLIEGDLNPDNSDVDKLFIQLVQTYNQLFEENPINASGVDAKAILSARLSKSRRLENLIAQLPGEKKNGLFGNLIALSLGLTPNFKSNFDLAEDAKLQLSKDTYDDDLDNLLAQIGDQYADLFLAAKNLSDAILLSDILRVNTEITKAPLSASMIKRYDEHHQDLTLLKALVRQQLPEKYKEIFFDQSKNGYAGYIDGGASQEEFYKFIKPILEKMDGTEELLVKLNREDLLRKQRTFDNGSIPHQIHLGELHAILRRQEDFYPFLKDNREKIEKILTFRIPYYVGPLARGNSRFAWMTRKSEETITPWNFEEVVDKGASAQSFIERMTNFDKNLPNEKVLPKHSLLYEYFTVYNELTKVKYVTEGMRKPAFLSGEQKKAIVDLLFKTNRKVTVKQLKEDYFKKIECFDSVEISGVEDRFNASLGTYHDLLKIIKDKDFLDNEENEDILEDIVLTLTLFEDREMIEERLKTYAHLFDDKVMKQLKRRRYTGWGRLSRKLINGIRDKQSGKTILDFLKSDGFANRNFMQLIHDDSLTFKEDIQKAQVSGQGDSLHEHIANLAGSPAIKKGILQTVKVVDELVKVMGRHKPENIVIEMARENQTTQKGQKNSRERMKRIEEGIKELGSQILKEHPVENTQLQNEKLYLYYLQNGRDMYVDQELDINRLSDYDVDHIVPQSFLKDDSIDNKVLTRSDKARGKSDNVPSEEVVKKMKNYWRQLLNAKLITQRKFDNLTKAERGGLSELDKAGFIKRQLVETRQITKHVAQILDSRMNTKYDENDKLIREVKVITLKSKLVSDFRKDFQFYKVREINNYHHAHDAYLNAVVGTALIKKYPKLESEFVYGDYKVYDVRKMIAKSEQEIGKATAKYFFYSNIMNFFKTEITLANGEIRKRPLIETNGETGEIVWDKGRDFATVRKVLSMPQVNIVKKTEVQTGGFSKESILPKRNSDKLIARKKDWDPKKYGGFDSPTVAYSVLVVAKVEKGKSKKLKSVKELLGITIMERSSFEKNPIDFLEAKGYKEVKKDLIIKLPKYSLFELENGRKRMLASAGELQKGNELALPSKYVNFLYLASHYEKLKGSPEDNEQKQLFVEQHKHYLDEIIEQISEFSKRVILADANLDKVLSAYNKHRDKPIREQAENIIHLFTLTNLGAPAAFKYFDTTIDRKRYTSTKEVLDATLIHQSITGLYETRIDLSQLGGDGGGGGGSSPAPGGLDDEYRLYSPLVKPDQNIQFWLEQFPQAWAETAGMGLAKQVPPQVIQLKASATPVSVRQYPLSKEAQEGIRPHVQRLIQQGILVPVQSPWNTPLLPVRKPGTNDYRPVQDLREVNKRVQDIHPTVPNPYNLLCALPPQRSWYTVLDLKDAFFCLRLHPTSQPLFAFEWRDPGTGRTGQLTWTRLPQGFKNSPTIFNEALHRDLANFRIQHPQVTLLQYVDDLLLAGATKQDCLEGTKALLLELSDLGYRASAKKAQICRREVTYLGYSLRDGQRWLTEARKKTVVQIPAPTTAKQVREFLGKAGFCRLFIPGFATLAAPLYPLTKPKGEFSWAPEHQKAFDAIKKALLSAPALALPDVTKPFTLYVDERKGVARGVLTQTLGPWRRPVAYLSKKLDPVASGWPVCLKAIAAVAILVKDADKLTLGQNITVIAPHALENIVRQPPDRWMTNARMTHYQSLLLTERVTFAPPAALNPATLLPEETDEPVTHDCHQLLIEETGVRKDLTDIPLTGEVLTWFTDGSSYVVEGKRMAGAAVVDGTRTIWASSLPEGTSAQKAELMALTQALRLAEGKSINIYTDSRYAFATAHVHGAIYKQRGWLTSAGREIKNKEEILSLLEALHLPKRLAIIHCPGHQKAKDPISRGNQMADRVAKQAAQGVNLLPAGKRTADGSEFEKRTADGSEFESPKKKAKVE

SEQ ID NO: 44 - protein, 2086 aa, synthetic construct
MPAAKRVKLDGGDKKYSIGLDIGTNSVGWAVITDEYKVPSKKFKVLGNTDRHSIKKNLIGALLFDSGETAEATRLKRTARRRYTRRKNRICYLQEIFSNEMAKVDDSFFHRLEESFLVEEDKKHERHPIFGNIVDEVAYHEKYPTIYHLRKKLVDSTDKADLRLIYLALAHMIKFRGHFLIEGDLNPDNSDVDKLFIQLVQTYNQLFEENPINASGVDAKAILSARLSKSRRLENLIAQLPGEKKNGLFGNLIALSLGLTPNFKSNFDLAEDAKLQLSKDTYDDDLDNLLAQIGDQYADLFLAAKNLSDAILLSDILRVNTEITKAPLSASMIKRYDEHHQDLTLLKALVRQQLPEKYKEIFFDQSKNGYAGYIDGGASQEEFYKFIKPILEKMDGTEELLVKLNREDLLRKQRTFDNGSIPHQIHLGELHAILRRQEDFYPFLKDNREKIEKILTFRIPYYVGPLARGNSRFAWMTRKSEETITPWNFEEVVDKGASAQSFIERMTNFDKNLPNEKVLPKHSLLYEYFTVYNELTKVKYVTEGMRKPAFLSGEQKKAIVDLLFKTNRKVTVKQLKEDYFKKIECFDSVEISGVEDRFNASLGTYHDLLKIIKDKDFLDNEENEDILEDIVLTLTLFEDREMIEERLKTYAHLFDDKVMKQLKRRRYTGWGRLSRKLINGIRDKQSGKTILDFLKSDGFANRNFMQLIHDDSLTFKEDIQKAQVSGQGDSLHEHIANLAGSPAIKKGILQTVKVVDELVKVMGRHKPENIVIEMARENQTTQKGQKNSRERMKRIEEGIKELGSQILKEHPVENTQLQNEKLYLYYLQNGRDMYVDQELDINRLSDYDVDHIVPQSFLKDDSIDNKVLTRSDKARGKSDNVPSEEVVKKMKNYWRQLLNAKLITQRKFDNLTKAERGGLSELDKAGFIKRQLVETRQITKHVAQILDSRMNTKYDENDKLIREVKVITLKSKLVSDFRKDFQFYKVREINNYHHAHDAYLNAVVGTALIKKYPKLESEFVYGDYKVYDVRKMIAKSEQEIGKATAKYFFYSNIMNFFKTEITLANGEIRKRPLIETNGETGEIVWDKGRDFATVRKVLSMPQVNIVKKTEVQTGGFSKESILPKRNSDKLIARKKDWDPKKYGGFDSPTVAYSVLVVAKVEKGKSKKLKSVKELLGITIMERSSFEKNPIDFLEAKGYKEVKKDLIIKLPKYSLFELENGRKRMLASAGELQKGNELALPSKYVNFLYLASHYEKLKGSPEDNEQKQLFVEQHKHYLDEIIEQISEFSKRVILADANLDKVLSAYNKHRDKPIREQAENIIHLFTLTNLGAPAAFKYFDTTIDRKRYTSTKEVLDATLIHQSITGLYETRIDLSQLGGDGGPAPGGSGGGGGLDDEYRLYSPLVKPDQNIQFWLEQFPQAWAETAGMGLAKQVPPQVIQLKASATPVSVRQYPLSKEAQEGIRPHVQRLIQQGILVPVQSPWNTPLLPVRKPGTNDYRPVQDLREVNKRVQDIHPTVPNPYNLLCALPPQRSWYTVLDLKDAFFCLRLHPTSQPLFAFEWRDPGTGRTGQLTWTRLPQGFKNSPTIFNEALHRDLANFRIQHPQVTLLQYVDDLLLAGATKQDCLEGTKALLLELSDLGYRASAKKAQICRREVTYLGYSLRDGQRWLTEARKKTVVQIPAPTTAKQVREFLGKAGFCRLFIPGFATLAAPLYPLTKPKGEFSWAPEHQKAFDAIKKALLSAPALALPDVTKPFTLYVDERKGVARGVLTQTLGPWRRPVAYLSKKLDPVASGWPVCLKAIAAVAILVKDADKLTLGQNITVIAPHALENIVRQPPDRWMTNARMTHYQSLLLTERVTFAPPAALNPATLLPEETDEPVTHDCHQLLIEETGVRKDLTDIPLTGEVLTWFTDGSSYVVEGKRMAGAAVVDGTRTIWASSLPEGTSAQKAELMALTQALRLAEGKSINIYTDSRYAFATAHVHGAIYKQRGWLTSAGREIKNKEEILSLLEALHLPKRLAIIHCPGHQKAKDPISRGNQMADRVAKQAAQGVNLLPAGKRTADGSEFEKRTADGSEFESPKKKAKVE

SEQ ID NO: 45 - protein, 2084 aa, synthetic construct
MPAAKRVKLDGGDKKYSIGLDIGTNSVGWAVITDEYKVPSKKFKVLGNTDRHSIKKNLIGALLFDSGETAEATRLKRTARRRYTRRKNRICYLQEIFSNEMAKVDDSFFHRLEESFLVEEDKKHERHPIFGNIVDEVAYHEKYPTIYHLRKKLVDSTDKADLRLIYLALAHMIKFRGHFLIEGDLNPDNSDVDKLFIQLVQTYNQLFEENPINASGVDAKAILSARLSKSRRLENLIAQLPGEKKNGLFGNLIALSLGLTPNFKSNFDLAEDAKLQLSKDTYDDDLDNLLAQIGDQYADLFLAAKNLSDAILLSDILRVNTEITKAPLSASMIKRYDEHHQDLTLLKALVRQQLPEKYKEIFFDQSKNGYAGYIDGGASQEEFYKFIKPILEKMDGTEELLVKLNREDLLRKQRTFDNGSIPHQIHLGELHAILRRQEDFYPFLKDNREKIEKILTFRIPYYVGPLARGNSRFAWMTRKSEETITPWNFEEVVDKGASAQSFIERMTNFDKNLPNEKVLPKHSLLYEYFTVYNELTKVKYVTEGMRKPAFLSGEQKKAIVDLLFKTNRKVTVKQLKEDYFKKIECFDSVEISGVEDRFNASLGTYHDLLKIIKDKDFLDNEENEDILEDIVLTLTLFEDREMIEERLKTYAHLFDDKVMKQLKRRRYTGWGRLSRKLINGIRDKQSGKTILDFLKSDGFANRNFMQLIHDDSLTFKEDIQKAQVSGQGDSLHEHIANLAGSPAIKKGILQTVKVVDELVKVMGRHKPENIVIEMARENQTTQKGQKNSRERMKRIEEGIKELGSQILKEHPVENTQLQNEKLYLYYLQNGRDMYVDQELDINRLSDYDVDHIVPQSFLKDDSIDNKVLTRSDKARGKSDNVPSEEVVKKMKNYWRQLLNAKLITQRKFDNLTKAERGGLSELDKAGFIKRQLVETRQITKHVAQILDSRMNTKYDENDKLIREVKVITLKSKLVSDFRKDFQFYKVREINNYHHAHDAYLNAVVGTALIKKYPKLESEFVYGDYKVYDVRKMIAKSEQEIGKATAKYFFYSNIMNFFKTEITLANGEIRKRPLIETNGETGEIVWDKGRDFATVRKVLSMPQVNIVKKTEVQTGGFSKESILPKRNSDKLIARKKDWDPKKYGGFDSPTVAYSVLVVAKVEKGKSKKLKSVKELLGITIMERSSFEKNPIDFLEAKGYKEVKKDLIIKLPKYSLFELENGRKRMLASAGELQKGNELALPSKYVNFLYLASHYEKLKGSPEDNEQKQLFVEQHKHYLDEIIEQISEFSKRVILADANLDKVLSAYNKHRDKPIREQAENIIHLFTLTNLGAPAAFKYFDTTIDRKRYTSTKEVLDATLIHQSITGLYETRIDLSQLGGDGGPAPAPAPGGLDDEYRLYSPLVKPDQNIQFWLEQFPQAWAETAGMGLAKQVPPQVIQLKASATPVSVRQYPLSKEAQEGIRPHVQRLIQQGILVPVQSPWNTPLLPVRKPGTNDYRPVQDLREVNKRVQDIHPTVPNPYNLLCALPPQRSWYTVLDLKDAFFCLRLHPTSQPLFAFEWRDPGTGRTGQLTWTRLPQGFKNSPTIFNEALHRDLANFRIQHPQVTLLQYVDDLLLAGATKQDCLEGTKALLLELSDLGYRASAKKAQICRREVTYLGYSLRDGQRWLTEARKKTVVQIPAPTTAKQVREFLGKAGFCRLFIPGFATLAAPLYPLTKPKGEFSWAPEHQKAFDAIKKALLSAPALALPDVTKPFTLYVDERKGVARGVLTQTLGPWRRPVAYLSKKLDPVASGWPVCLKAIAAVAILVKDADKLTLGQNITVIAPHALENIVRQPPDRWMTNARMTHYQSLLLTERVTFAPPAALNPATLLPEETDEPVTHDCHQLLIEETGVRKDLTDIPLTGEVLTWFTDGSSYVVEGKRMAGAAVVDGTRTIWASSLPEGTSAQKAELMALTQALRLAEGKSINIYTDSRYAFATAHVHGAIYKQRGWLTSAGREIKNKEEILSLLEALHLPKRLAIIHCPGHQKAKDPISRGNQMADRVAKQAAQGVNLLPAGKRTADGSEFEKRTADGSEFESPKKKAKVE

SEQ ID NO: 46 - protein, 2097 aa, synthetic construct
MPAAKRVKLDGGDKKYSIGLDIGTNSVGWAVITDEYKVPSKKFKVLGNTDRHSIKKNLIGALLFDSGETAEATRLKRTARRRYTRRKNRICYLQEIFSNEMAKVDDSFFHRLEESFLVEEDKKHERHPIFGNIVDEVAYHEKYPTIYHLRKKLVDSTDKADLRLIYLALAHMIKFRGHFLIEGDLNPDNSDVDKLFIQLVQTYNQLFEENPINASGVDAKAILSARLSKSRRLENLIAQLPGEKKNGLFGNLIALSLGLTPNFKSNFDLAEDAKLQLSKDTYDDDLDNLLAQIGDQYADLFLAAKNLSDAILLSDILRVNTEITKAPLSASMIKRYDEHHQDLTLLKALVRQQLPEKYKEIFFDQSKNGYAGYIDGGASQEEFYKFIKPILEKMDGTEELLVKLNREDLLRKQRTFDNGSIPHQIHLGELHAILRRQEDFYPFLKDNREKIEKILTFRIPYYVGPLARGNSRFAWMTRKSEETITPWNFEEVVDKGASAQSFIERMTNFDKNLPNEKVLPKHSLLYEYFTVYNELTKVKYVTEGMRKPAFLSGEQKKAIVDLLFKTNRKVTVKQLKEDYFKKIECFDSVEISGVEDRFNASLGTYHDLLKIIKDKDFLDNEENEDILEDIVLTLTLFEDREMIEERLKTYAHLFDDKVMKQLKRRRYTGWGRLSRKLINGIRDKQSGKTILDFLKSDGFANRNFMQLIHDDSLTFKEDIQKAQVSGQGDSLHEHIANLAGSPAIKKGILQTVKVVDELVKVMGRHKPENIVIEMARENQTTQKGQKNSRERMKRIEEGIKELGSQILKEHPVENTQLQNEKLYLYYLQNGRDMYVDQELDINRLSDYDVDHIVPQSFLKDDSIDNKVLTRSDKARGKSDNVPSEEVVKKMKNYWRQLLNAKLITQRKFDNLTKAERGGLSELDKAGFIKRQLVETRQITKHVAQILDSRMNTKYDENDKLIREVKVITLKSKLVSDFRKDFQFYKVREINNYHHAHDAYLNAVVGTALIKKYPKLESEFVYGDYKVYDVRKMIAKSEQEIGKATAKYFFYSNIMNFFKTEITLANGEIRKRPLIETNGETGEIVWDKGRDFATVRKVLSMPQVNIVKKTEVQTGGFSKESILPKRNSDKLIARKKDWDPKKYGGFDSPTVAYSVLVVAKVEKGKSKKLKSVKELLGITIMERSSFEKNPIDFLEAKGYKEVKKDLIIKLPKYSLFELENGRKRMLASAGELQKGNELALPSKYVNFLYLASHYEKLKGSPEDNEQKQLFVEQHKHYLDEIIEQISEFSKRVILADANLDKVLSAYNKHRDKPIREQAENIIHLFTLTNLGAPAAFKYFDTTIDRKRYTSTKEVLDATLIHQSITGLYETRIDLSQLGGDGGEAAAKEAAAKEAAAKEAAAKGGLDDEYRLYSPLVKPDQNIQFWLEQFPQAWAETAGMGLAKQVPPQVIQLKASATPVSVRQYPLSKEAQEGIRPHVQRLIQQGILVPVQSPWNTPLLPVRKPGTNDYRPVQDLREVNKRVQDIHPTVPNPYNLLCALPPQRSWYTVLDLKDAFFCLRLHPTSQPLFAFEWRDPGTGRTGQLTWTRLPQGFKNSPTIFNEALHRDLANFRIQHPQVTLLQYVDDLLLAGATKQDCLEGTKALLLELSDLGYRASAKKAQICRREVTYLGYSLRDGQRWLTEARKKTVVQIPAPTTAKQVREFLGKAGFCRLFIPGFATLAAPLYPLTKPKGEFSWAPEHQKAFDAIKKALLSAPALALPDVTKPFTLYVDERKGVARGVLTQTLGPWRRPVAYLSKKLDPVASGWPVCLKAIAAVAILVKDADKLTLGQNITVIAPHALENIVRQPPDRWMTNARMTHYQSLLLTERVTFAPPAALNPATLLPEETDEPVTHDCHQLLIEETGVRKDLTDIPLTGEVLTWFTDGSSYVVEGKRMAGAAVVDGTRTIWASSLPEGTSAQKAELMALTQALRLAEGKSINIYTDSRYAFATAHVHGAIYKQRGWLTSAGREIKNKEEILSLLEALHLPKRLAIIHCPGHQKAKDPISRGNQMADRVAKQAAQGVNLLPAGKRTADGSEFEKRTADGSEFESPKKKAKVE

SEQ ID NO: 47 - protein, 2083 aa, synthetic construct
MPAAKRVKLDGGDKKYSIGLDIGTNSVGWAVITDEYKVPSKKFKVLGNTDRHSIKKNLIGALLFDSGETAEATRLKRTARRRYTRRKNRICYLQEIFSNEMAKVDDSFFHRLEESFLVEEDKKHERHPIFGNIVDEVAYHEKYPTIYHLRKKLVDSTDKADLRLIYLALAHMIKFRGHFLIEGDLNPDNSDVDKLFIQLVQTYNQLFEENPINASGVDAKAILSARLSKSRRLENLIAQLPGEKKNGLFGNLIALSLGLTPNFKSNFDLAEDAKLQLSKDTYDDDLDNLLAQIGDQYADLFLAAKNLSDAILLSDILRVNTEITKAPLSASMIKRYDEHHQDLTLLKALVRQQLPEKYKEIFFDQSKNGYAGYIDGGASQEEFYKFIKPILEKMDGTEELLVKLNREDLLRKQRTFDNGSIPHQIHLGELHAILRRQEDFYPFLKDNREKIEKILTFRIPYYVGPLARGNSRFAWMTRKSEETITPWNFEEVVDKGASAQSFIERMTNFDKNLPNEKVLPKHSLLYEYFTVYNELTKVKYVTEGMRKPAFLSGEQKKAIVDLLFKTNRKVTVKQLKEDYFKKIECFDSVEISGVEDRFNASLGTYHDLLKIIKDKDFLDNEENEDILEDIVLTLTLFEDREMIEERLKTYAHLFDDKVMKQLKRRRYTGWGRLSRKLINGIRDKQSGKTILDFLKSDGFANRNFMQLIHDDSLTFKEDIQKAQVSGQGDSLHEHIANLAGSPAIKKGILQTVKVVDELVKVMGRHKPENIVIEMARENQTTQKGQKNSRERMKRIEEGIKELGSQILKEHPVENTQLQNEKLYLYYLQNGRDMYVDQELDINRLSDYDVDHIVPQSFLKDDSIDNKVLTRSDKARGKSDNVPSEEVVKKMKNYWRQLLNAKLITQRKFDNLTKAERGGLSELDKAGFIKRQLVETRQITKHVAQILDSRMNTKYDENDKLIREVKVITLKSKLVSDFRKDFQFYKVREINNYHHAHDAYLNAVVGTALIKKYPKLESEFVYGDYKVYDVRKMIAKSEQEIGKATAKYFFYSNIMNFFKTEITLANGEIRKRPLIETNGETGEIVWDKGRDFATVRKVLSMPQVNIVKKTEVQTGGFSKESILPKRNSDKLIARKKDWDPKKYGGFDSPTVAYSVLVVAKVEKGKSKKLKSVKELLGITIMERSSFEKNPIDFLEAKGYKEVKKDLIIKLPKYSLFELENGRKRMLASAGELQKGNELALPSKYVNFLYLASHYEKLKGSPEDNEQKQLFVEQHKHYLDEIIEQISEFSKRVILADANLDKVLSAYNKHRDKPIREQAENIIHLFTLTNLGAPAAFKYFDTTIDRKRYTSTKEVLDATLIHQSITGLYETRIDLSQLGGDGGGSSPAPGGLDDEYRLYSPLVKPDQNIQFWLEQFPQAWAETAGMGLAKQVPPQVIQLKASATPVSVRQYPLSKEAQEGIRPHVQRLIQQGILVPVQSPWNTPLLPVRKPGTNDYRPVQDLREVNKRVQDIHPTVPNPYNLLCALPPQRSWYTVLDLKDAFFCLRLHPTSQPLFAFEWRDPGTGRTGQLTWTRLPQGFKNSPTIFNEALHRDLANFRIQHPQVTLLQYVDDLLLAGATKQDCLEGTKALLLELSDLGYRASAKKAQICRREVTYLGYSLRDGQRWLTEARKKTVVQIPAPTTAKQVREFLGKAGFCRLFIPGFATLAAPLYPLTKPKGEFSWAPEHQKAFDAIKKALLSAPALALPDVTKPFTLYVDERKGVARGVLTQTLGPWRRPVAYLSKKLDPVASGWPVCLKAIAAVAILVKDADKLTLGQNITVIAPHALENIVRQPPDRWMTNARMTHYQSLLLTERVTFAPPAALNPATLLPEETDEPVTHDCHQLLIEETGVRKDLTDIPLTGEVLTWFTDGSSYVVEGKRMAGAAVVDGTRTIWASSLPEGTSAQKAELMALTQALRLAEGKSINIYTDSRYAFATAHVHGAIYKQRGWLTSAGREIKNKEEILSLLEALHLPKRLAIIHCPGHQKAKDPISRGNQMADRVAKQAAQGVNLLPAGKRTADGSEFEKRTADGSEFESPKKKAKVE

SEQ ID NO: 48 - protein, 2085 aa, synthetic construct
MPAAKRVKLDGGDKKYSIGLDIGTNSVGWAVITDEYKVPSKKFKVLGNTDRHSIKKNLIGALLFDSGETAEATRLKRTARRRYTRRKNRICYLQEIFSNEMAKVDDSFFHRLEESFLVEEDKKHERHPIFGNIVDEVAYHEKYPTIYHLRKKLVDSTDKADLRLIYLALAHMIKFRGHFLIEGDLNPDNSDVDKLFIQLVQTYNQLFEENPINASGVDAKAILSARLSKSRRLENLIAQLPGEKKNGLFGNLIALSLGLTPNFKSNFDLAEDAKLQLSKDTYDDDLDNLLAQIGDQYADLFLAAKNLSDAILLSDILRVNTEITKAPLSASMIKRYDEHHQDLTLLKALVRQQLPEKYKEIFFDQSKNGYAGYIDGGASQEEFYKFIKPILEKMDGTEELLVKLNREDLLRKQRTFDNGSIPHQIHLGELHAILRRQEDFYPFLKDNREKIEKILTFRIPYYVGPLARGNSRFAWMTRKSEETITPWNFEEVVDKGASAQSFIERMTNFDKNLPNEKVLPKHSLLYEYFTVYNELTKVKYVTEGMRKPAFLSGEQKKAIVDLLFKTNRKVTVKQLKEDYFKKIECFDSVEISGVEDRFNASLGTYHDLLKIIKDKDFLDNEENEDILEDIVLTLTLFEDREMIEERLKTYAHLFDDKVMKQLKRRRYTGWGRLSRKLINGIRDKQSGKTILDFLKSDGFANRNFMQLIHDDSLTFKEDIQKAQVSGQGDSLHEHIANLAGSPAIKKGILQTVKVVDELVKVMGRHKPENIVIEMARENQTTQKGQKNSRERMKRIEEGIKELGSQILKEHPVENTQLQNEKLYLYYLQNGRDMYVDQELDINRLSDYDVDHIVPQSFLKDDSIDNKVLTRSDKARGKSDNVPSEEVVKKMKNYWRQLLNAKLITQRKFDNLTKAERGGLSELDKAGFIKRQLVETRQITKHVAQILDSRMNTKYDENDKLIREVKVITLKSKLVSDFRKDFQFYKVREINNYHHAHDAYLNAVVGTALIKKYPKLESEFVYGDYKVYDVRKMIAKSEQEIGKATAKYFFYSNIMNFFKTEITLANGEIRKRPLIETNGETGEIVWDKGRDFATVRKVLSMPQVNIVKKTEVQTGGFSKESILPKRNSDKLIARKKDWDPKKYGGFDSPTVAYSVLVVAKVEKGKSKKLKSVKELLGITIMERSSFEKNPIDFLEAKGYKEVKKDLIIKLPKYSLFELENGRKRMLASAGELQKGNELALPSKYVNFLYLASHYEKLKGSPEDNEQKQLFVEQHKHYLDEIIEQISEFSKRVILADANLDKVLSAYNKHRDKPIREQAENIIHLFTLTNLGAPAAFKYFDTTIDRKRYTSTKEVLDATLIHQSITGLYETRIDLSQLGGDGGEAAAKGGGGGLDDEYRLYSPLVKPDQNIQFWLEQFPQAWAETAGMGLAKQVPPQVIQLKASATPVSVRQYPLSKEAQEGIRPHVQRLIQQGILVPVQSPWNTPLLPVRKPGTNDYRPVQDLREVNKRVQDIHPTVPNPYNLLCALPPQRSWYTVLDLKDAFFCLRLHPTSQPLFAFEWRDPGTGRTGQLTWTRLPQGFKNSPTIFNEALHRDLANFRIQHPQVTLLQYVDDLLLAGATKQDCLEGTKALLLELSDLGYRASAKKAQICRREVTYLGYSLRDGQRWLTEARKKTVVQIPAPTTAKQVREFLGKAGFCRLFIPGFATLAAPLYPLTKPKGEFSWAPEHQKAFDAIKKALLSAPALALPDVTKPFTLYVDERKGVARGVLTQTLGPWRRPVAYLSKKLDPVASGWPVCLKAIAAVAILVKDADKLTLGQNITVIAPHALENIVRQPPDRWMTNARMTHYQSLLLTERVTFAPPAALNPATLLPEETDEPVTHDCHQLLIEETGVRKDLTDIPLTGEVLTWFTDGSSYVVEGKRMAGAAVVDGTRTIWASSLPEGTSAQKAELMALTQALRLAEGKSINIYTDSRYAFATAHVHGAIYKQRGWLTSAGREIKNKEEILSLLEALHLPKRLAIIHCPGHQKAKDPISRGNQMADRVAKQAAQGVNLLPAGKRTADGSEFEKRTADGSEFESPKKKAKVE

SEQ ID NO: 49 - protein, 2088 aa, synthetic construct
MPAAKRVKLDGGDKKYSIGLDIGTNSVGWAVITDEYKVPSKKFKVLGNTDRHSIKKNLIGALLFDSGETAEATRLKRTARRRYTRRKNRICYLQEIFSNEMAKVDDSFFHRLEESFLVEEDKKHERHPIFGNIVDEVAYHEKYPTIYHLRKKLVDSTDKADLRLIYLALAHMIKFRGHFLIEGDLNPDNSDVDKLFIQLVQTYNQLFEENPINASGVDAKAILSARLSKSRRLENLIAQLPGEKKNGLFGNLIALSLGLTPNFKSNFDLAEDAKLQLSKDTYDDDLDNLLAQIGDQYADLFLAAKNLSDAILLSDILRVNTEITKAPLSASMIKRYDEHHQDLTLLKALVRQQLPEKYKEIFFDQSKNGYAGYIDGGASQEEFYKFIKPILEKMDGTEELLVKLNREDLLRKQRTFDNGSIPHQIHLGELHAILRRQEDFYPFLKDNREKIEKILTFRIPYYVGPLARGNSRFAWMTRKSEETITPWNFEEVVDKGASAQSFIERMTNFDKNLPNEKVLPKHSLLYEYFTVYNELTKVKYVTEGMRKPAFLSGEQKKAIVDLLFKTNRKVTVKQLKEDYFKKIECFDSVEISGVEDRFNASLGTYHDLLKIIKDKDFLDNEENEDILEDIVLTLTLFEDREMIEERLKTYAHLFDDKVMKQLKRRRYTGWGRLSRKLINGIRDKQSGKTILDFLKSDGFANRNFMQLIHDDSLTFKEDIQKAQVSGQGDSLHEHIANLAGSPAIKKGILQTVKVVDELVKVMGRHKPENIVIEMARENQTTQKGQKNSRERMKRIEEGIKELGSQILKEHPVENTQLQNEKLYLYYLQNGRDMYVDQELDINRLSDYDVDHIVPQSFLKDDSIDNKVLTRSDKARGKSDNVPSEEVVKKMKNYWRQLLNAKLITQRKFDNLTKAERGGLSELDKAGFIKRQLVETRQITKHVAQILDSRMNTKYDENDKLIREVKVITLKSKLVSDFRKDFQFYKVREINNYHHAHDAYLNAVVGTALIKKYPKLESEFVYGDYKVYDVRKMIAKSEQEIGKATAKYFFYSNIMNFFKTEITLANGEIRKRPLIETNGETGEIVWDKGRDFATVRKVLSMPQVNIVKKTEVQTGGFSKESILPKRNSDKLIARKKDWDPKKYGGFDSPTVAYSVLVVAKVEKGKSKKLKSVKELLGITIMERSSFEKNPIDFLEAKGYKEVKKDLIIKLPKYSLFELENGRKRMLASAGELQKGNELALPSKYVNFLYLASHYEKLKGSPEDNEQKQLFVEQHKHYLDEIIEQISEFSKRVILADANLDKVLSAYNKHRDKPIREQAENIIHLFTLTNLGAPAAFKYFDTTIDRKRYTSTKEVLDATLIHQSITGLYETRIDLSQLGGDGGGGSEAAAKPAPGGLDDEYRLYSPLVKPDQNIQFWLEQFPQAWAETAGMGLAKQVPPQVIQLKASATPVSVRQYPLSKEAQEGIRPHVQRLIQQGILVPVQSPWNTPLLPVRKPGTNDYRPVQDLREVNKRVQDIHPTVPNPYNLLCALPPQRSWYTVLDLKDAFFCLRLHPTSQPLFAFEWRDPGTGRTGQLTWTRLPQGFKNSPTIFNEALHRDLANFRIQHPQVTLLQYVDDLLLAGATKQDCLEGTKALLLELSDLGYRASAKKAQICRREVTYLGYSLRDGQRWLTEARKKTVVQIPAPTTAKQVREFLGKAGFCRLFIPGFATLAAPLYPLTKPKGEFSWAPEHQKAFDAIKKALLSAPALALPDVTKPFTLYVDERKGVARGVLTQTLGPWRRPVAYLSKKLDPVASGWPVCLKAIAAVAILVKDADKLTLGQNITVIAPHALENIVRQPPDRWMTNARMTHYQSLLLTERVTFAPPAALNPATLLPEETDEPVTHDCHQLLIEETGVRKDLTDIPLTGEVLTWFTDGSSYVVEGKRMAGAAVVDGTRTIWASSLPEGTSAQKAELMALTQALRLAEGKSINIYTDSRYAFATAHVHGAIYKQRGWLTSAGREIKNKEEILSLLEALHLPKRLAIIHCPGHQKAKDPISRGNQMADRVAKQAAQGVNLLPAGKRTADGSEFEKRTADGSEFESPKKKAKVE

SEQ ID NO: 50 - protein, 2088 aa, synthetic construct
MPAAKRVKLDGGDKKYSIGLDIGTNSVGWAVITDEYKVPSKKFKVLGNTDRHSIKKNLIGALLFDSGETAEATRLKRTARRRYTRRKNRICYLQEIFSNEMAKVDDSFFHRLEESFLVEEDKKHERHPIFGNIVDEVAYHEKYPTIYHLRKKLVDSTDKADLRLIYLALAHMIKFRGHFLIEGDLNPDNSDVDKLFIQLVQTYNQLFEENPINASGVDAKAILSARLSKSRRLENLIAQLPGEKKNGLFGNLIALSLGLTPNFKSNFDLAEDAKLQLSKDTYDDDLDNLLAQIGDQYADLFLAAKNLSDAILLSDILRVNTEITKAPLSASMIKRYDEHHQDLTLLKALVRQQLPEKYKEIFFDQSKNGYAGYIDGGASQEEFYKFIKPILEKMDGTEELLVKLNREDLLRKQRTFDNGSIPHQIHLGELHAILRRQEDFYPFLKDNREKIEKILTFRIPYYVGPLARGNSRFAWMTRKSEETITPWNFEEVVDKGASAQSFIERMTNFDKNLPNEKVLPKHSLLYEYFTVYNELTKVKYVTEGMRKPAFLSGEQKKAIVDLLFKTNRKVTVKQLKEDYFKKIECFDSVEISGVEDRFNASLGTYHDLLKIIKDKDFLDNEENEDILEDIVLTLTLFEDREMIEERLKTYAHLFDDKVMKQLKRRRYTGWGRLSRKLINGIRDKQSGKTILDFLKSDGFANRNFMQLIHDDSLTFKEDIQKAQVSGQGDSLHEHIANLAGSPAIKKGILQTVKVVDELVKVMGRHKPENIVIEMARENQTTQKGQKNSRERMKRIEEGIKELGSQILKEHPVENTQLQNEKLYLYYLQNGRDMYVDQELDINRLSDYDVDHIVPQSFLKDDSIDNKVLTRSDKARGKSDNVPSEEVVKKMKNYWRQLLNAKLITQRKFDNLTKAERGGLSELDKAGFIKRQLVETRQITKHVAQILDSRMNTKYDENDKLIREVKVITLKSKLVSDFRKDFQFYKVREINNYHHAHDAYLNAVVGTALIKKYPKLESEFVYGDYKVYDVRKMIAKSEQEIGKATAKYFFYSNIMNFFKTEITLANGEIRKRPLIETNGETGEIVWDKGRDFATVRKVLSMPQVNIVKKTEVQTGGFSKESILPKRNSDKLIARKKDWDPKKYGGFDSPTVAYSVLVVAKVEKGKSKKLKSVKELLGITIMERSSFEKNPIDFLEAKGYKEVKKDLIIKLPKYSLFELENGRKRMLASAGELQKGNELALPSKYVNFLYLASHYEKLKGSPEDNEQKQLFVEQHKHYLDEIIEQISEFSKRVILADANLDKVLSAYNKHRDKPIREQAENIIHLFTLTNLGAPAAFKYFDTTIDRKRYTSTKEVLDATLIHQSITGLYETRIDLSQLGGDGGPAPGGGEAAAKGGLDDEYRLYSPLVKPDQNIQFWLEQFPQAWAETAGMGLAKQVPPQVIQLKASATPVSVRQYPLSKEAQEGIRPHVQRLIQQGILVPVQSPWNTPLLPVRKPGTNDYRPVQDLREVNKRVQDIHPTVPNPYNLLCALPPQRSWYTVLDLKDAFFCLRLHPTSQPLFAFEWRDPGTGRTGQLTWTRLPQGFKNSPTIFNEALHRDLANFRIQHPQVTLLQYVDDLLLAGATKQDCLEGTKALLLELSDLGYRASAKKAQICRREVTYLGYSLRDGQRWLTEARKKTVVQIPAPTTAKQVREFLGKAGFCRLFIPGFATLAAPLYPLTKPKGEFSWAPEHQKAFDAIKKALLSAPALALPDVTKPFTLYVDERKGVARGVLTQTLGPWRRPVAYLSKKLDPVASGWPVCLKAIAAVAILVKDADKLTLGQNITVIAPHALENIVRQPPDRWMTNARMTHYQSLLLTERVTFAPPAALNPATLLPEETDEPVTHDCHQLLIEETGVRKDLTDIPLTGEVLTWFTDGSSYVVEGKRMAGAAVVDGTRTIWASSLPEGTSAQKAELMALTQALRLAEGKSINIYTDSRYAFATAHVHGAIYKQRGWLTSAGREIKNKEEILSLLEALHLPKRLAIIHCPGHQKAKDPISRGNQMADRVAKQAAQGVNLLPAGKRTADGSEFEKRTADGSEFESPKKKAKVE

SEQ ID NO: 51 - protein, 2092 aa, synthetic construct
MPAAKRVKLDGGDKKYSIGLDIGTNSVGWAVITDEYKVPSKKFKVLGNTDRHSIKKNLIGALLFDSGETAEATRLKRTARRRYTRRKNRICYLQEIFSNEMAKVDDSFFHRLEESFLVEEDKKHERHPIFGNIVDEVAYHEKYPTIYHLRKKLVDSTDKADLRLIYLALAHMIKFRGHFLIEGDLNPDNSDVDKLFIQLVQTYNQLFEENPINASGVDAKAILSARLSKSRRLENLIAQLPGEKKNGLFGNLIALSLGLTPNFKSNFDLAEDAKLQLSKDTYDDDLDNLLAQIGDQYADLFLAAKNLSDAILLSDILRVNTEITKAPLSASMIKRYDEHHQDLTLLKALVRQQLPEKYKEIFFDQSKNGYAGYIDGGASQEEFYKFIKPILEKMDGTEELLVKLNREDLLRKQRTFDNGSIPHQIHLGELHAILRRQEDFYPFLKDNREKIEKILTFRIPYYVGPLARGNSRFAWMTRKSEETITPWNFEEVVDKGASAQSFIERMTNFDKNLPNEKVLPKHSLLYEYFTVYNELTKVKYVTEGMRKPAFLSGEQKKAIVDLLFKTNRKVTVKQLKEDYFKKIECFDSVEISGVEDRFNASLGTYHDLLKIIKDKDFLDNEENEDILEDIVLTLTLFEDREMIEERLKTYAHLFDDKVMKQLKRRRYTGWGRLSRKLINGIRDKQSGKTILDFLKSDGFANRNFMQLIHDDSLTFKEDIQKAQVSGQGDSLHEHIANLAGSPAIKKGILQTVKVVDELVKVMGRHKPENIVIEMARENQTTQKGQKNSRERMKRIEEGIKELGSQILKEHPVENTQLQNEKLYLYYLQNGRDMYVDQELDINRLSDYDVDHIVPQSFLKDDSIDNKVLTRSDKARGKSDNVPSEEVVKKMKNYWRQLLNAKLITQRKFDNLTKAERGGLSELDKAGFIKRQLVETRQITKHVAQILDSRMNTKYDENDKLIREVKVITLKSKLVSDFRKDFQFYKVREINNYHHAHDAYLNAVVGTALIKKYPKLESEFVYGDYKVYDVRKMIAKSEQEIGKATAKYFFYSNIMNFFKTEITLANGEIRKRPLIETNGETGEIVWDKGRDFATVRKVLSMPQVNIVKKTEVQTGGFSKESILPKRNSDKLIARKKDWDPKKYGGFDSPTVAYSVLVVAKVEKGKSKKLKSVKELLGITIMERSSFEKNPIDFLEAKGYKEVKKDLIIKLPKYSLFELENGRKRMLASAGELQKGNELALPSKYVNFLYLASHYEKLKGSPEDNEQKQLFVEQHKHYLDEIIEQISEFSKRVILADANLDKVLSAYNKHRDKPIREQAENIIHLFTLTNLGAPAAFKYFDTTIDRKRYTSTKEVLDATLIHQSITGLYETRIDLSQLGGDGGGGGGSGGGGSGGGGSGGLDDEYRLYSPLVKPDQNIQFWLEQFPQAWAETAGMGLAKQVPPQVIQLKASATPVSVRQYPLSKEAQEGIRPHVQRLIQQGILVPVQSPWNTPLLPVRKPGTNDYRPVQDLREVNKRVQDIHPTVPNPYNLLCALPPQRSWYTVLDLKDAFFCLRLHPTSQPLFAFEWRDPGTGRTGQLTWTRLPQGFKNSPTIFNEALHRDLANFRIQHPQVTLLQYVDDLLLAGATKQDCLEGTKALLLELSDLGYRASAKKAQICRREVTYLGYSLRDGQRWLTEARKKTVVQIPAPTTAKQVREFLGKAGFCRLFIPGFATLAAPLYPLTKPKGEFSWAPEHQKAFDAIKKALLSAPALALPDVTKPFTLYVDERKGVARGVLTQTLGPWRRPVAYLSKKLDPVASGWPVCLKAIAAVAILVKDADKLTLGQNITVIAPHALENIVRQPPDRWMTNARMTHYQSLLLTERVTFAPPAALNPATLLPEETDEPVTHDCHQLLIEETGVRKDLTDIPLTGEVLTWFTDGSSYVVEGKRMAGAAVVDGTRTIWASSLPEGTSAQKAELMALTQALRLAEGKSINIYTDSRYAFATAHVHGAIYKQRGWLTSAGREIKNKEEILSLLEALHLPKRLAIIHCPGHQKAKDPISRGNQMADRVAKQAAQGVNLLPAGKRTADGSEFEKRTADGSEFESPKKKAKVE

SEQ ID NO: 52 - protein, 2092 aa, synthetic construct
MPAAKRVKLDGGDKKYSIGLDIGTNSVGWAVITDEYKVPSKKFKVLGNTDRHSIKKNLIGALLFDSGETAEATRLKRTARRRYTRRKNRICYLQEIFSNEMAKVDDSFFHRLEESFLVEEDKKHERHPIFGNIVDEVAYHEKYPTIYHLRKKLVDSTDKADLRLIYLALAHMIKFRGHFLIEGDLNPDNSDVDKLFIQLVQTYNQLFEENPINASGVDAKAILSARLSKSRRLENLIAQLPGEKKNGLFGNLIALSLGLTPNFKSNFDLAEDAKLQLSKDTYDDDLDNLLAQIGDQYADLFLAAKNLSDAILLSDILRVNTEITKAPLSASMIKRYDEHHQDLTLLKALVRQQLPEKYKEIFFDQSKNGYAGYIDGGASQEEFYKFIKPILEKMDGTEELLVKLNREDLLRKQRTFDNGSIPHQIHLGELHAILRRQEDFYPFLKDNREKIEKILTFRIPYYVGPLARGNSRFAWMTRKSEETITPWNFEEVVDKGASAQSFIERMTNFDKNLPNEKVLPKHSLLYEYFTVYNELTKVKYVTEGMRKPAFLSGEQKKAIVDLLFKTNRKVTVKQLKEDYFKKIECFDSVEISGVEDRFNASLGTYHDLLKIIKDKDFLDNEENEDILEDIVLTLTLFEDREMIEERLKTYAHLFDDKVMKQLKRRRYTGWGRLSRKLINGIRDKQSGKTILDFLKSDGFANRNFMQLIHDDSLTFKEDIQKAQVSGQGDSLHEHIANLAGSPAIKKGILQTVKVVDELVKVMGRHKPENIVIEMARENQTTQKGQKNSRERMKRIEEGIKELGSQILKEHPVENTQLQNEKLYLYYLQNGRDMYVDQELDINRLSDYDVDHIVPQSFLKDDSIDNKVLTRSDKARGKSDNVPSEEVVKKMKNYWRQLLNAKLITQRKFDNLTKAERGGLSELDKAGFIKRQLVETRQITKHVAQILDSRMNTKYDENDKLIREVKVITLKSKLVSDFRKDFQFYKVREINNYHHAHDAYLNAVVGTALIKKYPKLESEFVYGDYKVYDVRKMIAKSEQEIGKATAKYFFYSNIMNFFKTEITLANGEIRKRPLIETNGETGEIVWDKGRDFATVRKVLSMPQVNIVKKTEVQTGGFSKESILPKRNSDKLIARKKDWDPKKYGGFDSPTVAYSVLVVAKVEKGKSKKLKSVKELLGITIMERSSFEKNPIDFLEAKGYKEVKKDLIIKLPKYSLFELENGRKRMLASAGELQKGNELALPSKYVNFLYLASHYEKLKGSPEDNEQKQLFVEQHKHYLDEIIEQISEFSKRVILADANLDKVLSAYNKHRDKPIREQAENIIHLFTLTNLGAPAAFKYFDTTIDRKRYTSTKEVLDATLIHQSITGLYETRIDLSQLGGDGGGGSGGSGGSGGSGGSGGLDDEYRLYSPLVKPDQNIQFWLEQFPQAWAETAGMGLAKQVPPQVIQLKASATPVSVRQYPLSKEAQEGIRPHVQRLIQQGILVPVQSPWNTPLLPVRKPGTNDYRPVQDLREVNKRVQDIHPTVPNPYNLLCALPPQRSWYTVLDLKDAFFCLRLHPTSQPLFAFEWRDPGTGRTGQLTWTRLPQGFKNSPTIFNEALHRDLANFRIQHPQVTLLQYVDDLLLAGATKQDCLEGTKALLLELSDLGYRASAKKAQICRREVTYLGYSLRDGQRWLTEARKKTVVQIPAPTTAKQVREFLGKAGFCRLFIPGFATLAAPLYPLTKPKGEFSWAPEHQKAFDAIKKALLSAPALALPDVTKPFTLYVDERKGVARGVLTQTLGPWRRPVAYLSKKLDPVASGWPVCLKAIAAVAILVKDADKLTLGQNITVIAPHALENIVRQPPDRWMTNARMTHYQSLLLTERVTFAPPAALNPATLLPEETDEPVTHDCHQLLIEETGVRKDLTDIPLTGEVLTWFTDGSSYVVEGKRMAGAAVVDGTRTIWASSLPEGTSAQKAELMALTQALRLAEGKSINIYTDSRYAFATAHVHGAIYKQRGWLTSAGREIKNKEEILSLLEALHLPKRLAIIHCPGHQKAKDPISRGNQMADRVAKQAAQGVNLLPAGKRTADGSEFEKRTADGSEFESPKKKAKVE

SEQ ID NO: 53 - protein, 2088 aa, synthetic construct
MPAAKRVKLDGGDKKYSIGLDIGTNSVGWAVITDEYKVPSKKFKVLGNTDRHSIKKNLIGALLFDSGETAEATRLKRTARRRYTRRKNRICYLQEIFSNEMAKVDDSFFHRLEESFLVEEDKKHERHPIFGNIVDEVAYHEKYPTIYHLRKKLVDSTDKADLRLIYLALAHMIKFRGHFLIEGDLNPDNSDVDKLFIQLVQTYNQLFEENPINASGVDAKAILSARLSKSRRLENLIAQLPGEKKNGLFGNLIALSLGLTPNFKSNFDLAEDAKLQLSKDTYDDDLDNLLAQIGDQYADLFLAAKNLSDAILLSDILRVNTEITKAPLSASMIKRYDEHHQDLTLLKALVRQQLPEKYKEIFFDQSKNGYAGYIDGGASQEEFYKFIKPILEKMDGTEELLVKLNREDLLRKQRTFDNGSIPHQIHLGELHAILRRQEDFYPFLKDNREKIEKILTFRIPYYVGPLARGNSRFAWMTRKSEETITPWNFEEVVDKGASAQSFIERMTNFDKNLPNEKVLPKHSLLYEYFTVYNELTKVKYVTEGMRKPAFLSGEQKKAIVDLLFKTNRKVTVKQLKEDYFKKIECFDSVEISGVEDRFNASLGTYHDLLKIIKDKDFLDNEENEDILEDIVLTLTLFEDREMIEERLKTYAHLFDDKVMKQLKRRRYTGWGRLSRKLINGIRDKQSGKTILDFLKSDGFANRNFMQLIHDDSLTFKEDIQKAQVSGQGDSLHEHIANLAGSPAIKKGILQTVKVVDELVKVMGRHKPENIVIEMARENQTTQKGQKNSRERMKRIEEGIKELGSQILKEHPVENTQLQNEKLYLYYLQNGRDMYVDQELDINRLSDYDVDHIVPQSFLKDDSIDNKVLTRSDKARGKSDNVPSEEVVKKMKNYWRQLLNAKLITQRKFDNLTKAERGGLSELDKAGFIKRQLVETRQITKHVAQILDSRMNTKYDENDKLIREVKVITLKSKLVSDFRKDFQFYKVREINNYHHAHDAYLNAVVGTALIKKYPKLESEFVYGDYKVYDVRKMIAKSEQEIGKATAKYFFYSNIMNFFKTEITLANGEIRKRPLIETNGETGEIVWDKGRDFATVRKVLSMPQVNIVKKTEVQTGGFSKESILPKRNSDKLIARKKDWDPKKYGGFDSPTVAYSVLVVAKVEKGKSKKLKSVKELLGITIMERSSFEKNPIDFLEAKGYKEVKKDLIIKLPKYSLFELENGRKRMLASAGELQKGNELALPSKYVNFLYLASHYEKLKGSPEDNEQKQLFVEQHKHYLDEIIEQISEFSKRVILADANLDKVLSAYNKHRDKPIREQAENIIHLFTLTNLGAPAAFKYFDTTIDRKRYTSTKEVLDATLIHQSITGLYETRIDLSQLGGDGGEAAAKGGGGSSGGLDDEYRLYSPLVKPDQNIQFWLEQFPQAWAETAGMGLAKQVPPQVIQLKASATPVSVRQYPLSKEAQEGIRPHVQRLIQQGILVPVQSPWNTPLLPVRKPGTNDYRPVQDLREVNKRVQDIHPTVPNPYNLLCALPPQRSWYTVLDLKDAFFCLRLHPTSQPLFAFEWRDPGTGRTGQLTWTRLPQGFKNSPTIFNEALHRDLANFRIQHPQVTLLQYVDDLLLAGATKQDCLEGTKALLLELSDLGYRASAKKAQICRREVTYLGYSLRDGQRWLTEARKKTVVQIPAPTTAKQVREFLGKAGFCRLFIPGFATLAAPLYPLTKPKGEFSWAPEHQKAFDAIKKALLSAPALALPDVTKPFTLYVDERKGVARGVLTQTLGPWRRPVAYLSKKLDPVASGWPVCLKAIAAVAILVKDADKLTLGQNITVIAPHALENIVRQPPDRWMTNARMTHYQSLLLTERVTFAPPAALNPATLLPEETDEPVTHDCHQLLIEETGVRKDLTDIPLTGEVLTWFTDGSSYVVEGKRMAGAAVVDGTRTIWASSLPEGTSAQKAELMALTQALRLAEGKSINIYTDSRYAFATAHVHGAIYKQRGWLTSAGREIKNKEEILSLLEALHLPKRLAIIHCPGHQKAKDPISRGNQMADRVAKQAAQGVNLLPAGKRTADGSEFEKRTADGSEFESPKKKAKVE

SEQ ID NO: 54 - protein, 2090 aa, synthetic construct
MPAAKRVKLDGGDKKYSIGLDIGTNSVGWAVITDEYKVPSKKFKVLGNTDRHSIKKNLIGALLFDSGETAEATRLKRTARRRYTRRKNRICYLQEIFSNEMAKVDDSFFHRLEESFLVEEDKKHERHPIFGNIVDEVAYHEKYPTIYHLRKKLVDSTDKADLRLIYLALAHMIKFRGHFLIEGDLNPDNSDVDKLFIQLVQTYNQLFEENPINASGVDAKAILSARLSKSRRLENLIAQLPGEKKNGLFGNLIALSLGLTPNFKSNFDLAEDAKLQLSKDTYDDDLDNLLAQIGDQYADLFLAAKNLSDAILLSDILRVNTEITKAPLSASMIKRYDEHHQDLTLLKALVRQQLPEKYKEIFFDQSKNGYAGYIDGGASQEEFYKFIKPILEKMDGTEELLVKLNREDLLRKQRTFDNGSIPHQIHLGELHAILRRQEDFYPFLKDNREKIEKILTFRIPYYVGPLARGNSRFAWMTRKSEETITPWNFEEVVDKGASAQSFIERMTNFDKNLPNEKVLPKHSLLYEYFTVYNELTKVKYVTEGMRKPAFLSGEQKKAIVDLLFKTNRKVTVKQLKEDYFKKIECFDSVEISGVEDRFNASLGTYHDLLKIIKDKDFLDNEENEDILEDIVLTLTLFEDREMIEERLKTYAHLFDDKVMKQLKRRRYTGWGRLSRKLINGIRDKQSGKTILDFLKSDGFANRNFMQLIHDDSLTFKEDIQKAQVSGQGDSLHEHIANLAGSPAIKKGILQTVKVVDELVKVMGRHKPENIVIEMARENQTTQKGQKNSRERMKRIEEGIKELGSQILKEHPVENTQLQNEKLYLYYLQNGRDMYVDQELDINRLSDYDVDHIVPQSFLKDDSIDNKVLTRSDKARGKSDNVPSEEVVKKMKNYWRQLLNAKLITQRKFDNLTKAERGGLSELDKAGFIKRQLVETRQITKHVAQILDSRMNTKYDENDKLIREVKVITLKSKLVSDFRKDFQFYKVREINNYHHAHDAYLNAVVGTALIKKYPKLESEFVYGDYKVYDVRKMIAKSEQEIGKATAKYFFYSNIMNFFKTEITLANGEIRKRPLIETNGETGEIVWDKGRDFATVRKVLSMPQVNIVKKTEVQTGGFSKESILPKRNSDKLIARKKDWDPKKYGGFDSPTVAYSVLVVAKVEKGKSKKLKSVKELLGITIMERSSFEKNPIDFLEAKGYKEVKKDLIIKLPKYSLFELENGRKRMLASAGELQKGNELALPSKYVNFLYLASHYEKLKGSPEDNEQKQLFVEQHKHYLDEIIEQISEFSKRVILADANLDKVLSAYNKHRDKPIREQAENIIHLFTLTNLGAPAAFKYFDTTIDRKRYTSTKEVLDATLIHQSITGLYETRIDLSQLGGDGGPAPAPAPAPAPAPGGLDDEYRLYSPLVKPDQNIQFWLEQFPQAWAETAGMGLAKQVPPQVIQLKASATPVSVRQYPLSKEAQEGIRPHVQRLIQQGILVPVQSPWNTPLLPVRKPGTNDYRPVQDLREVNKRVQDIHPTVPNPYNLLCALPPQRSWYTVLDLKDAFFCLRLHPTSQPLFAFEWRDPGTGRTGQLTWTRLPQGFKNSPTIFNEALHRDLANFRIQHPQVTLLQYVDDLLLAGATKQDCLEGTKALLLELSDLGYRASAKKAQICRREVTYLGYSLRDGQRWLTEARKKTVVQIPAPTTAKQVREFLGKAGFCRLFIPGFATLAAPLYPLTKPKGEFSWAPEHQKAFDAIKKALLSAPALALPDVTKPFTLYVDERKGVARGVLTQTLGPWRRPVAYLSKKLDPVASGWPVCLKAIAAVAILVKDADKLTLGQNITVIAPHALENIVRQPPDRWMTNARMTHYQSLLLTERVTFAPPAALNPATLLPEETDEPVTHDCHQLLIEETGVRKDLTDIPLTGEVLTWFTDGSSYVVEGKRMAGAAVVDGTRTIWASSLPEGTSAQKAELMALTQALRLAEGKSINIYTDSRYAFATAHVHGAIYKQRGWLTSAGREIKNKEEILSLLEALHLPKRLAIIHCPGHQKAKDPISRGNQMADRVAKQAAQGVNLLPAGKRTADGSEFEKRTADGSEFESPKKKAKVE

SEQ ID NO: 55 - protein, 2087 aa, synthetic construct
MPAAKRVKLDGGDKKYSIGLDIGTNSVGWAVITDEYKVPSKKFKVLGNTDRHSIKKNLIGALLFDSGETAEATRLKRTARRRYTRRKNRICYLQEIFSNEMAKVDDSFFHRLEESFLVEEDKKHERHPIFGNIVDEVAYHEKYPTIYHLRKKLVDSTDKADLRLIYLALAHMIKFRGHFLIEGDLNPDNSDVDKLFIQLVQTYNQLFEENPINASGVDAKAILSARLSKSRRLENLIAQLPGEKKNGLFGNLIALSLGLTPNFKSNFDLAEDAKLQLSKDTYDDDLDNLLAQIGDQYADLFLAAKNLSDAILLSDILRVNTEITKAPLSASMIKRYDEHHQDLTLLKALVRQQLPEKYKEIFFDQSKNGYAGYIDGGASQEEFYKFIKPILEKMDGTEELLVKLNREDLLRKQRTFDNGSIPHQIHLGELHAILRRQEDFYPFLKDNREKIEKILTFRIPYYVGPLARGNSRFAWMTRKSEETITPWNFEEVVDKGASAQSFIERMTNFDKNLPNEKVLPKHSLLYEYFTVYNELTKVKYVTEGMRKPAFLSGEQKKAIVDLLFKTNRKVTVKQLKEDYFKKIECFDSVEISGVEDRFNASLGTYHDLLKIIKDKDFLDNEENEDILEDIVLTLTLFEDREMIEERLKTYAHLFDDKVMKQLKRRRYTGWGRLSRKLINGIRDKQSGKTILDFLKSDGFANRNFMQLIHDDSLTFKEDIQKAQVSGQGDSLHEHIANLAGSPAIKKGILQTVKVVDELVKVMGRHKPENIVIEMARENQTTQKGQKNSRERMKRIEEGIKELGSQILKEHPVENTQLQNEKLYLYYLQNGRDMYVDQELDINRLSDYDVDHIVPQSFLKDDSIDNKVLTRSDKARGKSDNVPSEEVVKKMKNYWRQLLNAKLITQRKFDNLTKAERGGLSELDKAGFIKRQLVETRQITKHVAQILDSRMNTKYDENDKLIREVKVITLKSKLVSDFRKDFQFYKVREINNYHHAHDAYLNAVVGTALIKKYPKLESEFVYGDYKVYDVRKMIAKSEQEIGKATAKYFFYSNIMNFFKTEITLANGEIRKRPLIETNGETGEIVWDKGRDFATVRKVLSMPQVNIVKKTEVQTGGFSKESILPKRNSDKLIARKKDWDPKKYGGFDSPTVAYSVLVVAKVEKGKSKKLKSVKELLGITIMERSSFEKNPIDFLEAKGYKEVKKDLIIKLPKYSLFELENGRKRMLASAGELQKGNELALPSKYVNFLYLASHYEKLKGSPEDNEQKQLFVEQHKHYLDEIIEQISEFSKRVILADANLDKVLSAYNKHRDKPIREQAENIIHLFTLTNLGAPAAFKYFDTTIDRKRYTSTKEVLDATLIHQSITGLYETRIDLSQLGGDGGGGGGSGGGGSGGLDDEYRLYSPLVKPDQNIQFWLEQFPQAWAETAGMGLAKQVPPQVIQLKASATPVSVRQYPLSKEAQEGIRPHVQRLIQQGILVPVQSPWNTPLLPVRKPGTNDYRPVQDLREVNKRVQDIHPTVPNPYNLLCALPPQRSWYTVLDLKDAFFCLRLHPTSQPLFAFEWRDPGTGRTGQLTWTRLPQGFKNSPTIFNEALHRDLANFRIQHPQVTLLQYVDDLLLAGATKQDCLEGTKALLLELSDLGYRASAKKAQICRREVTYLGYSLRDGQRWLTEARKKTVVQIPAPTTAKQVREFLGKAGFCRLFIPGFATLAAPLYPLTKPKGEFSWAPEHQKAFDAIKKALLSAPALALPDVTKPFTLYVDERKGVARGVLTQTLGPWRRPVAYLSKKLDPVASGWPVCLKAIAAVAILVKDADKLTLGQNITVIAPHALENIVRQPPDRWMTNARMTHYQSLLLTERVTFAPPAALNPATLLPEETDEPVTHDCHQLLIEETGVRKDLTDIPLTGEVLTWFTDGSSYVVEGKRMAGAAVVDGTRTIWASSLPEGTSAQKAELMALTQALRLAEGKSINIYTDSRYAFATAHVHGAIYKQRGWLTSAGREIKNKEEILSLLEALHLPKRLAIIHCPGHQKAKDPISRGNQMADRVAKQAAQGVNLLPAGKRTADGSEFEKRTADGSEFESPKKKAKVE

SEQ ID NO: 56 - protein, 2092 aa, synthetic construct
MPAAKRVKLDGGDKKYSIGLDIGTNSVGWAVITDEYKVPSKKFKVLGNTDRHSIKKNLIGALLFDSGETAEATRLKRTARRRYTRRKNRICYLQEIFSNEMAKVDDSFFHRLEESFLVEEDKKHERHPIFGNIVDEVAYHEKYPTIYHLRKKLVDSTDKADLRLIYLALAHMIKFRGHFLIEGDLNPDNSDVDKLFIQLVQTYNQLFEENPINASGVDAKAILSARLSKSRRLENLIAQLPGEKKNGLFGNLIALSLGLTPNFKSNFDLAEDAKLQLSKDTYDDDLDNLLAQIGDQYADLFLAAKNLSDAILLSDILRVNTEITKAPLSASMIKRYDEHHQDLTLLKALVRQQLPEKYKEIFFDQSKNGYAGYIDGGASQEEFYKFIKPILEKMDGTEELLVKLNREDLLRKQRTFDNGSIPHQIHLGELHAILRRQEDFYPFLKDNREKIEKILTFRIPYYVGPLARGNSRFAWMTRKSEETITPWNFEEVVDKGASAQSFIERMTNFDKNLPNEKVLPKHSLLYEYFTVYNELTKVKYVTEGMRKPAFLSGEQKKAIVDLLFKTNRKVTVKQLKEDYFKKIECFDSVEISGVEDRFNASLGTYHDLLKIIKDKDFLDNEENEDILEDIVLTLTLFEDREMIEERLKTYAHLFDDKVMKQLKRRRYTGWGRLSRKLINGIRDKQSGKTILDFLKSDGFANRNFMQLIHDDSLTFKEDIQKAQVSGQGDSLHEHIANLAGSPAIKKGILQTVKVVDELVKVMGRHKPENIVIEMARENQTTQKGQKNSRERMKRIEEGIKELGSQILKEHPVENTQLQNEKLYLYYLQNGRDMYVDQELDINRLSDYDVDHIVPQSFLKDDSIDNKVLTRSDKARGKSDNVPSEEVVKKMKNYWRQLLNAKLITQRKFDNLTKAERGGLSELDKAGFIKRQLVETRQITKHVAQILDSRMNTKYDENDKLIREVKVITLKSKLVSDFRKDFQFYKVREINNYHHAHDAYLNAVVGTALIKKYPKLESEFVYGDYKVYDVRKMIAKSEQEIGKATAKYFFYSNIMNFFKTEITLANGEIRKRPLIETNGETGEIVWDKGRDFATVRKVLSMPQVNIVKKTEVQTGGFSKESILPKRNSDKLIARKKDWDPKKYGGFDSPTVAYSVLVVAKVEKGKSKKLKSVKELLGITIMERSSFEKNPIDFLEAKGYKEVKKDLIIKLPKYSLFELENGRKRMLASAGELQKGNELALPSKYVNFLYLASHYEKLKGSPEDNEQKQLFVEQHKHYLDEIIEQISEFSKRVILADANLDKVLSAYNKHRDKPIREQAENIIHLFTLTNLGAPAAFKYFDTTIDRKRYTSTKEVLDATLIHQSITGLYETRIDLSQLGGDGGEAAAKGGGGSEAAAKGGLDDEYRLYSPLVKPDQNIQFWLEQFPQAWAETAGMGLAKQVPPQVIQLKASATPVSVRQYPLSKEAQEGIRPHVQRLIQQGILVPVQSPWNTPLLPVRKPGTNDYRPVQDLREVNKRVQDIHPTVPNPYNLLCALPPQRSWYTVLDLKDAFFCLRLHPTSQPLFAFEWRDPGTGRTGQLTWTRLPQGFKNSPTIFNEALHRDLANFRIQHPQVTLLQYVDDLLLAGATKQDCLEGTKALLLELSDLGYRASAKKAQICRREVTYLGYSLRDGQRWLTEARKKTVVQIPAPTTAKQVREFLGKAGFCRLFIPGFATLAAPLYPLTKPKGEFSWAPEHQKAFDAIKKALLSAPALALPDVTKPFTLYVDERKGVARGVLTQTLGPWRRPVAYLSKKLDPVASGWPVCLKAIAAVAILVKDADKLTLGQNITVIAPHALENIVRQPPDRWMTNARMTHYQSLLLTERVTFAPPAALNPATLLPEETDEPVTHDCHQLLIEETGVRKDLTDIPLTGEVLTWFTDGSSYVVEGKRMAGAAVVDGTRTIWASSLPEGTSAQKAELMALTQALRLAEGKSINIYTDSRYAFATAHVHGAIYKQRGWLTSAGREIKNKEEILSLLEALHLPKRLAIIHCPGHQKAKDPISRGNQMADRVAKQAAQGVNLLPAGKRTADGSEFEKRTADGSEFESPKKKAKVE

SEQ ID NO: 57 - protein, 2085 aa, synthetic construct
MPAAKRVKLDGGDKKYSIGLDIGTNSVGWAVITDEYKVPSKKFKVLGNTDRHSIKKNLIGALLFDSGETAEATRLKRTARRRYTRRKNRICYLQEIFSNEMAKVDDSFFHRLEESFLVEEDKKHERHPIFGNIVDEVAYHEKYPTIYHLRKKLVDSTDKADLRLIYLALAHMIKFRGHFLIEGDLNPDNSDVDKLFIQLVQTYNQLFEENPINASGVDAKAILSARLSKSRRLENLIAQLPGEKKNGLFGNLIALSLGLTPNFKSNFDLAEDAKLQLSKDTYDDDLDNLLAQIGDQYADLFLAAKNLSDAILLSDILRVNTEITKAPLSASMIKRYDEHHQDLTLLKALVRQQLPEKYKEIFFDQSKNGYAGYIDGGASQEEFYKFIKPILEKMDGTEELLVKLNREDLLRKQRTFDNGSIPHQIHLGELHAILRRQEDFYPFLKDNREKIEKILTFRIPYYVGPLARGNSRFAWMTRKSEETITPWNFEEVVDKGASAQSFIERMTNFDKNLPNEKVLPKHSLLYEYFTVYNELTKVKYVTEGMRKPAFLSGEQKKAIVDLLFKTNRKVTVKQLKEDYFKKIECFDSVEISGVEDRFNASLGTYHDLLKIIKDKDFLDNEENEDILEDIVLTLTLFEDREMIEERLKTYAHLFDDKVMKQLKRRRYTGWGRLSRKLINGIRDKQSGKTILDFLKSDGFANRNFMQLIHDDSLTFKEDIQKAQVSGQGDSLHEHIANLAGSPAIKKGILQTVKVVDELVKVMGRHKPENIVIEMARENQTTQKGQKNSRERMKRIEEGIKELGSQILKEHPVENTQLQNEKLYLYYLQNGRDMYVDQELDINRLSDYDVDHIVPQSFLKDDSIDNKVLTRSDKARGKSDNVPSEEVVKKMKNYWRQLLNAKLITQRKFDNLTKAERGGLSELDKAGFIKRQLVETRQITKHVAQILDSRMNTKYDENDKLIREVKVITLKSKLVSDFRKDFQFYKVREINNYHHAHDAYLNAVVGTALIKKYPKLESEFVYGDYKVYDVRKMIAKSEQEIGKATAKYFFYSNIMNFFKTEITLANGEIRKRPLIETNGETGEIVWDKGRDFATVRKVLSMPQVNIVKKTEVQTGGFSKESILPKRNSDKLIARKKDWDPKKYGGFDSPTVAYSVLVVAKVEKGKSKKLKSVKELLGITIMERSSFEKNPIDFLEAKGYKEVKKDLIIKLPKYSLFELENGRKRMLASAGELQKGNELALPSKYVNFLYLASHYEKLKGSPEDNEQKQLFVEQHKHYLDEIIEQISEFSKRVILADANLDKVLSAYNKHRDKPIREQAENIIHLFTLTNLGAPAAFKYFDTTIDRKRYTSTKEVLDATLIHQSITGLYETRIDLSQLGGDGGGGGGGGGGGGLDDEYRLYSPLVKPDQNIQFWLEQFPQAWAETAGMGLAKQVPPQVIQLKASATPVSVRQYPLSKEAQEGIRPHVQRLIQQGILVPVQSPWNTPLLPVRKPGTNDYRPVQDLREVNKRVQDIHPTVPNPYNLLCALPPQRSWYTVLDLKDAFFCLRLHPTSQPLFAFEWRDPGTGRTGQLTWTRLPQGFKNSPTIFNEALHRDLANFRIQHPQVTLLQYVDDLLLAGATKQDCLEGTKALLLELSDLGYRASAKKAQICRREVTYLGYSLRDGQRWLTEARKKTVVQIPAPTTAKQVREFLGKAGFCRLFIPGFATLAAPLYPLTKPKGEFSWAPEHQKAFDAIKKALLSAPALALPDVTKPFTLYVDERKGVARGVLTQTLGPWRRPVAYLSKKLDPVASGWPVCLKAIAAVAILVKDADKLTLGQNITVIAPHALENIVRQPPDRWMTNARMTHYQSLLLTERVTFAPPAALNPATLLPEETDEPVTHDCHQLLIEETGVRKDLTDIPLTGEVLTWFTDGSSYVVEGKRMAGAAVVDGTRTIWASSLPEGTSAQKAELMALTQALRLAEGKSINIYTDSRYAFATAHVHGAIYKQRGWLTSAGREIKNKEEILSLLEALHLPKRLAIIHCPGHQKAKDPISRGNQMADRVAKQAAQGVNLLPAGKRTADGSEFEKRTADGSEFESPKKKAKVE

SEQ ID NO: 58 - protein, 2086 aa, synthetic construct
MPAAKRVKLDGGDKKYSIGLDIGTNSVGWAVITDEYKVPSKKFKVLGNTDRHSIKKNLIGALLFDSGETAEATRLKRTARRRYTRRKNRICYLQEIFSNEMAKVDDSFFHRLEESFLVEEDKKHERHPIFGNIVDEVAYHEKYPTIYHLRKKLVDSTDKADLRLIYLALAHMIKFRGHFLIEGDLNPDNSDVDKLFIQLVQTYNQLFEENPINASGVDAKAILSARLSKSRRLENLIAQLPGEKKNGLFGNLIALSLGLTPNFKSNFDLAEDAKLQLSKDTYDDDLDNLLAQIGDQYADLFLAAKNLSDAILLSDILRVNTEITKAPLSASMIKRYDEHHQDLTLLKALVRQQLPEKYKEIFFDQSKNGYAGYIDGGASQEEFYKFIKPILEKMDGTEELLVKLNREDLLRKQRTFDNGSIPHQIHLGELHAILRRQEDFYPFLKDNREKIEKILTFRIPYYVGPLARGNSRFAWMTRKSEETITPWNFEEVVDKGASAQSFIERMTNFDKNLPNEKVLPKHSLLYEYFTVYNELTKVKYVTEGMRKPAFLSGEQKKAIVDLLFKTNRKVTVKQLKEDYFKKIECFDSVEISGVEDRFNASLGTYHDLLKIIKDKDFLDNEENEDILEDIVLTLTLFEDREMIEERLKTYAHLFDDKVMKQLKRRRYTGWGRLSRKLINGIRDKQSGKTILDFLKSDGFANRNFMQLIHDDSLTFKEDIQKAQVSGQGDSLHEHIANLAGSPAIKKGILQTVKVVDELVKVMGRHKPENIVIEMARENQTTQKGQKNSRERMKRIEEGIKELGSQILKEHPVENTQLQNEKLYLYYLQNGRDMYVDQELDINRLSDYDVDHIVPQSFLKDDSIDNKVLTRSDKARGKSDNVPSEEVVKKMKNYWRQLLNAKLITQRKFDNLTKAERGGLSELDKAGFIKRQLVETRQITKHVAQILDSRMNTKYDENDKLIREVKVITLKSKLVSDFRKDFQFYKVREINNYHHAHDAYLNAVVGTALIKKYPKLESEFVYGDYKVYDVRKMIAKSEQEIGKATAKYFFYSNIMNFFKTEITLANGEIRKRPLIETNGETGEIVWDKGRDFATVRKVLSMPQVNIVKKTEVQTGGFSKESILPKRNSDKLIARKKDWDPKKYGGFDSPTVAYSVLVVAKVEKGKSKKLKSVKELLGITIMERSSFEKNPIDFLEAKGYKEVKKDLIIKLPKYSLFELENGRKRMLASAGELQKGNELALPSKYVNFLYLASHYEKLKGSPEDNEQKQLFVEQHKHYLDEIIEQISEFSKRVILADANLDKVLSAYNKHRDKPIREQAENIIHLFTLTNLGAPAAFKYFDTTIDRKRYTSTKEVLDATLIHQSITGLYETRIDLSQLGGDGGGGSPAPGGGGGLDDEYRLYSPLVKPDQNIQFWLEQFPQAWAETAGMGLAKQVPPQVIQLKASATPVSVRQYPLSKEAQEGIRPHVQRLIQQGILVPVQSPWNTPLLPVRKPGTNDYRPVQDLREVNKRVQDIHPTVPNPYNLLCALPPQRSWYTVLDLKDAFFCLRLHPTSQPLFAFEWRDPGTGRTGQLTWTRLPQGFKNSPTIFNEALHRDLANFRIQHPQVTLLQYVDDLLLAGATKQDCLEGTKALLLELSDLGYRASAKKAQICRREVTYLGYSLRDGQRWLTEARKKTVVQIPAPTTAKQVREFLGKAGFCRLFIPGFATLAAPLYPLTKPKGEFSWAPEHQKAFDAIKKALLSAPALALPDVTKPFTLYVDERKGVARGVLTQTLGPWRRPVAYLSKKLDPVASGWPVCLKAIAAVAILVKDADKLTLGQNITVIAPHALENIVRQPPDRWMTNARMTHYQSLLLTERVTFAPPAALNPATLLPEETDEPVTHDCHQLLIEETGVRKDLTDIPLTGEVLTWFTDGSSYVVEGKRMAGAAVVDGTRTIWASSLPEGTSAQKAELMALTQALRLAEGKSINIYTDSRYAFATAHVHGAIYKQRGWLTSAGREIKNKEEILSLLEALHLPKRLAIIHCPGHQKAKDPISRGNQMADRVAKQAAQGVNLLPAGKRTADGSEFEKRTADGSEFESPKKKAKVE

SEQ ID NO: 59 - protein, 2083 aa, synthetic construct
MPAAKRVKLDGGDKKYSIGLDIGTNSVGWAVITDEYKVPSKKFKVLGNTDRHSIKKNLIGALLFDSGETAEATRLKRTARRRYTRRKNRICYLQEIFSNEMAKVDDSFFHRLEESFLVEEDKKHERHPIFGNIVDEVAYHEKYPTIYHLRKKLVDSTDKADLRLIYLALAHMIKFRGHFLIEGDLNPDNSDVDKLFIQLVQTYNQLFEENPINASGVDAKAILSARLSKSRRLENLIAQLPGEKKNGLFGNLIALSLGLTPNFKSNFDLAEDAKLQLSKDTYDDDLDNLLAQIGDQYADLFLAAKNLSDAILLSDILRVNTEITKAPLSASMIKRYDEHHQDLTLLKALVRQQLPEKYKEIFFDQSKNGYAGYIDGGASQEEFYKFIKPILEKMDGTEELLVKLNREDLLRKQRTFDNGSIPHQIHLGELHAILRRQEDFYPFLKDNREKIEKILTFRIPYYVGPLARGNSRFAWMTRKSEETITPWNFEEVVDKGASAQSFIERMTNFDKNLPNEKVLPKHSLLYEYFTVYNELTKVKYVTEGMRKPAFLSGEQKKAIVDLLFKTNRKVTVKQLKEDYFKKIECFDSVEISGVEDRFNASLGTYHDLLKIIKDKDFLDNEENEDILEDIVLTLTLFEDREMIEERLKTYAHLFDDKVMKQLKRRRYTGWGRLSRKLINGIRDKQSGKTILDFLKSDGFANRNFMQLIHDDSLTFKEDIQKAQVSGQGDSLHEHIANLAGSPAIKKGILQTVKVVDELVKVMGRHKPENIVIEMARENQTTQKGQKNSRERMKRIEEGIKELGSQILKEHPVENTQLQNEKLYLYYLQNGRDMYVDQELDINRLSDYDVDHIVPQSFLKDDSIDNKVLTRSDKARGKSDNVPSEEVVKKMKNYWRQLLNAKLITQRKFDNLTKAERGGLSELDKAGFIKRQLVETRQITKHVAQILDSRMNTKYDENDKLIREVKVITLKSKLVSDFRKDFQFYKVREINNYHHAHDAYLNAVVGTALIKKYPKLESEFVYGDYKVYDVRKMIAKSEQEIGKATAKYFFYSNIMNFFKTEITLANGEIRKRPLIETNGETGEIVWDKGRDFATVRKVLSMPQVNIVKKTEVQTGGFSKESILPKRNSDKLIARKKDWDPKKYGGFDSPTVAYSVLVVAKVEKGKSKKLKSVKELLGITIMERSSFEKNPIDFLEAKGYKEVKKDLIIKLPKYSLFELENGRKRMLASAGELQKGNELALPSKYVNFLYLASHYEKLKGSPEDNEQKQLFVEQHKHYLDEIIEQISEFSKRVILADANLDKVLSAYNKHRDKPIREQAENIIHLFTLTNLGAPAAFKYFDTTIDRKRYTSTKEVLDATLIHQSITGLYETRIDLSQLGGDGGGGGGGGGGLDDEYRLYSPLVKPDQNIQFWLEQFPQAWAETAGMGLAKQVPPQVIQLKASATPVSVRQYPLSKEAQEGIRPHVQRLIQQGILVPVQSPWNTPLLPVRKPGTNDYRPVQDLREVNKRVQDIHPTVPNPYNLLCALPPQRSWYTVLDLKDAFFCLRLHPTSQPLFAFEWRDPGTGRTGQLTWTRLPQGFKNSPTIFNEALHRDLANFRIQHPQVTLLQYVDDLLLAGATKQDCLEGTKALLLELSDLGYRASAKKAQICRREVTYLGYSLRDGQRWLTEARKKTVVQIPAPTTAKQVREFLGKAGFCRLFIPGFATLAAPLYPLTKPKGEFSWAPEHQKAFDAIKKALLSAPALALPDVTKPFTLYVDERKGVARGVLTQTLGPWRRPVAYLSKKLDPVASGWPVCLKAIAAVAILVKDADKLTLGQNITVIAPHALENIVRQPPDRWMTNARMTHYQSLLLTERVTFAPPAALNPATLLPEETDEPVTHDCHQLLIEETGVRKDLTDIPLTGEVLTWFTDGSSYVVEGKRMAGAAVVDGTRTIWASSLPEGTSAQKAELMALTQALRLAEGKSINIYTDSRYAFATAHVHGAIYKQRGWLTSAGREIKNKEEILSLLEALHLPKRLAIIHCPGHQKAKDPISRGNQMADRVAKQAAQGVNLLPAGKRTADGSEFEKRTADGSEFESPKKKAKVE

SEQ ID NO: 60 - protein, 2086 aa, synthetic construct
MPAAKRVKLDGGDKKYSIGLDIGTNSVGWAVITDEYKVPSKKFKVLGNTDRHSIKKNLIGALLFDSGETAEATRLKRTARRRYTRRKNRICYLQEIFSNEMAKVDDSFFHRLEESFLVEEDKKHERHPIFGNIVDEVAYHEKYPTIYHLRKKLVDSTDKADLRLIYLALAHMIKFRGHFLIEGDLNPDNSDVDKLFIQLVQTYNQLFEENPINASGVDAKAILSARLSKSRRLENLIAQLPGEKKNGLFGNLIALSLGLTPNFKSNFDLAEDAKLQLSKDTYDDDLDNLLAQIGDQYADLFLAAKNLSDAILLSDILRVNTEITKAPLSASMIKRYDEHHQDLTLLKALVRQQLPEKYKEIFFDQSKNGYAGYIDGGASQEEFYKFIKPILEKMDGTEELLVKLNREDLLRKQRTFDNGSIPHQIHLGELHAILRRQEDFYPFLKDNREKIEKILTFRIPYYVGPLARGNSRFAWMTRKSEETITPWNFEEVVDKGASAQSFIERMTNFDKNLPNEKVLPKHSLLYEYFTVYNELTKVKYVTEGMRKPAFLSGEQKKAIVDLLFKTNRKVTVKQLKEDYFKKIECFDSVEISGVEDRFNASLGTYHDLLKIIKDKDFLDNEENEDILEDIVLTLTLFEDREMIEERLKTYAHLFDDKVMKQLKRRRYTGWGRLSRKLINGIRDKQSGKTILDFLKSDGFANRNFMQLIHDDSLTFKEDIQKAQVSGQGDSLHEHIANLAGSPAIKKGILQTVKVVDELVKVMGRHKPENIVIEMARENQTTQKGQKNSRERMKRIEEGIKELGSQILKEHPVENTQLQNEKLYLYYLQNGRDMYVDQELDINRLSDYDVDHIVPQSFLKDDSIDNKVLTRSDKARGKSDNVPSEEVVKKMKNYWRQLLNAKLITQRKFDNLTKAERGGLSELDKAGFIKRQLVETRQITKHVAQILDSRMNTKYDENDKLIREVKVITLKSKLVSDFRKDFQFYKVREINNYHHAHDAYLNAVVGTALIKKYPKLESEFVYGDYKVYDVRKMIAKSEQEIGKATAKYFFYSNIMNFFKTEITLANGEIRKRPLIETNGETGEIVWDKGRDFATVRKVLSMPQVNIVKKTEVQTGGFSKESILPKRNSDKLIARKKDWDPKKYGGFDSPTVAYSVLVVAKVEKGKSKKLKSVKELLGITIMERSSFEKNPIDFLEAKGYKEVKKDLIIKLPKYSLFELENGRKRMLASAGELQKGNELALPSKYVNFLYLASHYEKLKGSPEDNEQKQLFVEQHKHYLDEIIEQISEFSKRVILADANLDKVLSAYNKHRDKPIREQAENIIHLFTLTNLGAPAAFKYFDTTIDRKRYTSTKEVLDATLIHQSITGLYETRIDLSQLGGDGGPAPGGSGSSGGLDDEYRLYSPLVKPDQNIQFWLEQFPQAWAETAGMGLAKQVPPQVIQLKASATPVSVRQYPLSKEAQEGIRPHVQRLIQQGILVPVQSPWNTPLLPVRKPGTNDYRPVQDLREVNKRVQDIHPTVPNPYNLLCALPPQRSWYTVLDLKDAFFCLRLHPTSQPLFAFEWRDPGTGRTGQLTWTRLPQGFKNSPTIFNEALHRDLANFRIQHPQVTLLQYVDDLLLAGATKQDCLEGTKALLLELSDLGYRASAKKAQICRREVTYLGYSLRDGQRWLTEARKKTVVQIPAPTTAKQVREFLGKAGFCRLFIPGFATLAAPLYPLTKPKGEFSWAPEHQKAFDAIKKALLSAPALALPDVTKPFTLYVDERKGVARGVLTQTLGPWRRPVAYLSKKLDPVASGWPVCLKAIAAVAILVKDADKLTLGQNITVIAPHALENIVRQPPDRWMTNARMTHYQSLLLTERVTFAPPAALNPATLLPEETDEPVTHDCHQLLIEETGVRKDLTDIPLTGEVLTWFTDGSSYVVEGKRMAGAAVVDGTRTIWASSLPEGTSAQKAELMALTQALRLAEGKSINIYTDSRYAFATAHVHGAIYKQRGWLTSAGREIKNKEEILSLLEALHLPKRLAIIHCPGHQKAKDPISRGNQMADRVAKQAAQGVNLLPAGKRTADGSEFEKRTADGSEFESPKKKAKVE

SEQ ID NO: 61 - protein, 2083 aa, synthetic construct
MPAAKRVKLDGGDKKYSIGLDIGTNSVGWAVITDEYKVPSKKFKVLGNTDRHSIKKNLIGALLFDSGETAEATRLKRTARRRYTRRKNRICYLQEIFSNEMAKVDDSFFHRLEESFLVEEDKKHERHPIFGNIVDEVAYHEKYPTIYHLRKKLVDSTDKADLRLIYLALAHMIKFRGHFLIEGDLNPDNSDVDKLFIQLVQTYNQLFEENPINASGVDAKAILSARLSKSRRLENLIAQLPGEKKNGLFGNLIALSLGLTPNFKSNFDLAEDAKLQLSKDTYDDDLDNLLAQIGDQYADLFLAAKNLSDAILLSDILRVNTEITKAPLSASMIKRYDEHHQDLTLLKALVRQQLPEKYKEIFFDQSKNGYAGYIDGGASQEEFYKFIKPILEKMDGTEELLVKLNREDLLRKQRTFDNGSIPHQIHLGELHAILRRQEDFYPFLKDNREKIEKILTFRIPYYVGPLARGNSRFAWMTRKSEETITPWNFEEVVDKGASAQSFIERMTNFDKNLPNEKVLPKHSLLYEYFTVYNELTKVKYVTEGMRKPAFLSGEQKKAIVDLLFKTNRKVTVKQLKEDYFKKIECFDSVEISGVEDRFNASLGTYHDLLKIIKDKDFLDNEENEDILEDIVLTLTLFEDREMIEERLKTYAHLFDDKVMKQLKRRRYTGWGRLSRKLINGIRDKQSGKTILDFLKSDGFANRNFMQLIHDDSLTFKEDIQKAQVSGQGDSLHEHIANLAGSPAIKKGILQTVKVVDELVKVMGRHKPENIVIEMARENQTTQKGQKNSRERMKRIEEGIKELGSQILKEHPVENTQLQNEKLYLYYLQNGRDMYVDQELDINRLSDYDVDHIVPQSFLKDDSIDNKVLTRSDKARGKSDNVPSEEVVKKMKNYWRQLLNAKLITQRKFDNLTKAERGGLSELDKAGFIKRQLVETRQITKHVAQILDSRMNTKYDENDKLIREVKVITLKSKLVSDFRKDFQFYKVREINNYHHAHDAYLNAVVGTALIKKYPKLESEFVYGDYKVYDVRKMIAKSEQEIGKATAKYFFYSNIMNFFKTEITLANGEIRKRPLIETNGETGEIVWDKGRDFATVRKVLSMPQVNIVKKTEVQTGGFSKESILPKRNSDKLIARKKDWDPKKYGGFDSPTVAYSVLVVAKVEKGKSKKLKSVKELLGITIMERSSFEKNPIDFLEAKGYKEVKKDLIIKLPKYSLFELENGRKRMLASAGELQKGNELALPSKYVNFLYLASHYEKLKGSPEDNEQKQLFVEQHKHYLDEIIEQISEFSKRVILADANLDKVLSAYNKHRDKPIREQAENIIHLFTLTNLGAPAAFKYFDTTIDRKRYTSTKEVLDATLIHQSITGLYETRIDLSQLGGDGGPAPGSSGGLDDEYRLYSPLVKPDQNIQFWLEQFPQAWAETAGMGLAKQVPPQVIQLKASATPVSVRQYPLSKEAQEGIRPHVQRLIQQGILVPVQSPWNTPLLPVRKPGTNDYRPVQDLREVNKRVQDIHPTVPNPYNLLCALPPQRSWYTVLDLKDAFFCLRLHPTSQPLFAFEWRDPGTGRTGQLTWTRLPQGFKNSPTIFNEALHRDLANFRIQHPQVTLLQYVDDLLLAGATKQDCLEGTKALLLELSDLGYRASAKKAQICRREVTYLGYSLRDGQRWLTEARKKTVVQIPAPTTAKQVREFLGKAGFCRLFIPGFATLAAPLYPLTKPKGEFSWAPEHQKAFDAIKKALLSAPALALPDVTKPFTLYVDERKGVARGVLTQTLGPWRRPVAYLSKKLDPVASGWPVCLKAIAAVAILVKDADKLTLGQNITVIAPHALENIVRQPPDRWMTNARMTHYQSLLLTERVTFAPPAALNPATLLPEETDEPVTHDCHQLLIEETGVRKDLTDIPLTGEVLTWFTDGSSYVVEGKRMAGAAVVDGTRTIWASSLPEGTSAQKAELMALTQALRLAEGKSINIYTDSRYAFATAHVHGAIYKQRGWLTSAGREIKNKEEILSLLEALHLPKRLAIIHCPGHQKAKDPISRGNQMADRVAKQAAQGVNLLPAGKRTADGSEFEKRTADGSEFESPKKKAKVE

SEQ ID NO: 62 - protein, 2088 aa, synthetic construct
MPAAKRVKLDGGDKKYSIGLDIGTNSVGWAVITDEYKVPSKKFKVLGNTDRHSIKKNLIGALLFDSGETAEATRLKRTARRRYTRRKNRICYLQEIFSNEMAKVDDSFFHRLEESFLVEEDKKHERHPIFGNIVDEVAYHEKYPTIYHLRKKLVDSTDKADLRLIYLALAHMIKFRGHFLIEGDLNPDNSDVDKLFIQLVQTYNQLFEENPINASGVDAKAILSARLSKSRRLENLIAQLPGEKKNGLFGNLIALSLGLTPNFKSNFDLAEDAKLQLSKDTYDDDLDNLLAQIGDQYADLFLAAKNLSDAILLSDILRVNTEITKAPLSASMIKRYDEHHQDLTLLKALVRQQLPEKYKEIFFDQSKNGYAGYIDGGASQEEFYKFIKPILEKMDGTEELLVKLNREDLLRKQRTFDNGSIPHQIHLGELHAILRRQEDFYPFLKDNREKIEKILTFRIPYYVGPLARGNSRFAWMTRKSEETITPWNFEEVVDKGASAQSFIERMTNFDKNLPNEKVLPKHSLLYEYFTVYNELTKVKYVTEGMRKPAFLSGEQKKAIVDLLFKTNRKVTVKQLKEDYFKKIECFDSVEISGVEDRFNASLGTYHDLLKIIKDKDFLDNEENEDILEDIVLTLTLFEDREMIEERLKTYAHLFDDKVMKQLKRRRYTGWGRLSRKLINGIRDKQSGKTILDFLKSDGFANRNFMQLIHDDSLTFKEDIQKAQVSGQGDSLHEHIANLAGSPAIKKGILQTVKVVDELVKVMGRHKPENIVIEMARENQTTQKGQKNSRERMKRIEEGIKELGSQILKEHPVENTQLQNEKLYLYYLQNGRDMYVDQELDINRLSDYDVDHIVPQSFLKDDSIDNKVLTRSDKARGKSDNVPSEEVVKKMKNYWRQLLNAKLITQRKFDNLTKAERGGLSELDKAGFIKRQLVETRQITKHVAQILDSRMNTKYDENDKLIREVKVITLKSKLVSDFRKDFQFYKVREINNYHHAHDAYLNAVVGTALIKKYPKLESEFVYGDYKVYDVRKMIAKSEQEIGKATAKYFFYSNIMNFFKTEITLANGEIRKRPLIETNGETGEIVWDKGRDFATVRKVLSMPQVNIVKKTEVQTGGFSKESILPKRNSDKLIARKKDWDPKKYGGFDSPTVAYSVLVVAKVEKGKSKKLKSVKELLGITIMERSSFEKNPIDFLEAKGYKEVKKDLIIKLPKYSLFELENGRKRMLASAGELQKGNELALPSKYVNFLYLASHYEKLKGSPEDNEQKQLFVEQHKHYLDEIIEQISEFSKRVILADANLDKVLSAYNKHRDKPIREQAENIIHLFTLTNLGAPAAFKYFDTTIDRKRYTSTKEVLDATLIHQSITGLYETRIDLSQLGGDGGPAPAPAPAPAPGGLDDEYRLYSPLVKPDQNIQFWLEQFPQAWAETAGMGLAKQVPPQVIQLKASATPVSVRQYPLSKEAQEGIRPHVQRLIQQGILVPVQSPWNTPLLPVRKPGTNDYRPVQDLREVNKRVQDIHPTVPNPYNLLCALPPQRSWYTVLDLKDAFFCLRLHPTSQPLFAFEWRDPGTGRTGQLTWTRLPQGFKNSPTIFNEALHRDLANFRIQHPQVTLLQYVDDLLLAGATKQDCLEGTKALLLELSDLGYRASAKKAQICRREVTYLGYSLRDGQRWLTEARKKTVVQIPAPTTAKQVREFLGKAGFCRLFIPGFATLAAPLYPLTKPKGEFSWAPEHQKAFDAIKKALLSAPALALPDVTKPFTLYVDERKGVARGVLTQTLGPWRRPVAYLSKKLDPVASGWPVCLKAIAAVAILVKDADKLTLGQNITVIAPHALENIVRQPPDRWMTNARMTHYQSLLLTERVTFAPPAALNPATLLPEETDEPVTHDCHQLLIEETGVRKDLTDIPLTGEVLTWFTDGSSYVVEGKRMAGAAVVDGTRTIWASSLPEGTSAQKAELMALTQALRLAEGKSINIYTDSRYAFATAHVHGAIYKQRGWLTSAGREIKNKEEILSLLEALHLPKRLAIIHCPGHQKAKDPISRGNQMADRVAKQAAQGVNLLPAGKRTADGSEFEKRTADGSEFESPKKKAKVE

SEQ ID NO: 63 - protein, 2088 aa, synthetic construct
MPAAKRVKLDGGDKKYSIGLDIGTNSVGWAVITDEYKVPSKKFKVLGNTDRHSIKKNLIGALLFDSGETAEATRLKRTARRRYTRRKNRICYLQEIFSNEMAKVDDSFFHRLEESFLVEEDKKHERHPIFGNIVDEVAYHEKYPTIYHLRKKLVDSTDKADLRLIYLALAHMIKFRGHFLIEGDLNPDNSDVDKLFIQLVQTYNQLFEENPINASGVDAKAILSARLSKSRRLENLIAQLPGEKKNGLFGNLIALSLGLTPNFKSNFDLAEDAKLQLSKDTYDDDLDNLLAQIGDQYADLFLAAKNLSDAILLSDILRVNTEITKAPLSASMIKRYDEHHQDLTLLKALVRQQLPEKYKEIFFDQSKNGYAGYIDGGASQEEFYKFIKPILEKMDGTEELLVKLNREDLLRKQRTFDNGSIPHQIHLGELHAILRRQEDFYPFLKDNREKIEKILTFRIPYYVGPLARGNSRFAWMTRKSEETITPWNFEEVVDKGASAQSFIERMTNFDKNLPNEKVLPKHSLLYEYFTVYNELTKVKYVTEGMRKPAFLSGEQKKAIVDLLFKTNRKVTVKQLKEDYFKKIECFDSVEISGVEDRFNASLGTYHDLLKIIKDKDFLDNEENEDILEDIVLTLTLFEDREMIEERLKTYAHLFDDKVMKQLKRRRYTGWGRLSRKLINGIRDKQSGKTILDFLKSDGFANRNFMQLIHDDSLTFKEDIQKAQVSGQGDSLHEHIANLAGSPAIKKGILQTVKVVDELVKVMGRHKPENIVIEMARENQTTQKGQKNSRERMKRIEEGIKELGSQILKEHPVENTQLQNEKLYLYYLQNGRDMYVDQELDINRLSDYDVDHIVPQSFLKDDSIDNKVLTRSDKARGKSDNVPSEEVVKKMKNYWRQLLNAKLITQRKFDNLTKAERGGLSELDKAGFIKRQLVETRQITKHVAQILDSRMNTKYDENDKLIREVKVITLKSKLVSDFRKDFQFYKVREINNYHHAHDAYLNAVVGTALIKKYPKLESEFVYGDYKVYDVRKMIAKSEQEIGKATAKYFFYSNIMNFFKTEITLANGEIRKRPLIETNGETGEIVWDKGRDFATVRKVLSMPQVNIVKKTEVQTGGFSKESILPKRNSDKLIARKKDWDPKKYGGFDSPTVAYSVLVVAKVEKGKSKKLKSVKELLGITIMERSSFEKNPIDFLEAKGYKEVKKDLIIKLPKYSLFELENGRKRMLASAGELQKGNELALPSKYVNFLYLASHYEKLKGSPEDNEQKQLFVEQHKHYLDEIIEQISEFSKRVILADANLDKVLSAYNKHRDKPIREQAENIIHLFTLTNLGAPAAFKYFDTTIDRKRYTSTKEVLDATLIHQSITGLYETRIDLSQLGGDGGGGGEAAAKPAPGGLDDEYRLYSPLVKPDQNIQFWLEQFPQAWAETAGMGLAKQVPPQVIQLKASATPVSVRQYPLSKEAQEGIRPHVQRLIQQGILVPVQSPWNTPLLPVRKPGTNDYRPVQDLREVNKRVQDIHPTVPNPYNLLCALPPQRSWYTVLDLKDAFFCLRLHPTSQPLFAFEWRDPGTGRTGQLTWTRLPQGFKNSPTIFNEALHRDLANFRIQHPQVTLLQYVDDLLLAGATKQDCLEGTKALLLELSDLGYRASAKKAQICRREVTYLGYSLRDGQRWLTEARKKTVVQIPAPTTAKQVREFLGKAGFCRLFIPGFATLAAPLYPLTKPKGEFSWAPEHQKAFDAIKKALLSAPALALPDVTKPFTLYVDERKGVARGVLTQTLGPWRRPVAYLSKKLDPVASGWPVCLKAIAAVAILVKDADKLTLGQNITVIAPHALENIVRQPPDRWMTNARMTHYQSLLLTERVTFAPPAALNPATLLPEETDEPVTHDCHQLLIEETGVRKDLTDIPLTGEVLTWFTDGSSYVVEGKRMAGAAVVDGTRTIWASSLPEGTSAQKAELMALTQALRLAEGKSINIYTDSRYAFATAHVHGAIYKQRGWLTSAGREIKNKEEILSLLEALHLPKRLAIIHCPGHQKAKDPISRGNQMADRVAKQAAQGVNLLPAGKRTADGSEFEKRTADGSEFESPKKKAKVE

SEQ ID NO: 64 - protein, 2086 aa, synthetic construct
MPAAKRVKLDGGDKKYSIGLDIGTNSVGWAVITDEYKVPSKKFKVLGNTDRHSIKKNLIGALLFDSGETAEATRLKRTARRRYTRRKNRICYLQEIFSNEMAKVDDSFFHRLEESFLVEEDKKHERHPIFGNIVDEVAYHEKYPTIYHLRKKLVDSTDKADLRLIYLALAHMIKFRGHFLIEGDLNPDNSDVDKLFIQLVQTYNQLFEENPINASGVDAKAILSARLSKSRRLENLIAQLPGEKKNGLFGNLIALSLGLTPNFKSNFDLAEDAKLQLSKDTYDDDLDNLLAQIGDQYADLFLAAKNLSDAILLSDILRVNTEITKAPLSASMIKRYDEHHQDLTLLKALVRQQLPEKYKEIFFDQSKNGYAGYIDGGASQEEFYKFIKPILEKMDGTEELLVKLNREDLLRKQRTFDNGSIPHQIHLGELHAILRRQEDFYPFLKDNREKIEKILTFRIPYYVGPLARGNSRFAWMTRKSEETITPWNFEEVVDKGASAQSFIERMTNFDKNLPNEKVLPKHSLLYEYFTVYNELTKVKYVTEGMRKPAFLSGEQKKAIVDLLFKTNRKVTVKQLKEDYFKKIECFDSVEISGVEDRFNASLGTYHDLLKIIKDKDFLDNEENEDILEDIVLTLTLFEDREMIEERLKTYAHLFDDKVMKQLKRRRYTGWGRLSRKLINGIRDKQSGKTILDFLKSDGFANRNFMQLIHDDSLTFKEDIQKAQVSGQGDSLHEHIANLAGSPAIKKGILQTVKVVDELVKVMGRHKPENIVIEMARENQTTQKGQKNSRERMKRIEEGIKELGSQILKEHPVENTQLQNEKLYLYYLQNGRDMYVDQELDINRLSDYDVDHIVPQSFLKDDSIDNKVLTRSDKARGKSDNVPSEEVVKKMKNYWRQLLNAKLITQRKFDNLTKAERGGLSELDKAGFIKRQLVETRQITKHVAQILDSRMNTKYDENDKLIREVKVITLKSKLVSDFRKDFQFYKVREINNYHHAHDAYLNAVVGTALIKKYPKLESEFVYGDYKVYDVRKMIAKSEQEIGKATAKYFFYSNIMNFFKTEITLANGEIRKRPLIETNGETGEIVWDKGRDFATVRKVLSMPQVNIVKKTEVQTGGFSKESILPKRNSDKLIARKKDWDPKKYGGFDSPTVAYSVLVVAKVEKGKSKKLKSVKELLGITIMERSSFEKNPIDFLEAKGYKEVKKDLIIKLPKYSLFELENGRKRMLASAGELQKGNELALPSKYVNFLYLASHYEKLKGSPEDNEQKQLFVEQHKHYLDEIIEQISEFSKRVILADANLDKVLSAYNKHRDKPIREQAENIIHLFTLTNLGAPAAFKYFDTTIDRKRYTSTKEVLDATLIHQSITGLYETRIDLSQLGGDGGGSSGGSPAPGGLDDEYRLYSPLVKPDQNIQFWLEQFPQAWAETAGMGLAKQVPPQVIQLKASATPVSVRQYPLSKEAQEGIRPHVQRLIQQGILVPVQSPWNTPLLPVRKPGTNDYRPVQDLREVNKRVQDIHPTVPNPYNLLCALPPQRSWYTVLDLKDAFFCLRLHPTSQPLFAFEWRDPGTGRTGQLTWTRLPQGFKNSPTIFNEALHRDLANFRIQHPQVTLLQYVDDLLLAGATKQDCLEGTKALLLELSDLGYRASAKKAQICRREVTYLGYSLRDGQRWLTEARKKTVVQIPAPTTAKQVREFLGKAGFCRLFIPGFATLAAPLYPLTKPKGEFSWAPEHQKAFDAIKKALLSAPALALPDVTKPFTLYVDERKGVARGVLTQTLGPWRRPVAYLSKKLDPVASGWPVCLKAIAAVAILVKDADKLTLGQNITVIAPHALENIVRQPPDRWMTNARMTHYQSLLLTERVTFAPPAALNPATLLPEETDEPVTHDCHQLLIEETGVRKDLTDIPLTGEVLTWFTDGSSYVVEGKRMAGAAVVDGTRTIWASSLPEGTSAQKAELMALTQALRLAEGKSINIYTDSRYAFATAHVHGAIYKQRGWLTSAGREIKNKEEILSLLEALHLPKRLAIIHCPGHQKAKDPISRGNQMADRVAKQAAQGVNLLPAGKRTADGSEFEKRTADGSEFESPKKKAKVE

SEQ ID NO: 65 - protein, 2088 aa, synthetic construct
MPAAKRVKLDGGDKKYSIGLDIGTNSVGWAVITDEYKVPSKKFKVLGNTDRHSIKKNLIGALLFDSGETAEATRLKRTARRRYTRRKNRICYLQEIFSNEMAKVDDSFFHRLEESFLVEEDKKHERHPIFGNIVDEVAYHEKYPTIYHLRKKLVDSTDKADLRLIYLALAHMIKFRGHFLIEGDLNPDNSDVDKLFIQLVQTYNQLFEENPINASGVDAKAILSARLSKSRRLENLIAQLPGEKKNGLFGNLIALSLGLTPNFKSNFDLAEDAKLQLSKDTYDDDLDNLLAQIGDQYADLFLAAKNLSDAILLSDILRVNTEITKAPLSASMIKRYDEHHQDLTLLKALVRQQLPEKYKEIFFDQSKNGYAGYIDGGASQEEFYKFIKPILEKMDGTEELLVKLNREDLLRKQRTFDNGSIPHQIHLGELHAILRRQEDFYPFLKDNREKIEKILTFRIPYYVGPLARGNSRFAWMTRKSEETITPWNFEEVVDKGASAQSFIERMTNFDKNLPNEKVLPKHSLLYEYFTVYNELTKVKYVTEGMRKPAFLSGEQKKAIVDLLFKTNRKVTVKQLKEDYFKKIECFDSVEISGVEDRFNASLGTYHDLLKIIKDKDFLDNEENEDILEDIVLTLTLFEDREMIEERLKTYAHLFDDKVMKQLKRRRYTGWGRLSRKLINGIRDKQSGKTILDFLKSDGFANRNFMQLIHDDSLTFKEDIQKAQVSGQGDSLHEHIANLAGSPAIKKGILQTVKVVDELVKVMGRHKPENIVIEMARENQTTQKGQKNSRERMKRIEEGIKELGSQILKEHPVENTQLQNEKLYLYYLQNGRDMYVDQELDINRLSDYDVDHIVPQSFLKDDSIDNKVLTRSDKARGKSDNVPSEEVVKKMKNYWRQLLNAKLITQRKFDNLTKAERGGLSELDKAGFIKRQLVETRQITKHVAQILDSRMNTKYDENDKLIREVKVITLKSKLVSDFRKDFQFYKVREINNYHHAHDAYLNAVVGTALIKKYPKLESEFVYGDYKVYDVRKMIAKSEQEIGKATAKYFFYSNIMNFFKTEITLANGEIRKRPLIETNGETGEIVWDKGRDFATVRKVLSMPQVNIVKKTEVQTGGFSKESILPKRNSDKLIARKKDWDPKKYGGFDSPTVAYSVLVVAKVEKGKSKKLKSVKELLGITIMERSSFEKNPIDFLEAKGYKEVKKDLIIKLPKYSLFELENGRKRMLASAGELQKGNELALPSKYVNFLYLASHYEKLKGSPEDNEQKQLFVEQHKHYLDEIIEQISEFSKRVILADANLDKVLSAYNKHRDKPIREQAENIIHLFTLTNLGAPAAFKYFDTTIDRKRYTSTKEVLDATLIHQSITGLYETRIDLSQLGGDGGGGGEAAAKGGSGGLDDEYRLYSPLVKPDQNIQFWLEQFPQAWAETAGMGLAKQVPPQVIQLKASATPVSVRQYPLSKEAQEGIRPHVQRLIQQGILVPVQSPWNTPLLPVRKPGTNDYRPVQDLREVNKRVQDIHPTVPNPYNLLCALPPQRSWYTVLDLKDAFFCLRLHPTSQPLFAFEWRDPGTGRTGQLTWTRLPQGFKNSPTIFNEALHRDLANFRIQHPQVTLLQYVDDLLLAGATKQDCLEGTKALLLELSDLGYRASAKKAQICRREVTYLGYSLRDGQRWLTEARKKTVVQIPAPTTAKQVREFLGKAGFCRLFIPGFATLAAPLYPLTKPKGEFSWAPEHQKAFDAIKKALLSAPALALPDVTKPFTLYVDERKGVARGVLTQTLGPWRRPVAYLSKKLDPVASGWPVCLKAIAAVAILVKDADKLTLGQNITVIAPHALENIVRQPPDRWMTNARMTHYQSLLLTERVTFAPPAALNPATLLPEETDEPVTHDCHQLLIEETGVRKDLTDIPLTGEVLTWFTDGSSYVVEGKRMAGAAVVDGTRTIWASSLPEGTSAQKAELMALTQALRLAEGKSINIYTDSRYAFATAHVHGAIYKQRGWLTSAGREIKNKEEILSLLEALHLPKRLAIIHCPGHQKAKDPISRGNQMADRVAKQAAQGVNLLPAGKRTADGSEFEKRTADGSEFESPKKKAKVE

SEQ ID NO: 66 - protein, 2081 aa, synthetic construct
MPAAKRVKLDGGDKKYSIGLDIGTNSVGWAVITDEYKVPSKKFKVLGNTDRHSIKKNLIGALLFDSGETAEATRLKRTARRRYTRRKNRICYLQEIFSNEMAKVDDSFFHRLEESFLVEEDKKHERHPIFGNIVDEVAYHEKYPTIYHLRKKLVDSTDKADLRLIYLALAHMIKFRGHFLIEGDLNPDNSDVDKLFIQLVQTYNQLFEENPINASGVDAKAILSARLSKSRRLENLIAQLPGEKKNGLFGNLIALSLGLTPNFKSNFDLAEDAKLQLSKDTYDDDLDNLLAQIGDQYADLFLAAKNLSDAILLSDILRVNTEITKAPLSASMIKRYDEHHQDLTLLKALVRQQLPEKYKEIFFDQSKNGYAGYIDGGASQEEFYKFIKPILEKMDGTEELLVKLNREDLLRKQRTFDNGSIPHQIHLGELHAILRRQEDFYPFLKDNREKIEKILTFRIPYYVGPLARGNSRFAWMTRKSEETITPWNFEEVVDKGASAQSFIERMTNFDKNLPNEKVLPKHSLLYEYFTVYNELTKVKYVTEGMRKPAFLSGEQKKAIVDLLFKTNRKVTVKQLKEDYFKKIECFDSVEISGVEDRFNASLGTYHDLLKIIKDKDFLDNEENEDILEDIVLTLTLFEDREMIEERLKTYAHLFDDKVMKQLKRRRYTGWGRLSRKLINGIRDKQSGKTILDFLKSDGFANRNFMQLIHDDSLTFKEDIQKAQVSGQGDSLHEHIANLAGSPAIKKGILQTVKVVDELVKVMGRHKPENIVIEMARENQTTQKGQKNSRERMKRIEEGIKELGSQILKEHPVENTQLQNEKLYLYYLQNGRDMYVDQELDINRLSDYDVDHIVPQSFLKDDSIDNKVLTRSDKARGKSDNVPSEEVVKKMKNYWRQLLNAKLITQRKFDNLTKAERGGLSELDKAGFIKRQLVETRQITKHVAQILDSRMNTKYDENDKLIREVKVITLKSKLVSDFRKDFQFYKVREINNYHHAHDAYLNAVVGTALIKKYPKLESEFVYGDYKVYDVRKMIAKSEQEIGKATAKYFFYSNIMNFFKTEITLANGEIRKRPLIETNGETGEIVWDKGRDFATVRKVLSMPQVNIVKKTEVQTGGFSKESILPKRNSDKLIARKKDWDPKKYGGFDSPTVAYSVLVVAKVEKGKSKKLKSVKELLGITIMERSSFEKNPIDFLEAKGYKEVKKDLIIKLPKYSLFELENGRKRMLASAGELQKGNELALPSKYVNFLYLASHYEKLKGSPEDNEQKQLFVEQHKHYLDEIIEQISEFSKRVILADANLDKVLSAYNKHRDKPIREQAENIIHLFTLTNLGAPAAFKYFDTTIDRKRYTSTKEVLDATLIHQSITGLYETRIDLSQLGGDGGGGGGGGLDDEYRLYSPLVKPDQNIQFWLEQFPQAWAETAGMGLAKQVPPQVIQLKASATPVSVRQYPLSKEAQEGIRPHVQRLIQQGILVPVQSPWNTPLLPVRKPGTNDYRPVQDLREVNKRVQDIHPTVPNPYNLLCALPPQRSWYTVLDLKDAFFCLRLHPTSQPLFAFEWRDPGTGRTGQLTWTRLPQGFKNSPTIFNEALHRDLANFRIQHPQVTLLQYVDDLLLAGATKQDCLEGTKALLLELSDLGYRASAKKAQICRREVTYLGYSLRDGQRWLTEARKKTVVQIPAPTTAKQVREFLGKAGFCRLFIPGFATLAAPLYPLTKPKGEFSWAPEHQKAFDAIKKALLSAPALALPDVTKPFTLYVDERKGVARGVLTQTLGPWRRPVAYLSKKLDPVASGWPVCLKAIAAVAILVKDADKLTLGQNITVIAPHALENIVRQPPDRWMTNARMTHYQSLLLTERVTFAPPAALNPATLLPEETDEPVTHDCHQLLIEETGVRKDLTDIPLTGEVLTWFTDGSSYVVEGKRMAGAAVVDGTRTIWASSLPEGTSAQKAELMALTQALRLAEGKSINIYTDSRYAFATAHVHGAIYKQRGWLTSAGREIKNKEEILSLLEALHLPKRLAIIHCPGHQKAKDPISRGNQMADRVAKQAAQGVNLLPAGKRTADGSEFEKRTADGSEFESPKKKAKVE

SEQ ID NO: 67 - protein, 2089 aa, synthetic construct
MPAAKRVKLDGGDKKYSIGLDIGTNSVGWAVITDEYKVPSKKFKVLGNTDRHSIKKNLIGALLFDSGETAEATRLKRTARRRYTRRKNRICYLQEIFSNEMAKVDDSFFHRLEESFLVEEDKKHERHPIFGNIVDEVAYHEKYPTIYHLRKKLVDSTDKADLRLIYLALAHMIKFRGHFLIEGDLNPDNSDVDKLFIQLVQTYNQLFEENPINASGVDAKAILSARLSKSRRLENLIAQLPGEKKNGLFGNLIALSLGLTPNFKSNFDLAEDAKLQLSKDTYDDDLDNLLAQIGDQYADLFLAAKNLSDAILLSDILRVNTEITKAPLSASMIKRYDEHHQDLTLLKALVRQQLPEKYKEIFFDQSKNGYAGYIDGGASQEEFYKFIKPILEKMDGTEELLVKLNREDLLRKQRTFDNGSIPHQIHLGELHAILRRQEDFYPFLKDNREKIEKILTFRIPYYVGPLARGNSRFAWMTRKSEETITPWNFEEVVDKGASAQSFIERMTNFDKNLPNEKVLPKHSLLYEYFTVYNELTKVKYVTEGMRKPAFLSGEQKKAIVDLLFKTNRKVTVKQLKEDYFKKIECFDSVEISGVEDRFNASLGTYHDLLKIIKDKDFLDNEENEDILEDIVLTLTLFEDREMIEERLKTYAHLFDDKVMKQLKRRRYTGWGRLSRKLINGIRDKQSGKTILDFLKSDGFANRNFMQLIHDDSLTFKEDIQKAQVSGQGDSLHEHIANLAGSPAIKKGILQTVKVVDELVKVMGRHKPENIVIEMARENQTTQKGQKNSRERMKRIEEGIKELGSQILKEHPVENTQLQNEKLYLYYLQNGRDMYVDQELDINRLSDYDVDHIVPQSFLKDDSIDNKVLTRSDKARGKSDNVPSEEVVKKMKNYWRQLLNAKLITQRKFDNLTKAERGGLSELDKAGFIKRQLVETRQITKHVAQILDSRMNTKYDENDKLIREVKVITLKSKLVSDFRKDFQFYKVREINNYHHAHDAYLNAVVGTALIKKYPKLESEFVYGDYKVYDVRKMIAKSEQEIGKATAKYFFYSNIMNFFKTEITLANGEIRKRPLIETNGETGEIVWDKGRDFATVRKVLSMPQVNIVKKTEVQTGGFSKESILPKRNSDKLIARKKDWDPKKYGGFDSPTVAYSVLVVAKVEKGKSKKLKSVKELLGITIMERSSFEKNPIDFLEAKGYKEVKKDLIIKLPKYSLFELENGRKRMLASAGELQKGNELALPSKYVNFLYLASHYEKLKGSPEDNEQKQLFVEQHKHYLDEIIEQISEFSKRVILADANLDKVLSAYNKHRDKPIREQAENIIHLFTLTNLGAPAAFKYFDTTIDRKRYTSTKEVLDATLIHQSITGLYETRIDLSQLGGDGGGGSGGSGGSGGSGGLDDEYRLYSPLVKPDQNIQFWLEQFPQAWAETAGMGLAKQVPPQVIQLKASATPVSVRQYPLSKEAQEGIRPHVQRLIQQGILVPVQSPWNTPLLPVRKPGTNDYRPVQDLREVNKRVQDIHPTVPNPYNLLCALPPQRSWYTVLDLKDAFFCLRLHPTSQPLFAFEWRDPGTGRTGQLTWTRLPQGFKNSPTIFNEALHRDLANFRIQHPQVTLLQYVDDLLLAGATKQDCLEGTKALLLELSDLGYRASAKKAQICRREVTYLGYSLRDGQRWLTEARKKTVVQIPAPTTAKQVREFLGKAGFCRLFIPGFATLAAPLYPLTKPKGEFSWAPEHQKAFDAIKKALLSAPALALPDVTKPFTLYVDERKGVARGVLTQTLGPWRRPVAYLSKKLDPVASGWPVCLKAIAAVAILVKDADKLTLGQNITVIAPHALENIVRQPPDRWMTNARMTHYQSLLLTERVTFAPPAALNPATLLPEETDEPVTHDCHQLLIEETGVRKDLTDIPLTGEVLTWFTDGSSYVVEGKRMAGAAVVDGTRTIWASSLPEGTSAQKAELMALTQALRLAEGKSINIYTDSRYAFATAHVHGAIYKQRGWLTSAGREIKNKEEILSLLEALHLPKRLAIIHCPGHQKAKDPISRGNQMADRVAKQAAQGVNLLPAGKRTADGSEFEKRTADGSEFESPKKKAKVE

SEQ ID NO: 68 - protein, 2088 aa, synthetic construct
MPAAKRVKLDGGDKKYSIGLDIGTNSVGWAVITDEYKVPSKKFKVLGNTDRHSIKKNLIGALLFDSGETAEATRLKRTARRRYTRRKNRICYLQEIFSNEMAKVDDSFFHRLEESFLVEEDKKHERHPIFGNIVDEVAYHEKYPTIYHLRKKLVDSTDKADLRLIYLALAHMIKFRGHFLIEGDLNPDNSDVDKLFIQLVQTYNQLFEENPINASGVDAKAILSARLSKSRRLENLIAQLPGEKKNGLFGNLIALSLGLTPNFKSNFDLAEDAKLQLSKDTYDDDLDNLLAQIGDQYADLFLAAKNLSDAILLSDILRVNTEITKAPLSASMIKRYDEHHQDLTLLKALVRQQLPEKYKEIFFDQSKNGYAGYIDGGASQEEFYKFIKPILEKMDGTEELLVKLNREDLLRKQRTFDNGSIPHQIHLGELHAILRRQEDFYPFLKDNREKIEKILTFRIPYYVGPLARGNSRFAWMTRKSEETITPWNFEEVVDKGASAQSFIERMTNFDKNLPNEKVLPKHSLLYEYFTVYNELTKVKYVTEGMRKPAFLSGEQKKAIVDLLFKTNRKVTVKQLKEDYFKKIECFDSVEISGVEDRFNASLGTYHDLLKIIKDKDFLDNEENEDILEDIVLTLTLFEDREMIEERLKTYAHLFDDKVMKQLKRRRYTGWGRLSRKLINGIRDKQSGKTILDFLKSDGFANRNFMQLIHDDSLTFKEDIQKAQVSGQGDSLHEHIANLAGSPAIKKGILQTVKVVDELVKVMGRHKPENIVIEMARENQTTQKGQKNSRERMKRIEEGIKELGSQILKEHPVENTQLQNEKLYLYYLQNGRDMYVDQELDINRLSDYDVDHIVPQSFLKDDSIDNKVLTRSDKARGKSDNVPSEEVVKKMKNYWRQLLNAKLITQRKFDNLTKAERGGLSELDKAGFIKRQLVETRQITKHVAQILDSRMNTKYDENDKLIREVKVITLKSKLVSDFRKDFQFYKVREINNYHHAHDAYLNAVVGTALIKKYPKLESEFVYGDYKVYDVRKMIAKSEQEIGKATAKYFFYSNIMNFFKTEITLANGEIRKRPLIETNGETGEIVWDKGRDFATVRKVLSMPQVNIVKKTEVQTGGFSKESILPKRNSDKLIARKKDWDPKKYGGFDSPTVAYSVLVVAKVEKGKSKKLKSVKELLGITIMERSSFEKNPIDFLEAKGYKEVKKDLIIKLPKYSLFELENGRKRMLASAGELQKGNELALPSKYVNFLYLASHYEKLKGSPEDNEQKQLFVEQHKHYLDEIIEQISEFSKRVILADANLDKVLSAYNKHRDKPIREQAENIIHLFTLTNLGAPAAFKYFDTTIDRKRYTSTKEVLDATLIHQSITGLYETRIDLSQLGGDGGGGGGGSEAAAKGGLDDEYRLYSPLVKPDQNIQFWLEQFPQAWAETAGMGLAKQVPPQVIQLKASATPVSVRQYPLSKEAQEGIRPHVQRLIQQGILVPVQSPWNTPLLPVRKPGTNDYRPVQDLREVNKRVQDIHPTVPNPYNLLCALPPQRSWYTVLDLKDAFFCLRLHPTSQPLFAFEWRDPGTGRTGQLTWTRLPQGFKNSPTIFNEALHRDLANFRIQHPQVTLLQYVDDLLLAGATKQDCLEGTKALLLELSDLGYRASAKKAQICRREVTYLGYSLRDGQRWLTEARKKTVVQIPAPTTAKQVREFLGKAGFCRLFIPGFATLAAPLYPLTKPKGEFSWAPEHQKAFDAIKKALLSAPALALPDVTKPFTLYVDERKGVARGVLTQTLGPWRRPVAYLSKKLDPVASGWPVCLKAIAAVAILVKDADKLTLGQNITVIAPHALENIVRQPPDRWMTNARMTHYQSLLLTERVTFAPPAALNPATLLPEETDEPVTHDCHQLLIEETGVRKDLTDIPLTGEVLTWFTDGSSYVVEGKRMAGAAVVDGTRTIWASSLPEGTSAQKAELMALTQALRLAEGKSINIYTDSRYAFATAHVHGAIYKQRGWLTSAGREIKNKEEILSLLEALHLPKRLAIIHCPGHQKAKDPISRGNQMADRVAKQAAQGVNLLPAGKRTADGSEFEKRTADGSEFESPKKKAKVE

SEQ ID NO: 69 - protein, 2086 aa, synthetic construct
MPAAKRVKLDGGDKKYSIGLDIGTNSVGWAVITDEYKVPSKKFKVLGNTDRHSIKKNLIGALLFDSGETAEATRLKRTARRRYTRRKNRICYLQEIFSNEMAKVDDSFFHRLEESFLVEEDKKHERHPIFGNIVDEVAYHEKYPTIYHLRKKLVDSTDKADLRLIYLALAHMIKFRGHFLIEGDLNPDNSDVDKLFIQLVQTYNQLFEENPINASGVDAKAILSARLSKSRRLENLIAQLPGEKKNGLFGNLIALSLGLTPNFKSNFDLAEDAKLQLSKDTYDDDLDNLLAQIGDQYADLFLAAKNLSDAILLSDILRVNTEITKAPLSASMIKRYDEHHQDLTLLKALVRQQLPEKYKEIFFDQSKNGYAGYIDGGASQEEFYKFIKPILEKMDGTEELLVKLNREDLLRKQRTFDNGSIPHQIHLGELHAILRRQEDFYPFLKDNREKIEKILTFRIPYYVGPLARGNSRFAWMTRKSEETITPWNFEEVVDKGASAQSFIERMTNFDKNLPNEKVLPKHSLLYEYFTVYNELTKVKYVTEGMRKPAFLSGEQKKAIVDLLFKTNRKVTVKQLKEDYFKKIECFDSVEISGVEDRFNASLGTYHDLLKIIKDKDFLDNEENEDILEDIVLTLTLFEDREMIEERLKTYAHLFDDKVMKQLKRRRYTGWGRLSRKLINGIRDKQSGKTILDFLKSDGFANRNFMQLIHDDSLTFKEDIQKAQVSGQGDSLHEHIANLAGSPAIKKGILQTVKVVDELVKVMGRHKPENIVIEMARENQTTQKGQKNSRERMKRIEEGIKELGSQILKEHPVENTQLQNEKLYLYYLQNGRDMYVDQELDINRLSDYDVDHIVPQSFLKDDSIDNKVLTRSDKARGKSDNVPSEEVVKKMKNYWRQLLNAKLITQRKFDNLTKAERGGLSELDKAGFIKRQLVETRQITKHVAQILDSRMNTKYDENDKLIREVKVITLKSKLVSDFRKDFQFYKVREINNYHHAHDAYLNAVVGTALIKKYPKLESEFVYGDYKVYDVRKMIAKSEQEIGKATAKYFFYSNIMNFFKTEITLANGEIRKRPLIETNGETGEIVWDKGRDFATVRKVLSMPQVNIVKKTEVQTGGFSKESILPKRNSDKLIARKKDWDPKKYGGFDSPTVAYSVLVVAKVEKGKSKKLKSVKELLGITIMERSSFEKNPIDFLEAKGYKEVKKDLIIKLPKYSLFELENGRKRMLASAGELQKGNELALPSKYVNFLYLASHYEKLKGSPEDNEQKQLFVEQHKHYLDEIIEQISEFSKRVILADANLDKVLSAYNKHRDKPIREQAENIIHLFTLTNLGAPAAFKYFDTTIDRKRYTSTKEVLDATLIHQSITGLYETRIDLSQLGGDGGGSSPAPGGSGGLDDEYRLYSPLVKPDQNIQFWLEQFPQAWAETAGMGLAKQVPPQVIQLKASATPVSVRQYPLSKEAQEGIRPHVQRLIQQGILVPVQSPWNTPLLPVRKPGTNDYRPVQDLREVNKRVQDIHPTVPNPYNLLCALPPQRSWYTVLDLKDAFFCLRLHPTSQPLFAFEWRDPGTGRTGQLTWTRLPQGFKNSPTIFNEALHRDLANFRIQHPQVTLLQYVDDLLLAGATKQDCLEGTKALLLELSDLGYRASAKKAQICRREVTYLGYSLRDGQRWLTEARKKTVVQIPAPTTAKQVREFLGKAGFCRLFIPGFATLAAPLYPLTKPKGEFSWAPEHQKAFDAIKKALLSAPALALPDVTKPFTLYVDERKGVARGVLTQTLGPWRRPVAYLSKKLDPVASGWPVCLKAIAAVAILVKDADKLTLGQNITVIAPHALENIVRQPPDRWMTNARMTHYQSLLLTERVTFAPPAALNPATLLPEETDEPVTHDCHQLLIEETGVRKDLTDIPLTGEVLTWFTDGSSYVVEGKRMAGAAVVDGTRTIWASSLPEGTSAQKAELMALTQALRLAEGKSINIYTDSRYAFATAHVHGAIYKQRGWLTSAGREIKNKEEILSLLEALHLPKRLAIIHCPGHQKAKDPISRGNQMADRVAKQAAQGVNLLPAGKRTADGSEFEKRTADGSEFESPKKKAKVE

SEQ ID NO: 70 - protein, 2082 aa, synthetic construct
MPAAKRVKLDGGDKKYSIGLDIGTNSVGWAVITDEYKVPSKKFKVLGNTDRHSIKKNLIGALLFDSGETAEATRLKRTARRRYTRRKNRICYLQEIFSNEMAKVDDSFFHRLEESFLVEEDKKHERHPIFGNIVDEVAYHEKYPTIYHLRKKLVDSTDKADLRLIYLALAHMIKFRGHFLIEGDLNPDNSDVDKLFIQLVQTYNQLFEENPINASGVDAKAILSARLSKSRRLENLIAQLPGEKKNGLFGNLIALSLGLTPNFKSNFDLAEDAKLQLSKDTYDDDLDNLLAQIGDQYADLFLAAKNLSDAILLSDILRVNTEITKAPLSASMIKRYDEHHQDLTLLKALVRQQLPEKYKEIFFDQSKNGYAGYIDGGASQEEFYKFIKPILEKMDGTEELLVKLNREDLLRKQRTFDNGSIPHQIHLGELHAILRRQEDFYPFLKDNREKIEKILTFRIPYYVGPLARGNSRFAWMTRKSEETITPWNFEEVVDKGASAQSFIERMTNFDKNLPNEKVLPKHSLLYEYFTVYNELTKVKYVTEGMRKPAFLSGEQKKAIVDLLFKTNRKVTVKQLKEDYFKKIECFDSVEISGVEDRFNASLGTYHDLLKIIKDKDFLDNEENEDILEDIVLTLTLFEDREMIEERLKTYAHLFDDKVMKQLKRRRYTGWGRLSRKLINGIRDKQSGKTILDFLKSDGFANRNFMQLIHDDSLTFKEDIQKAQVSGQGDSLHEHIANLAGSPAIKKGILQTVKVVDELVKVMGRHKPENIVIEMARENQTTQKGQKNSRERMKRIEEGIKELGSQILKEHPVENTQLQNEKLYLYYLQNGRDMYVDQELDINRLSDYDVDHIVPQSFLKDDSIDNKVLTRSDKARGKSDNVPSEEVVKKMKNYWRQLLNAKLITQRKFDNLTKAERGGLSELDKAGFIKRQLVETRQITKHVAQILDSRMNTKYDENDKLIREVKVITLKSKLVSDFRKDFQFYKVREINNYHHAHDAYLNAVVGTALIKKYPKLESEFVYGDYKVYDVRKMIAKSEQEIGKATAKYFFYSNIMNFFKTEITLANGEIRKRPLIETNGETGEIVWDKGRDFATVRKVLSMPQVNIVKKTEVQTGGFSKESILPKRNSDKLIARKKDWDPKKYGGFDSPTVAYSVLVVAKVEKGKSKKLKSVKELLGITIMERSSFEKNPIDFLEAKGYKEVKKDLIIKLPKYSLFELENGRKRMLASAGELQKGNELALPSKYVNFLYLASHYEKLKGSPEDNEQKQLFVEQHKHYLDEIIEQISEFSKRVILADANLDKVLSAYNKHRDKPIREQAENIIHLFTLTNLGAPAAFKYFDTTIDRKRYTSTKEVLDATLIHQSITGLYETRIDLSQLGGDGGGGGGGGGLDDEYRLYSPLVKPDQNIQFWLEQFPQAWAETAGMGLAKQVPPQVIQLKASATPVSVRQYPLSKEAQEGIRPHVQRLIQQGILVPVQSPWNTPLLPVRKPGTNDYRPVQDLREVNKRVQDIHPTVPNPYNLLCALPPQRSWYTVLDLKDAFFCLRLHPTSQPLFAFEWRDPGTGRTGQLTWTRLPQGFKNSPTIFNEALHRDLANFRIQHPQVTLLQYVDDLLLAGATKQDCLEGTKALLLELSDLGYRASAKKAQICRREVTYLGYSLRDGQRWLTEARKKTVVQIPAPTTAKQVREFLGKAGFCRLFIPGFATLAAPLYPLTKPKGEFSWAPEHQKAFDAIKKALLSAPALALPDVTKPFTLYVDERKGVARGVLTQTLGPWRRPVAYLSKKLDPVASGWPVCLKAIAAVAILVKDADKLTLGQNITVIAPHALENIVRQPPDRWMTNARMTHYQSLLLTERVTFAPPAALNPATLLPEETDEPVTHDCHQLLIEETGVRKDLTDIPLTGEVLTWFTDGSSYVVEGKRMAGAAVVDGTRTIWASSLPEGTSAQKAELMALTQALRLAEGKSINIYTDSRYAFATAHVHGAIYKQRGWLTSAGREIKNKEEILSLLEALHLPKRLAIIHCPGHQKAKDPISRGNQMADRVAKQAAQGVNLLPAGKRTADGSEFEKRTADGSEFESPKKKAKVE

SEQ ID NO: 71 - protein, 2088 aa, synthetic construct
MPAAKRVKLDGGDKKYSIGLDIGTNSVGWAVITDEYKVPSKKFKVLGNTDRHSIKKNLIGALLFDSGETAEATRLKRTARRRYTRRKNRICYLQEIFSNEMAKVDDSFFHRLEESFLVEEDKKHERHPIFGNIVDEVAYHEKYPTIYHLRKKLVDSTDKADLRLIYLALAHMIKFRGHFLIEGDLNPDNSDVDKLFIQLVQTYNQLFEENPINASGVDAKAILSARLSKSRRLENLIAQLPGEKKNGLFGNLIALSLGLTPNFKSNFDLAEDAKLQLSKDTYDDDLDNLLAQIGDQYADLFLAAKNLSDAILLSDILRVNTEITKAPLSASMIKRYDEHHQDLTLLKALVRQQLPEKYKEIFFDQSKNGYAGYIDGGASQEEFYKFIKPILEKMDGTEELLVKLNREDLLRKQRTFDNGSIPHQIHLGELHAILRRQEDFYPFLKDNREKIEKILTFRIPYYVGPLARGNSRFAWMTRKSEETITPWNFEEVVDKGASAQSFIERMTNFDKNLPNEKVLPKHSLLYEYFTVYNELTKVKYVTEGMRKPAFLSGEQKKAIVDLLFKTNRKVTVKQLKEDYFKKIECFDSVEISGVEDRFNASLGTYHDLLKIIKDKDFLDNEENEDILEDIVLTLTLFEDREMIEERLKTYAHLFDDKVMKQLKRRRYTGWGRLSRKLINGIRDKQSGKTILDFLKSDGFANRNFMQLIHDDSLTFKEDIQKAQVSGQGDSLHEHIANLAGSPAIKKGILQTVKVVDELVKVMGRHKPENIVIEMARENQTTQKGQKNSRERMKRIEEGIKELGSQILKEHPVENTQLQNEKLYLYYLQNGRDMYVDQELDINRLSDYDVDHIVPQSFLKDDSIDNKVLTRSDKARGKSDNVPSEEVVKKMKNYWRQLLNAKLITQRKFDNLTKAERGGLSELDKAGFIKRQLVETRQITKHVAQILDSRMNTKYDENDKLIREVKVITLKSKLVSDFRKDFQFYKVREINNYHHAHDAYLNAVVGTALIKKYPKLESEFVYGDYKVYDVRKMIAKSEQEIGKATAKYFFYSNIMNFFKTEITLANGEIRKRPLIETNGETGEIVWDKGRDFATVRKVLSMPQVNIVKKTEVQTGGFSKESILPKRNSDKLIARKKDWDPKKYGGFDSPTVAYSVLVVAKVEKGKSKKLKSVKELLGITIMERSSFEKNPIDFLEAKGYKEVKKDLIIKLPKYSLFELENGRKRMLASAGELQKGNELALPSKYVNFLYLASHYEKLKGSPEDNEQKQLFVEQHKHYLDEIIEQISEFSKRVILADANLDKVLSAYNKHRDKPIREQAENIIHLFTLTNLGAPAAFKYFDTTIDRKRYTSTKEVLDATLIHQSITGLYETRIDLSQLGGDGGEAAAKGGSGSSGGLDDEYRLYSPLVKPDQNIQFWLEQFPQAWAETAGMGLAKQVPPQVIQLKASATPVSVRQYPLSKEAQEGIRPHVQRLIQQGILVPVQSPWNTPLLPVRKPGTNDYRPVQDLREVNKRVQDIHPTVPNPYNLLCALPPQRSWYTVLDLKDAFFCLRLHPTSQPLFAFEWRDPGTGRTGQLTWTRLPQGFKNSPTIFNEALHRDLANFRIQHPQVTLLQYVDDLLLAGATKQDCLEGTKALLLELSDLGYRASAKKAQICRREVTYLGYSLRDGQRWLTEARKKTVVQIPAPTTAKQVREFLGKAGFCRLFIPGFATLAAPLYPLTKPKGEFSWAPEHQKAFDAIKKALLSAPALALPDVTKPFTLYVDERKGVARGVLTQTLGPWRRPVAYLSKKLDPVASGWPVCLKAIAAVAILVKDADKLTLGQNITVIAPHALENIVRQPPDRWMTNARMTHYQSLLLTERVTFAPPAALNPATLLPEETDEPVTHDCHQLLIEETGVRKDLTDIPLTGEVLTWFTDGSSYVVEGKRMAGAAVVDGTRTIWASSLPEGTSAQKAELMALTQALRLAEGKSINIYTDSRYAFATAHVHGAIYKQRGWLTSAGREIKNKEEILSLLEALHLPKRLAIIHCPGHQKAKDPISRGNQMADRVAKQAAQGVNLLPAGKRTADGSEFEKRTADGSEFESPKKKAKVE

SEQ ID NO: 72 - protein, 2088 aa, synthetic construct
MPAAKRVKLDGGDKKYSIGLDIGTNSVGWAVITDEYKVPSKKFKVLGNTDRHSIKKNLIGALLFDSGETAEATRLKRTARRRYTRRKNRICYLQEIFSNEMAKVDDSFFHRLEESFLVEEDKKHERHPIFGNIVDEVAYHEKYPTIYHLRKKLVDSTDKADLRLIYLALAHMIKFRGHFLIEGDLNPDNSDVDKLFIQLVQTYNQLFEENPINASGVDAKAILSARLSKSRRLENLIAQLPGEKKNGLFGNLIALSLGLTPNFKSNFDLAEDAKLQLSKDTYDDDLDNLLAQIGDQYADLFLAAKNLSDAILLSDILRVNTEITKAPLSASMIKRYDEHHQDLTLLKALVRQQLPEKYKEIFFDQSKNGYAGYIDGGASQEEFYKFIKPILEKMDGTEELLVKLNREDLLRKQRTFDNGSIPHQIHLGELHAILRRQEDFYPFLKDNREKIEKILTFRIPYYVGPLARGNSRFAWMTRKSEETITPWNFEEVVDKGASAQSFIERMTNFDKNLPNEKVLPKHSLLYEYFTVYNELTKVKYVTEGMRKPAFLSGEQKKAIVDLLFKTNRKVTVKQLKEDYFKKIECFDSVEISGVEDRFNASLGTYHDLLKIIKDKDFLDNEENEDILEDIVLTLTLFEDREMIEERLKTYAHLFDDKVMKQLKRRRYTGWGRLSRKLINGIRDKQSGKTILDFLKSDGFANRNFMQLIHDDSLTFKEDIQKAQVSGQGDSLHEHIANLAGSPAIKKGILQTVKVVDELVKVMGRHKPENIVIEMARENQTTQKGQKNSRERMKRIEEGIKELGSQILKEHPVENTQLQNEKLYLYYLQNGRDMYVDQELDINRLSDYDVDHIVPQSFLKDDSIDNKVLTRSDKARGKSDNVPSEEVVKKMKNYWRQLLNAKLITQRKFDNLTKAERGGLSELDKAGFIKRQLVETRQITKHVAQILDSRMNTKYDENDKLIREVKVITLKSKLVSDFRKDFQFYKVREINNYHHAHDAYLNAVVGTALIKKYPKLESEFVYGDYKVYDVRKMIAKSEQEIGKATAKYFFYSNIMNFFKTEITLANGEIRKRPLIETNGETGEIVWDKGRDFATVRKVLSMPQVNIVKKTEVQTGGFSKESILPKRNSDKLIARKKDWDPKKYGGFDSPTVAYSVLVVAKVEKGKSKKLKSVKELLGITIMERSSFEKNPIDFLEAKGYKEVKKDLIIKLPKYSLFELENGRKRMLASAGELQKGNELALPSKYVNFLYLASHYEKLKGSPEDNEQKQLFVEQHKHYLDEIIEQISEFSKRVILADANLDKVLSAYNKHRDKPIREQAENIIHLFTLTNLGAPAAFKYFDTTIDRKRYTSTKEVLDATLIHQSITGLYETRIDLSQLGGDGGEAAAKGGSGGGGGLDDEYRLYSPLVKPDQNIQFWLEQFPQAWAETAGMGLAKQVPPQVIQLKASATPVSVRQYPLSKEAQEGIRPHVQRLIQQGILVPVQSPWNTPLLPVRKPGTNDYRPVQDLREVNKRVQDIHPTVPNPYNLLCALPPQRSWYTVLDLKDAFFCLRLHPTSQPLFAFEWRDPGTGRTGQLTWTRLPQGFKNSPTIFNEALHRDLANFRIQHPQVTLLQYVDDLLLAGATKQDCLEGTKALLLELSDLGYRASAKKAQICRREVTYLGYSLRDGQRWLTEARKKTVVQIPAPTTAKQVREFLGKAGFCRLFIPGFATLAAPLYPLTKPKGEFSWAPEHQKAFDAIKKALLSAPALALPDVTKPFTLYVDERKGVARGVLTQTLGPWRRPVAYLSKKLDPVASGWPVCLKAIAAVAILVKDADKLTLGQNITVIAPHALENIVRQPPDRWMTNARMTHYQSLLLTERVTFAPPAALNPATLLPEETDEPVTHDCHQLLIEETGVRKDLTDIPLTGEVLTWFTDGSSYVVEGKRMAGAAVVDGTRTIWASSLPEGTSAQKAELMALTQALRLAEGKSINIYTDSRYAFATAHVHGAIYKQRGWLTSAGREIKNKEEILSLLEALHLPKRLAIIHCPGHQKAKDPISRGNQMADRVAKQAAQGVNLLPAGKRTADGSEFEKRTADGSEFESPKKKAKVE

SEQ ID NO: 73 - protein, 2086 aa, synthetic construct
MPAAKRVKLDGGDKKYSIGLDIGTNSVGWAVITDEYKVPSKKFKVLGNTDRHSIKKNLIGALLFDSGETAEATRLKRTARRRYTRRKNRICYLQEIFSNEMAKVDDSFFHRLEESFLVEEDKKHERHPIFGNIVDEVAYHEKYPTIYHLRKKLVDSTDKADLRLIYLALAHMIKFRGHFLIEGDLNPDNSDVDKLFIQLVQTYNQLFEENPINASGVDAKAILSARLSKSRRLENLIAQLPGEKKNGLFGNLIALSLGLTPNFKSNFDLAEDAKLQLSKDTYDDDLDNLLAQIGDQYADLFLAAKNLSDAILLSDILRVNTEITKAPLSASMIKRYDEHHQDLTLLKALVRQQLPEKYKEIFFDQSKNGYAGYIDGGASQEEFYKFIKPILEKMDGTEELLVKLNREDLLRKQRTFDNGSIPHQIHLGELHAILRRQEDFYPFLKDNREKIEKILTFRIPYYVGPLARGNSRFAWMTRKSEETITPWNFEEVVDKGASAQSFIERMTNFDKNLPNEKVLPKHSLLYEYFTVYNELTKVKYVTEGMRKPAFLSGEQKKAIVDLLFKTNRKVTVKQLKEDYFKKIECFDSVEISGVEDRFNASLGTYHDLLKIIKDKDFLDNEENEDILEDIVLTLTLFEDREMIEERLKTYAHLFDDKVMKQLKRRRYTGWGRLSRKLINGIRDKQSGKTILDFLKSDGFANRNFMQLIHDDSLTFKEDIQKAQVSGQGDSLHEHIANLAGSPAIKKGILQTVKVVDELVKVMGRHKPENIVIEMARENQTTQKGQKNSRERMKRIEEGIKELGSQILKEHPVENTQLQNEKLYLYYLQNGRDMYVDQELDINRLSDYDVDHIVPQSFLKDDSIDNKVLTRSDKARGKSDNVPSEEVVKKMKNYWRQLLNAKLITQRKFDNLTKAERGGLSELDKAGFIKRQLVETRQITKHVAQILDSRMNTKYDENDKLIREVKVITLKSKLVSDFRKDFQFYKVREINNYHHAHDAYLNAVVGTALIKKYPKLESEFVYGDYKVYDVRKMIAKSEQEIGKATAKYFFYSNIMNFFKTEITLANGEIRKRPLIETNGETGEIVWDKGRDFATVRKVLSMPQVNIVKKTEVQTGGFSKESILPKRNSDKLIARKKDWDPKKYGGFDSPTVAYSVLVVAKVEKGKSKKLKSVKELLGITIMERSSFEKNPIDFLEAKGYKEVKKDLIIKLPKYSLFELENGRKRMLASAGELQKGNELALPSKYVNFLYLASHYEKLKGSPEDNEQKQLFVEQHKHYLDEIIEQISEFSKRVILADANLDKVLSAYNKHRDKPIREQAENIIHLFTLTNLGAPAAFKYFDTTIDRKRYTSTKEVLDATLIHQSITGLYETRIDLSQLGGDGGGSSPAPGGGGGLDDEYRLYSPLVKPDQNIQFWLEQFPQAWAETAGMGLAKQVPPQVIQLKASATPVSVRQYPLSKEAQEGIRPHVQRLIQQGILVPVQSPWNTPLLPVRKPGTNDYRPVQDLREVNKRVQDIHPTVPNPYNLLCALPPQRSWYTVLDLKDAFFCLRLHPTSQPLFAFEWRDPGTGRTGQLTWTRLPQGFKNSPTIFNEALHRDLANFRIQHPQVTLLQYVDDLLLAGATKQDCLEGTKALLLELSDLGYRASAKKAQICRREVTYLGYSLRDGQRWLTEARKKTVVQIPAPTTAKQVREFLGKAGFCRLFIPGFATLAAPLYPLTKPKGEFSWAPEHQKAFDAIKKALLSAPALALPDVTKPFTLYVDERKGVARGVLTQTLGPWRRPVAYLSKKLDPVASGWPVCLKAIAAVAILVKDADKLTLGQNITVIAPHALENIVRQPPDRWMTNARMTHYQSLLLTERVTFAPPAALNPATLLPEETDEPVTHDCHQLLIEETGVRKDLTDIPLTGEVLTWFTDGSSYVVEGKRMAGAAVVDGTRTIWASSLPEGTSAQKAELMALTQALRLAEGKSINIYTDSRYAFATAHVHGAIYKQRGWLTSAGREIKNKEEILSLLEALHLPKRLAIIHCPGHQKAKDPISRGNQMADRVAKQAAQGVNLLPAGKRTADGSEFEKRTADGSEFESPKKKAKVE

SEQ ID NO: 74 - protein, 2089 aa, synthetic construct
MPAAKRVKLDGGDKKYSIGLDIGTNSVGWAVITDEYKVPSKKFKVLGNTDRHSIKKNLIGALLFDSGETAEATRLKRTARRRYTRRKNRICYLQEIFSNEMAKVDDSFFHRLEESFLVEEDKKHERHPIFGNIVDEVAYHEKYPTIYHLRKKLVDSTDKADLRLIYLALAHMIKFRGHFLIEGDLNPDNSDVDKLFIQLVQTYNQLFEENPINASGVDAKAILSARLSKSRRLENLIAQLPGEKKNGLFGNLIALSLGLTPNFKSNFDLAEDAKLQLSKDTYDDDLDNLLAQIGDQYADLFLAAKNLSDAILLSDILRVNTEITKAPLSASMIKRYDEHHQDLTLLKALVRQQLPEKYKEIFFDQSKNGYAGYIDGGASQEEFYKFIKPILEKMDGTEELLVKLNREDLLRKQRTFDNGSIPHQIHLGELHAILRRQEDFYPFLKDNREKIEKILTFRIPYYVGPLARGNSRFAWMTRKSEETITPWNFEEVVDKGASAQSFIERMTNFDKNLPNEKVLPKHSLLYEYFTVYNELTKVKYVTEGMRKPAFLSGEQKKAIVDLLFKTNRKVTVKQLKEDYFKKIECFDSVEISGVEDRFNASLGTYHDLLKIIKDKDFLDNEENEDILEDIVLTLTLFEDREMIEERLKTYAHLFDDKVMKQLKRRRYTGWGRLSRKLINGIRDKQSGKTILDFLKSDGFANRNFMQLIHDDSLTFKEDIQKAQVSGQGDSLHEHIANLAGSPAIKKGILQTVKVVDELVKVMGRHKPENIVIEMARENQTTQKGQKNSRERMKRIEEGIKELGSQILKEHPVENTQLQNEKLYLYYLQNGRDMYVDQELDINRLSDYDVDHIVPQSFLKDDSIDNKVLTRSDKARGKSDNVPSEEVVKKMKNYWRQLLNAKLITQRKFDNLTKAERGGLSELDKAGFIKRQLVETRQITKHVAQILDSRMNTKYDENDKLIREVKVITLKSKLVSDFRKDFQFYKVREINNYHHAHDAYLNAVVGTALIKKYPKLESEFVYGDYKVYDVRKMIAKSEQEIGKATAKYFFYSNIMNFFKTEITLANGEIRKRPLIETNGETGEIVWDKGRDFATVRKVLSMPQVNIVKKTEVQTGGFSKESILPKRNSDKLIARKKDWDPKKYGGFDSPTVAYSVLVVAKVEKGKSKKLKSVKELLGITIMERSSFEKNPIDFLEAKGYKEVKKDLIIKLPKYSLFELENGRKRMLASAGELQKGNELALPSKYVNFLYLASHYEKLKGSPEDNEQKQLFVEQHKHYLDEIIEQISEFSKRVILADANLDKVLSAYNKHRDKPIREQAENIIHLFTLTNLGAPAAFKYFDTTIDRKRYTSTKEVLDATLIHQSITGLYETRIDLSQLGGDGGGSAGSAAGSGEFGGLDDEYRLYSPLVKPDQNIQFWLEQFPQAWAETAGMGLAKQVPPQVIQLKASATPVSVRQYPLSKEAQEGIRPHVQRLIQQGILVPVQSPWNTPLLPVRKPGTNDYRPVQDLREVNKRVQDIHPTVPNPYNLLCALPPQRSWYTVLDLKDAFFCLRLHPTSQPLFAFEWRDPGTGRTGQLTWTRLPQGFKNSPTIFNEALHRDLANFRIQHPQVTLLQYVDDLLLAGATKQDCLEGTKALLLELSDLGYRASAKKAQICRREVTYLGYSLRDGQRWLTEARKKTVVQIPAPTTAKQVREFLGKAGFCRLFIPGFATLAAPLYPLTKPKGEFSWAPEHQKAFDAIKKALLSAPALALPDVTKPFTLYVDERKGVARGVLTQTLGPWRRPVAYLSKKLDPVASGWPVCLKAIAAVAILVKDADKLTLGQNITVIAPHALENIVRQPPDRWMTNARMTHYQSLLLTERVTFAPPAALNPATLLPEETDEPVTHDCHQLLIEETGVRKDLTDIPLTGEVLTWFTDGSSYVVEGKRMAGAAVVDGTRTIWASSLPEGTSAQKAELMALTQALRLAEGKSINIYTDSRYAFATAHVHGAIYKQRGWLTSAGREIKNKEEILSLLEALHLPKRLAIIHCPGHQKAKDPISRGNQMADRVAKQAAQGVNLLPAGKRTADGSEFEKRTADGSEFESPKKKAKVE

SEQ ID NO: 75 - protein, 2092 aa, synthetic construct
MPAAKRVKLDGGDKKYSIGLDIGTNSVGWAVITDEYKVPSKKFKVLGNTDRHSIKKNLIGALLFDSGETAEATRLKRTARRRYTRRKNRICYLQEIFSNEMAKVDDSFFHRLEESFLVEEDKKHERHPIFGNIVDEVAYHEKYPTIYHLRKKLVDSTDKADLRLIYLALAHMIKFRGHFLIEGDLNPDNSDVDKLFIQLVQTYNQLFEENPINASGVDAKAILSARLSKSRRLENLIAQLPGEKKNGLFGNLIALSLGLTPNFKSNFDLAEDAKLQLSKDTYDDDLDNLLAQIGDQYADLFLAAKNLSDAILLSDILRVNTEITKAPLSASMIKRYDEHHQDLTLLKALVRQQLPEKYKEIFFDQSKNGYAGYIDGGASQEEFYKFIKPILEKMDGTEELLVKLNREDLLRKQRTFDNGSIPHQIHLGELHAILRRQEDFYPFLKDNREKIEKILTFRIPYYVGPLARGNSRFAWMTRKSEETITPWNFEEVVDKGASAQSFIERMTNFDKNLPNEKVLPKHSLLYEYFTVYNELTKVKYVTEGMRKPAFLSGEQKKAIVDLLFKTNRKVTVKQLKEDYFKKIECFDSVEISGVEDRFNASLGTYHDLLKIIKDKDFLDNEENEDILEDIVLTLTLFEDREMIEERLKTYAHLFDDKVMKQLKRRRYTGWGRLSRKLINGIRDKQSGKTILDFLKSDGFANRNFMQLIHDDSLTFKEDIQKAQVSGQGDSLHEHIANLAGSPAIKKGILQTVKVVDELVKVMGRHKPENIVIEMARENQTTQKGQKNSRERMKRIEEGIKELGSQILKEHPVENTQLQNEKLYLYYLQNGRDMYVDQELDINRLSDYDVDHIVPQSFLKDDSIDNKVLTRSDKARGKSDNVPSEEVVKKMKNYWRQLLNAKLITQRKFDNLTKAERGGLSELDKAGFIKRQLVETRQITKHVAQILDSRMNTKYDENDKLIREVKVITLKSKLVSDFRKDFQFYKVREINNYHHAHDAYLNAVVGTALIKKYPKLESEFVYGDYKVYDVRKMIAKSEQEIGKATAKYFFYSNIMNFFKTEITLANGEIRKRPLIETNGETGEIVWDKGRDFATVRKVLSMPQVNIVKKTEVQTGGFSKESILPKRNSDKLIARKKDWDPKKYGGFDSPTVAYSVLVVAKVEKGKSKKLKSVKELLGITIMERSSFEKNPIDFLEAKGYKEVKKDLIIKLPKYSLFELENGRKRMLASAGELQKGNELALPSKYVNFLYLASHYEKLKGSPEDNEQKQLFVEQHKHYLDEIIEQISEFSKRVILADANLDKVLSAYNKHRDKPIREQAENIIHLFTLTNLGAPAAFKYFDTTIDRKRYTSTKEVLDATLIHQSITGLYETRIDLSQLGGDGGGGGGSEAAAKGGGGSGGLDDEYRLYSPLVKPDQNIQFWLEQFPQAWAETAGMGLAKQVPPQVIQLKASATPVSVRQYPLSKEAQEGIRPHVQRLIQQGILVPVQSPWNTPLLPVRKPGTNDYRPVQDLREVNKRVQDIHPTVPNPYNLLCALPPQRSWYTVLDLKDAFFCLRLHPTSQPLFAFEWRDPGTGRTGQLTWTRLPQGFKNSPTIFNEALHRDLANFRIQHPQVTLLQYVDDLLLAGATKQDCLEGTKALLLELSDLGYRASAKKAQICRREVTYLGYSLRDGQRWLTEARKKTVVQIPAPTTAKQVREFLGKAGFCRLFIPGFATLAAPLYPLTKPKGEFSWAPEHQKAFDAIKKALLSAPALALPDVTKPFTLYVDERKGVARGVLTQTLGPWRRPVAYLSKKLDPVASGWPVCLKAIAAVAILVKDADKLTLGQNITVIAPHALENIVRQPPDRWMTNARMTHYQSLLLTERVTFAPPAALNPATLLPEETDEPVTHDCHQLLIEETGVRKDLTDIPLTGEVLTWFTDGSSYVVEGKRMAGAAVVDGTRTIWASSLPEGTSAQKAELMALTQALRLAEGKSINIYTDSRYAFATAHVHGAIYKQRGWLTSAGREIKNKEEILSLLEALHLPKRLAIIHCPGHQKAKDPISRGNQMADRVAKQAAQGVNLLPAGKRTADGSEFEKRTADGSEFESPKKKAKVE

SEQ ID NO: 76 - protein, 2083 aa, synthetic construct
MPAAKRVKLDGGDKKYSIGLDIGTNSVGWAVITDEYKVPSKKFKVLGNTDRHSIKKNLIGALLFDSGETAEATRLKRTARRRYTRRKNRICYLQEIFSNEMAKVDDSFFHRLEESFLVEEDKKHERHPIFGNIVDEVAYHEKYPTIYHLRKKLVDSTDKADLRLIYLALAHMIKFRGHFLIEGDLNPDNSDVDKLFIQLVQTYNQLFEENPINASGVDAKAILSARLSKSRRLENLIAQLPGEKKNGLFGNLIALSLGLTPNFKSNFDLAEDAKLQLSKDTYDDDLDNLLAQIGDQYADLFLAAKNLSDAILLSDILRVNTEITKAPLSASMIKRYDEHHQDLTLLKALVRQQLPEKYKEIFFDQSKNGYAGYIDGGASQEEFYKFIKPILEKMDGTEELLVKLNREDLLRKQRTFDNGSIPHQIHLGELHAILRRQEDFYPFLKDNREKIEKILTFRIPYYVGPLARGNSRFAWMTRKSEETITPWNFEEVVDKGASAQSFIERMTNFDKNLPNEKVLPKHSLLYEYFTVYNELTKVKYVTEGMRKPAFLSGEQKKAIVDLLFKTNRKVTVKQLKEDYFKKIECFDSVEISGVEDRFNASLGTYHDLLKIIKDKDFLDNEENEDILEDIVLTLTLFEDREMIEERLKTYAHLFDDKVMKQLKRRRYTGWGRLSRKLINGIRDKQSGKTILDFLKSDGFANRNFMQLIHDDSLTFKEDIQKAQVSGQGDSLHEHIANLAGSPAIKKGILQTVKVVDELVKVMGRHKPENIVIEMARENQTTQKGQKNSRERMKRIEEGIKELGSQILKEHPVENTQLQNEKLYLYYLQNGRDMYVDQELDINRLSDYDVDHIVPQSFLKDDSIDNKVLTRSDKARGKSDNVPSEEVVKKMKNYWRQLLNAKLITQRKFDNLTKAERGGLSELDKAGFIKRQLVETRQITKHVAQILDSRMNTKYDENDKLIREVKVITLKSKLVSDFRKDFQFYKVREINNYHHAHDAYLNAVVGTALIKKYPKLESEFVYGDYKVYDVRKMIAKSEQEIGKATAKYFFYSNIMNFFKTEITLANGEIRKRPLIETNGETGEIVWDKGRDFATVRKVLSMPQVNIVKKTEVQTGGFSKESILPKRNSDKLIARKKDWDPKKYGGFDSPTVAYSVLVVAKVEKGKSKKLKSVKELLGITIMERSSFEKNPIDFLEAKGYKEVKKDLIIKLPKYSLFELENGRKRMLASAGELQKGNELALPSKYVNFLYLASHYEKLKGSPEDNEQKQLFVEQHKHYLDEIIEQISEFSKRVILADANLDKVLSAYNKHRDKPIREQAENIIHLFTLTNLGAPAAFKYFDTTIDRKRYTSTKEVLDATLIHQSITGLYETRIDLSQLGGDGGGGGPAPGGLDDEYRLYSPLVKPDQNIQFWLEQFPQAWAETAGMGLAKQVPPQVIQLKASATPVSVRQYPLSKEAQEGIRPHVQRLIQQGILVPVQSPWNTPLLPVRKPGTNDYRPVQDLREVNKRVQDIHPTVPNPYNLLCALPPQRSWYTVLDLKDAFFCLRLHPTSQPLFAFEWRDPGTGRTGQLTWTRLPQGFKNSPTIFNEALHRDLANFRIQHPQVTLLQYVDDLLLAGATKQDCLEGTKALLLELSDLGYRASAKKAQICRREVTYLGYSLRDGQRWLTEARKKTVVQIPAPTTAKQVREFLGKAGFCRLFIPGFATLAAPLYPLTKPKGEFSWAPEHQKAFDAIKKALLSAPALALPDVTKPFTLYVDERKGVARGVLTQTLGPWRRPVAYLSKKLDPVASGWPVCLKAIAAVAILVKDADKLTLGQNITVIAPHALENIVRQPPDRWMTNARMTHYQSLLLTERVTFAPPAALNPATLLPEETDEPVTHDCHQLLIEETGVRKDLTDIPLTGEVLTWFTDGSSYVVEGKRMAGAAVVDGTRTIWASSLPEGTSAQKAELMALTQALRLAEGKSINIYTDSRYAFATAHVHGAIYKQRGWLTSAGREIKNKEEILSLLEALHLPKRLAIIHCPGHQKAKDPISRGNQMADRVAKQAAQGVNLLPAGKRTADGSEFEKRTADGSEFESPKKKAKVE

SEQ ID NO: 77 - protein, 2084 aa, synthetic construct
MPAAKRVKLDGGDKKYSIGLDIGTNSVGWAVITDEYKVPSKKFKVLGNTDRHSIKKNLIGALLFDSGETAEATRLKRTARRRYTRRKNRICYLQEIFSNEMAKVDDSFFHRLEESFLVEEDKKHERHPIFGNIVDEVAYHEKYPTIYHLRKKLVDSTDKADLRLIYLALAHMIKFRGHFLIEGDLNPDNSDVDKLFIQLVQTYNQLFEENPINASGVDAKAILSARLSKSRRLENLIAQLPGEKKNGLFGNLIALSLGLTPNFKSNFDLAEDAKLQLSKDTYDDDLDNLLAQIGDQYADLFLAAKNLSDAILLSDILRVNTEITKAPLSASMIKRYDEHHQDLTLLKALVRQQLPEKYKEIFFDQSKNGYAGYIDGGASQEEFYKFIKPILEKMDGTEELLVKLNREDLLRKQRTFDNGSIPHQIHLGELHAILRRQEDFYPFLKDNREKIEKILTFRIPYYVGPLARGNSRFAWMTRKSEETITPWNFEEVVDKGASAQSFIERMTNFDKNLPNEKVLPKHSLLYEYFTVYNELTKVKYVTEGMRKPAFLSGEQKKAIVDLLFKTNRKVTVKQLKEDYFKKIECFDSVEISGVEDRFNASLGTYHDLLKIIKDKDFLDNEENEDILEDIVLTLTLFEDREMIEERLKTYAHLFDDKVMKQLKRRRYTGWGRLSRKLINGIRDKQSGKTILDFLKSDGFANRNFMQLIHDDSLTFKEDIQKAQVSGQGDSLHEHIANLAGSPAIKKGILQTVKVVDELVKVMGRHKPENIVIEMARENQTTQKGQKNSRERMKRIEEGIKELGSQILKEHPVENTQLQNEKLYLYYLQNGRDMYVDQELDINRLSDYDVDHIVPQSFLKDDSIDNKVLTRSDKARGKSDNVPSEEVVKKMKNYWRQLLNAKLITQRKFDNLTKAERGGLSELDKAGFIKRQLVETRQITKHVAQILDSRMNTKYDENDKLIREVKVITLKSKLVSDFRKDFQFYKVREINNYHHAHDAYLNAVVGTALIKKYPKLESEFVYGDYKVYDVRKMIAKSEQEIGKATAKYFFYSNIMNFFKTEITLANGEIRKRPLIETNGETGEIVWDKGRDFATVRKVLSMPQVNIVKKTEVQTGGFSKESILPKRNSDKLIARKKDWDPKKYGGFDSPTVAYSVLVVAKVEKGKSKKLKSVKELLGITIMERSSFEKNPIDFLEAKGYKEVKKDLIIKLPKYSLFELENGRKRMLASAGELQKGNELALPSKYVNFLYLASHYEKLKGSPEDNEQKQLFVEQHKHYLDEIIEQISEFSKRVILADANLDKVLSAYNKHRDKPIREQAENIIHLFTLTNLGAPAAFKYFDTTIDRKRYTSTKEVLDATLIHQSITGLYETRIDLSQLGGDGGGGGGGGGGGLDDEYRLYSPLVKPDQNIQFWLEQFPQAWAETAGMGLAKQVPPQVIQLKASATPVSVRQYPLSKEAQEGIRPHVQRLIQQGILVPVQSPWNTPLLPVRKPGTNDYRPVQDLREVNKRVQDIHPTVPNPYNLLCALPPQRSWYTVLDLKDAFFCLRLHPTSQPLFAFEWRDPGTGRTGQLTWTRLPQGFKNSPTIFNEALHRDLANFRIQHPQVTLLQYVDDLLLAGATKQDCLEGTKALLLELSDLGYRASAKKAQICRREVTYLGYSLRDGQRWLTEARKKTVVQIPAPTTAKQVREFLGKAGFCRLFIPGFATLAAPLYPLTKPKGEFSWAPEHQKAFDAIKKALLSAPALALPDVTKPFTLYVDERKGVARGVLTQTLGPWRRPVAYLSKKLDPVASGWPVCLKAIAAVAILVKDADKLTLGQNITVIAPHALENIVRQPPDRWMTNARMTHYQSLLLTERVTFAPPAALNPATLLPEETDEPVTHDCHQLLIEETGVRKDLTDIPLTGEVLTWFTDGSSYVVEGKRMAGAAVVDGTRTIWASSLPEGTSAQKAELMALTQALRLAEGKSINIYTDSRYAFATAHVHGAIYKQRGWLTSAGREIKNKEEILSLLEALHLPKRLAIIHCPGHQKAKDPISRGNQMADRVAKQAAQGVNLLPAGKRTADGSEFEKRTADGSEFESPKKKAKVE

SEQ ID NO: 78 - protein, 2083 aa, synthetic construct
MPAAKRVKLDGGDKKYSIGLDIGTNSVGWAVITDEYKVPSKKFKVLGNTDRHSIKKNLIGALLFDSGETAEATRLKRTARRRYTRRKNRICYLQEIFSNEMAKVDDSFFHRLEESFLVEEDKKHERHPIFGNIVDEVAYHEKYPTIYHLRKKLVDSTDKADLRLIYLALAHMIKFRGHFLIEGDLNPDNSDVDKLFIQLVQTYNQLFEENPINASGVDAKAILSARLSKSRRLENLIAQLPGEKKNGLFGNLIALSLGLTPNFKSNFDLAEDAKLQLSKDTYDDDLDNLLAQIGDQYADLFLAAKNLSDAILLSDILRVNTEITKAPLSASMIKRYDEHHQDLTLLKALVRQQLPEKYKEIFFDQSKNGYAGYIDGGASQEEFYKFIKPILEKMDGTEELLVKLNREDLLRKQRTFDNGSIPHQIHLGELHAILRRQEDFYPFLKDNREKIEKILTFRIPYYVGPLARGNSRFAWMTRKSEETITPWNFEEVVDKGASAQSFIERMTNFDKNLPNEKVLPKHSLLYEYFTVYNELTKVKYVTEGMRKPAFLSGEQKKAIVDLLFKTNRKVTVKQLKEDYFKKIECFDSVEISGVEDRFNASLGTYHDLLKIIKDKDFLDNEENEDILEDIVLTLTLFEDREMIEERLKTYAHLFDDKVMKQLKRRRYTGWGRLSRKLINGIRDKQSGKTILDFLKSDGFANRNFMQLIHDDSLTFKEDIQKAQVSGQGDSLHEHIANLAGSPAIKKGILQTVKVVDELVKVMGRHKPENIVIEMARENQTTQKGQKNSRERMKRIEEGIKELGSQILKEHPVENTQLQNEKLYLYYLQNGRDMYVDQELDINRLSDYDVDHIVPQSFLKDDSIDNKVLTRSDKARGKSDNVPSEEVVKKMKNYWRQLLNAKLITQRKFDNLTKAERGGLSELDKAGFIKRQLVETRQITKHVAQILDSRMNTKYDENDKLIREVKVITLKSKLVSDFRKDFQFYKVREINNYHHAHDAYLNAVVGTALIKKYPKLESEFVYGDYKVYDVRKMIAKSEQEIGKATAKYFFYSNIMNFFKTEITLANGEIRKRPLIETNGETGEIVWDKGRDFATVRKVLSMPQVNIVKKTEVQTGGFSKESILPKRNSDKLIARKKDWDPKKYGGFDSPTVAYSVLVVAKVEKGKSKKLKSVKELLGITIMERSSFEKNPIDFLEAKGYKEVKKDLIIKLPKYSLFELENGRKRMLASAGELQKGNELALPSKYVNFLYLASHYEKLKGSPEDNEQKQLFVEQHKHYLDEIIEQISEFSKRVILADANLDKVLSAYNKHRDKPIREQAENIIHLFTLTNLGAPAAFKYFDTTIDRKRYTSTKEVLDATLIHQSITGLYETRIDLSQLGGDGGGGSPAPGGLDDEYRLYSPLVKPDQNIQFWLEQFPQAWAETAGMGLAKQVPPQVIQLKASATPVSVRQYPLSKEAQEGIRPHVQRLIQQGILVPVQSPWNTPLLPVRKPGTNDYRPVQDLREVNKRVQDIHPTVPNPYNLLCALPPQRSWYTVLDLKDAFFCLRLHPTSQPLFAFEWRDPGTGRTGQLTWTRLPQGFKNSPTIFNEALHRDLANFRIQHPQVTLLQYVDDLLLAGATKQDCLEGTKALLLELSDLGYRASAKKAQICRREVTYLGYSLRDGQRWLTEARKKTVVQIPAPTTAKQVREFLGKAGFCRLFIPGFATLAAPLYPLTKPKGEFSWAPEHQKAFDAIKKALLSAPALALPDVTKPFTLYVDERKGVARGVLTQTLGPWRRPVAYLSKKLDPVASGWPVCLKAIAAVAILVKDADKLTLGQNITVIAPHALENIVRQPPDRWMTNARMTHYQSLLLTERVTFAPPAALNPATLLPEETDEPVTHDCHQLLIEETGVRKDLTDIPLTGEVLTWFTDGSSYVVEGKRMAGAAVVDGTRTIWASSLPEGTSAQKAELMALTQALRLAEGKSINIYTDSRYAFATAHVHGAIYKQRGWLTSAGREIKNKEEILSLLEALHLPKRLAIIHCPGHQKAKDPISRGNQMADRVAKQAAQGVNLLPAGKRTADGSEFEKRTADGSEFESPKKKAKVE

SEQ ID NO: 79 - protein, 2083 aa, synthetic construct
MPAAKRVKLDGGDKKYSIGLDIGTNSVGWAVITDEYKVPSKKFKVLGNTDRHSIKKNLIGALLFDSGETAEATRLKRTARRRYTRRKNRICYLQEIFSNEMAKVDDSFFHRLEESFLVEEDKKHERHPIFGNIVDEVAYHEKYPTIYHLRKKLVDSTDKADLRLIYLALAHMIKFRGHFLIEGDLNPDNSDVDKLFIQLVQTYNQLFEENPINASGVDAKAILSARLSKSRRLENLIAQLPGEKKNGLFGNLIALSLGLTPNFKSNFDLAEDAKLQLSKDTYDDDLDNLLAQIGDQYADLFLAAKNLSDAILLSDILRVNTEITKAPLSASMIKRYDEHHQDLTLLKALVRQQLPEKYKEIFFDQSKNGYAGYIDGGASQEEFYKFIKPILEKMDGTEELLVKLNREDLLRKQRTFDNGSIPHQIHLGELHAILRRQEDFYPFLKDNREKIEKILTFRIPYYVGPLARGNSRFAWMTRKSEETITPWNFEEVVDKGASAQSFIERMTNFDKNLPNEKVLPKHSLLYEYFTVYNELTKVKYVTEGMRKPAFLSGEQKKAIVDLLFKTNRKVTVKQLKEDYFKKIECFDSVEISGVEDRFNASLGTYHDLLKIIKDKDFLDNEENEDILEDIVLTLTLFEDREMIEERLKTYAHLFDDKVMKQLKRRRYTGWGRLSRKLINGIRDKQSGKTILDFLKSDGFANRNFMQLIHDDSLTFKEDIQKAQVSGQGDSLHEHIANLAGSPAIKKGILQTVKVVDELVKVMGRHKPENIVIEMARENQTTQKGQKNSRERMKRIEEGIKELGSQILKEHPVENTQLQNEKLYLYYLQNGRDMYVDQELDINRLSDYDVDHIVPQSFLKDDSIDNKVLTRSDKARGKSDNVPSEEVVKKMKNYWRQLLNAKLITQRKFDNLTKAERGGLSELDKAGFIKRQLVETRQITKHVAQILDSRMNTKYDENDKLIREVKVITLKSKLVSDFRKDFQFYKVREINNYHHAHDAYLNAVVGTALIKKYPKLESEFVYGDYKVYDVRKMIAKSEQEIGKATAKYFFYSNIMNFFKTEITLANGEIRKRPLIETNGETGEIVWDKGRDFATVRKVLSMPQVNIVKKTEVQTGGFSKESILPKRNSDKLIARKKDWDPKKYGGFDSPTVAYSVLVVAKVEKGKSKKLKSVKELLGITIMERSSFEKNPIDFLEAKGYKEVKKDLIIKLPKYSLFELENGRKRMLASAGELQKGNELALPSKYVNFLYLASHYEKLKGSPEDNEQKQLFVEQHKHYLDEIIEQISEFSKRVILADANLDKVLSAYNKHRDKPIREQAENIIHLFTLTNLGAPAAFKYFDTTIDRKRYTSTKEVLDATLIHQSITGLYETRIDLSQLGGDGGPAPGGGGGLDDEYRLYSPLVKPDQNIQFWLEQFPQAWAETAGMGLAKQVPPQVIQLKASATPVSVRQYPLSKEAQEGIRPHVQRLIQQGILVPVQSPWNTPLLPVRKPGTNDYRPVQDLREVNKRVQDIHPTVPNPYNLLCALPPQRSWYTVLDLKDAFFCLRLHPTSQPLFAFEWRDPGTGRTGQLTWTRLPQGFKNSPTIFNEALHRDLANFRIQHPQVTLLQYVDDLLLAGATKQDCLEGTKALLLELSDLGYRASAKKAQICRREVTYLGYSLRDGQRWLTEARKKTVVQIPAPTTAKQVREFLGKAGFCRLFIPGFATLAAPLYPLTKPKGEFSWAPEHQKAFDAIKKALLSAPALALPDVTKPFTLYVDERKGVARGVLTQTLGPWRRPVAYLSKKLDPVASGWPVCLKAIAAVAILVKDADKLTLGQNITVIAPHALENIVRQPPDRWMTNARMTHYQSLLLTERVTFAPPAALNPATLLPEETDEPVTHDCHQLLIEETGVRKDLTDIPLTGEVLTWFTDGSSYVVEGKRMAGAAVVDGTRTIWASSLPEGTSAQKAELMALTQALRLAEGKSINIYTDSRYAFATAHVHGAIYKQRGWLTSAGREIKNKEEILSLLEALHLPKRLAIIHCPGHQKAKDPISRGNQMADRVAKQAAQGVNLLPAGKRTADGSEFEKRTADGSEFESPKKKAKVE

SEQ ID NO: 80 - protein, 2088 aa, synthetic construct
MPAAKRVKLDGGDKKYSIGLDIGTNSVGWAVITDEYKVPSKKFKVLGNTDRHSIKKNLIGALLFDSGETAEATRLKRTARRRYTRRKNRICYLQEIFSNEMAKVDDSFFHRLEESFLVEEDKKHERHPIFGNIVDEVAYHEKYPTIYHLRKKLVDSTDKADLRLIYLALAHMIKFRGHFLIEGDLNPDNSDVDKLFIQLVQTYNQLFEENPINASGVDAKAILSARLSKSRRLENLIAQLPGEKKNGLFGNLIALSLGLTPNFKSNFDLAEDAKLQLSKDTYDDDLDNLLAQIGDQYADLFLAAKNLSDAILLSDILRVNTEITKAPLSASMIKRYDEHHQDLTLLKALVRQQLPEKYKEIFFDQSKNGYAGYIDGGASQEEFYKFIKPILEKMDGTEELLVKLNREDLLRKQRTFDNGSIPHQIHLGELHAILRRQEDFYPFLKDNREKIEKILTFRIPYYVGPLARGNSRFAWMTRKSEETITPWNFEEVVDKGASAQSFIERMTNFDKNLPNEKVLPKHSLLYEYFTVYNELTKVKYVTEGMRKPAFLSGEQKKAIVDLLFKTNRKVTVKQLKEDYFKKIECFDSVEISGVEDRFNASLGTYHDLLKIIKDKDFLDNEENEDILEDIVLTLTLFEDREMIEERLKTYAHLFDDKVMKQLKRRRYTGWGRLSRKLINGIRDKQSGKTILDFLKSDGFANRNFMQLIHDDSLTFKEDIQKAQVSGQGDSLHEHIANLAGSPAIKKGILQTVKVVDELVKVMGRHKPENIVIEMARENQTTQKGQKNSRERMKRIEEGIKELGSQILKEHPVENTQLQNEKLYLYYLQNGRDMYVDQELDINRLSDYDVDHIVPQSFLKDDSIDNKVLTRSDKARGKSDNVPSEEVVKKMKNYWRQLLNAKLITQRKFDNLTKAERGGLSELDKAGFIKRQLVETRQITKHVAQILDSRMNTKYDENDKLIREVKVITLKSKLVSDFRKDFQFYKVREINNYHHAHDAYLNAVVGTALIKKYPKLESEFVYGDYKVYDVRKMIAKSEQEIGKATAKYFFYSNIMNFFKTEITLANGEIRKRPLIETNGETGEIVWDKGRDFATVRKVLSMPQVNIVKKTEVQTGGFSKESILPKRNSDKLIARKKDWDPKKYGGFDSPTVAYSVLVVAKVEKGKSKKLKSVKELLGITIMERSSFEKNPIDFLEAKGYKEVKKDLIIKLPKYSLFELENGRKRMLASAGELQKGNELALPSKYVNFLYLASHYEKLKGSPEDNEQKQLFVEQHKHYLDEIIEQISEFSKRVILADANLDKVLSAYNKHRDKPIREQAENIIHLFTLTNLGAPAAFKYFDTTIDRKRYTSTKEVLDATLIHQSITGLYETRIDLSQLGGDGGGGSGSSEAAAKGGLDDEYRLYSPLVKPDQNIQFWLEQFPQAWAETAGMGLAKQVPPQVIQLKASATPVSVRQYPLSKEAQEGIRPHVQRLIQQGILVPVQSPWNTPLLPVRKPGTNDYRPVQDLREVNKRVQDIHPTVPNPYNLLCALPPQRSWYTVLDLKDAFFCLRLHPTSQPLFAFEWRDPGTGRTGQLTWTRLPQGFKNSPTIFNEALHRDLANFRIQHPQVTLLQYVDDLLLAGATKQDCLEGTKALLLELSDLGYRASAKKAQICRREVTYLGYSLRDGQRWLTEARKKTVVQIPAPTTAKQVREFLGKAGFCRLFIPGFATLAAPLYPLTKPKGEFSWAPEHQKAFDAIKKALLSAPALALPDVTKPFTLYVDERKGVARGVLTQTLGPWRRPVAYLSKKLDPVASGWPVCLKAIAAVAILVKDADKLTLGQNITVIAPHALENIVRQPPDRWMTNARMTHYQSLLLTERVTFAPPAALNPATLLPEETDEPVTHDCHQLLIEETGVRKDLTDIPLTGEVLTWFTDGSSYVVEGKRMAGAAVVDGTRTIWASSLPEGTSAQKAELMALTQALRLAEGKSINIYTDSRYAFATAHVHGAIYKQRGWLTSAGREIKNKEEILSLLEALHLPKRLAIIHCPGHQKAKDPISRGNQMADRVAKQAAQGVNLLPAGKRTADGSEFEKRTADGSEFESPKKKAKVE

SEQ ID NO: 81 - protein, 2083 aa, synthetic construct
MPAAKRVKLDGGDKKYSIGLDIGTNSVGWAVITDEYKVPSKKFKVLGNTDRHSIKKNLIGALLFDSGETAEATRLKRTARRRYTRRKNRICYLQEIFSNEMAKVDDSFFHRLEESFLVEEDKKHERHPIFGNIVDEVAYHEKYPTIYHLRKKLVDSTDKADLRLIYLALAHMIKFRGHFLIEGDLNPDNSDVDKLFIQLVQTYNQLFEENPINASGVDAKAILSARLSKSRRLENLIAQLPGEKKNGLFGNLIALSLGLTPNFKSNFDLAEDAKLQLSKDTYDDDLDNLLAQIGDQYADLFLAAKNLSDAILLSDILRVNTEITKAPLSASMIKRYDEHHQDLTLLKALVRQQLPEKYKEIFFDQSKNGYAGYIDGGASQEEFYKFIKPILEKMDGTEELLVKLNREDLLRKQRTFDNGSIPHQIHLGELHAILRRQEDFYPFLKDNREKIEKILTFRIPYYVGPLARGNSRFAWMTRKSEETITPWNFEEVVDKGASAQSFIERMTNFDKNLPNEKVLPKHSLLYEYFTVYNELTKVKYVTEGMRKPAFLSGEQKKAIVDLLFKTNRKVTVKQLKEDYFKKIECFDSVEISGVEDRFNASLGTYHDLLKIIKDKDFLDNEENEDILEDIVLTLTLFEDREMIEERLKTYAHLFDDKVMKQLKRRRYTGWGRLSRKLINGIRDKQSGKTILDFLKSDGFANRNFMQLIHDDSLTFKEDIQKAQVSGQGDSLHEHIANLAGSPAIKKGILQTVKVVDELVKVMGRHKPENIVIEMARENQTTQKGQKNSRERMKRIEEGIKELGSQILKEHPVENTQLQNEKLYLYYLQNGRDMYVDQELDINRLSDYDVDHIVPQSFLKDDSIDNKVLTRSDKARGKSDNVPSEEVVKKMKNYWRQLLNAKLITQRKFDNLTKAERGGLSELDKAGFIKRQLVETRQITKHVAQILDSRMNTKYDENDKLIREVKVITLKSKLVSDFRKDFQFYKVREINNYHHAHDAYLNAVVGTALIKKYPKLESEFVYGDYKVYDVRKMIAKSEQEIGKATAKYFFYSNIMNFFKTEITLANGEIRKRPLIETNGETGEIVWDKGRDFATVRKVLSMPQVNIVKKTEVQTGGFSKESILPKRNSDKLIARKKDWDPKKYGGFDSPTVAYSVLVVAKVEKGKSKKLKSVKELLGITIMERSSFEKNPIDFLEAKGYKEVKKDLIIKLPKYSLFELENGRKRMLASAGELQKGNELALPSKYVNFLYLASHYEKLKGSPEDNEQKQLFVEQHKHYLDEIIEQISEFSKRVILADANLDKVLSAYNKHRDKPIREQAENIIHLFTLTNLGAPAAFKYFDTTIDRKRYTSTKEVLDATLIHQSITGLYETRIDLSQLGGDGGGSSGGGGGLDDEYRLYSPLVKPDQNIQFWLEQFPQAWAETAGMGLAKQVPPQVIQLKASATPVSVRQYPLSKEAQEGIRPHVQRLIQQGILVPVQSPWNTPLLPVRKPGTNDYRPVQDLREVNKRVQDIHPTVPNPYNLLCALPPQRSWYTVLDLKDAFFCLRLHPTSQPLFAFEWRDPGTGRTGQLTWTRLPQGFKNSPTIFNEALHRDLANFRIQHPQVTLLQYVDDLLLAGATKQDCLEGTKALLLELSDLGYRASAKKAQICRREVTYLGYSLRDGQRWLTEARKKTVVQIPAPTTAKQVREFLGKAGFCRLFIPGFATLAAPLYPLTKPKGEFSWAPEHQKAFDAIKKALLSAPALALPDVTKPFTLYVDERKGVARGVLTQTLGPWRRPVAYLSKKLDPVASGWPVCLKAIAAVAILVKDADKLTLGQNITVIAPHALENIVRQPPDRWMTNARMTHYQSLLLTERVTFAPPAALNPATLLPEETDEPVTHDCHQLLIEETGVRKDLTDIPLTGEVLTWFTDGSSYVVEGKRMAGAAVVDGTRTIWASSLPEGTSAQKAELMALTQALRLAEGKSINIYTDSRYAFATAHVHGAIYKQRGWLTSAGREIKNKEEILSLLEALHLPKRLAIIHCPGHQKAKDPISRGNQMADRVAKQAAQGVNLLPAGKRTADGSEFEKRTADGSEFESPKKKAKVE

SEQ ID NO: 82 - protein, 2086 aa, synthetic construct
MPAAKRVKLDGGDKKYSIGLDIGTNSVGWAVITDEYKVPSKKFKVLGNTDRHSIKKNLIGALLFDSGETAEATRLKRTARRRYTRRKNRICYLQEIFSNEMAKVDDSFFHRLEESFLVEEDKKHERHPIFGNIVDEVAYHEKYPTIYHLRKKLVDSTDKADLRLIYLALAHMIKFRGHFLIEGDLNPDNSDVDKLFIQLVQTYNQLFEENPINASGVDAKAILSARLSKSRRLENLIAQLPGEKKNGLFGNLIALSLGLTPNFKSNFDLAEDAKLQLSKDTYDDDLDNLLAQIGDQYADLFLAAKNLSDAILLSDILRVNTEITKAPLSASMIKRYDEHHQDLTLLKALVRQQLPEKYKEIFFDQSKNGYAGYIDGGASQEEFYKFIKPILEKMDGTEELLVKLNREDLLRKQRTFDNGSIPHQIHLGELHAILRRQEDFYPFLKDNREKIEKILTFRIPYYVGPLARGNSRFAWMTRKSEETITPWNFEEVVDKGASAQSFIERMTNFDKNLPNEKVLPKHSLLYEYFTVYNELTKVKYVTEGMRKPAFLSGEQKKAIVDLLFKTNRKVTVKQLKEDYFKKIECFDSVEISGVEDRFNASLGTYHDLLKIIKDKDFLDNEENEDILEDIVLTLTLFEDREMIEERLKTYAHLFDDKVMKQLKRRRYTGWGRLSRKLINGIRDKQSGKTILDFLKSDGFANRNFMQLIHDDSLTFKEDIQKAQVSGQGDSLHEHIANLAGSPAIKKGILQTVKVVDELVKVMGRHKPENIVIEMARENQTTQKGQKNSRERMKRIEEGIKELGSQILKEHPVENTQLQNEKLYLYYLQNGRDMYVDQELDINRLSDYDVDHIVPQSFLKDDSIDNKVLTRSDKARGKSDNVPSEEVVKKMKNYWRQLLNAKLITQRKFDNLTKAERGGLSELDKAGFIKRQLVETRQITKHVAQILDSRMNTKYDENDKLIREVKVITLKSKLVSDFRKDFQFYKVREINNYHHAHDAYLNAVVGTALIKKYPKLESEFVYGDYKVYDVRKMIAKSEQEIGKATAKYFFYSNIMNFFKTEITLANGEIRKRPLIETNGETGEIVWDKGRDFATVRKVLSMPQVNIVKKTEVQTGGFSKESILPKRNSDKLIARKKDWDPKKYGGFDSPTVAYSVLVVAKVEKGKSKKLKSVKELLGITIMERSSFEKNPIDFLEAKGYKEVKKDLIIKLPKYSLFELENGRKRMLASAGELQKGNELALPSKYVNFLYLASHYEKLKGSPEDNEQKQLFVEQHKHYLDEIIEQISEFSKRVILADANLDKVLSAYNKHRDKPIREQAENIIHLFTLTNLGAPAAFKYFDTTIDRKRYTSTKEVLDATLIHQSITGLYETRIDLSQLGGDGGPAPGSSGGSGGLDDEYRLYSPLVKPDQNIQFWLEQFPQAWAETAGMGLAKQVPPQVIQLKASATPVSVRQYPLSKEAQEGIRPHVQRLIQQGILVPVQSPWNTPLLPVRKPGTNDYRPVQDLREVNKRVQDIHPTVPNPYNLLCALPPQRSWYTVLDLKDAFFCLRLHPTSQPLFAFEWRDPGTGRTGQLTWTRLPQGFKNSPTIFNEALHRDLANFRIQHPQVTLLQYVDDLLLAGATKQDCLEGTKALLLELSDLGYRASAKKAQICRREVTYLGYSLRDGQRWLTEARKKTVVQIPAPTTAKQVREFLGKAGFCRLFIPGFATLAAPLYPLTKPKGEFSWAPEHQKAFDAIKKALLSAPALALPDVTKPFTLYVDERKGVARGVLTQTLGPWRRPVAYLSKKLDPVASGWPVCLKAIAAVAILVKDADKLTLGQNITVIAPHALENIVRQPPDRWMTNARMTHYQSLLLTERVTFAPPAALNPATLLPEETDEPVTHDCHQLLIEETGVRKDLTDIPLTGEVLTWFTDGSSYVVEGKRMAGAAVVDGTRTIWASSLPEGTSAQKAELMALTQALRLAEGKSINIYTDSRYAFATAHVHGAIYKQRGWLTSAGREIKNKEEILSLLEALHLPKRLAIIHCPGHQKAKDPISRGNQMADRVAKQAAQGVNLLPAGKRTADGSEFEKRTADGSEFESPKKKAKVE

SEQ ID NO: 83 - protein, 2088 aa, synthetic construct
MPAAKRVKLDGGDKKYSIGLDIGTNSVGWAVITDEYKVPSKKFKVLGNTDRHSIKKNLIGALLFDSGETAEATRLKRTARRRYTRRKNRICYLQEIFSNEMAKVDDSFFHRLEESFLVEEDKKHERHPIFGNIVDEVAYHEKYPTIYHLRKKLVDSTDKADLRLIYLALAHMIKFRGHFLIEGDLNPDNSDVDKLFIQLVQTYNQLFEENPINASGVDAKAILSARLSKSRRLENLIAQLPGEKKNGLFGNLIALSLGLTPNFKSNFDLAEDAKLQLSKDTYDDDLDNLLAQIGDQYADLFLAAKNLSDAILLSDILRVNTEITKAPLSASMIKRYDEHHQDLTLLKALVRQQLPEKYKEIFFDQSKNGYAGYIDGGASQEEFYKFIKPILEKMDGTEELLVKLNREDLLRKQRTFDNGSIPHQIHLGELHAILRRQEDFYPFLKDNREKIEKILTFRIPYYVGPLARGNSRFAWMTRKSEETITPWNFEEVVDKGASAQSFIERMTNFDKNLPNEKVLPKHSLLYEYFTVYNELTKVKYVTEGMRKPAFLSGEQKKAIVDLLFKTNRKVTVKQLKEDYFKKIECFDSVEISGVEDRFNASLGTYHDLLKIIKDKDFLDNEENEDILEDIVLTLTLFEDREMIEERLKTYAHLFDDKVMKQLKRRRYTGWGRLSRKLINGIRDKQSGKTILDFLKSDGFANRNFMQLIHDDSLTFKEDIQKAQVSGQGDSLHEHIANLAGSPAIKKGILQTVKVVDELVKVMGRHKPENIVIEMARENQTTQKGQKNSRERMKRIEEGIKELGSQILKEHPVENTQLQNEKLYLYYLQNGRDMYVDQELDINRLSDYDVDHIVPQSFLKDDSIDNKVLTRSDKARGKSDNVPSEEVVKKMKNYWRQLLNAKLITQRKFDNLTKAERGGLSELDKAGFIKRQLVETRQITKHVAQILDSRMNTKYDENDKLIREVKVITLKSKLVSDFRKDFQFYKVREINNYHHAHDAYLNAVVGTALIKKYPKLESEFVYGDYKVYDVRKMIAKSEQEIGKATAKYFFYSNIMNFFKTEITLANGEIRKRPLIETNGETGEIVWDKGRDFATVRKVLSMPQVNIVKKTEVQTGGFSKESILPKRNSDKLIARKKDWDPKKYGGFDSPTVAYSVLVVAKVEKGKSKKLKSVKELLGITIMERSSFEKNPIDFLEAKGYKEVKKDLIIKLPKYSLFELENGRKRMLASAGELQKGNELALPSKYVNFLYLASHYEKLKGSPEDNEQKQLFVEQHKHYLDEIIEQISEFSKRVILADANLDKVLSAYNKHRDKPIREQAENIIHLFTLTNLGAPAAFKYFDTTIDRKRYTSTKEVLDATLIHQSITGLYETRIDLSQLGGDGGEAAAKGSSGGSGGLDDEYRLYSPLVKPDQNIQFWLEQFPQAWAETAGMGLAKQVPPQVIQLKASATPVSVRQYPLSKEAQEGIRPHVQRLIQQGILVPVQSPWNTPLLPVRKPGTNDYRPVQDLREVNKRVQDIHPTVPNPYNLLCALPPQRSWYTVLDLKDAFFCLRLHPTSQPLFAFEWRDPGTGRTGQLTWTRLPQGFKNSPTIFNEALHRDLANFRIQHPQVTLLQYVDDLLLAGATKQDCLEGTKALLLELSDLGYRASAKKAQICRREVTYLGYSLRDGQRWLTEARKKTVVQIPAPTTAKQVREFLGKAGFCRLFIPGFATLAAPLYPLTKPKGEFSWAPEHQKAFDAIKKALLSAPALALPDVTKPFTLYVDERKGVARGVLTQTLGPWRRPVAYLSKKLDPVASGWPVCLKAIAAVAILVKDADKLTLGQNITVIAPHALENIVRQPPDRWMTNARMTHYQSLLLTERVTFAPPAALNPATLLPEETDEPVTHDCHQLLIEETGVRKDLTDIPLTGEVLTWFTDGSSYVVEGKRMAGAAVVDGTRTIWASSLPEGTSAQKAELMALTQALRLAEGKSINIYTDSRYAFATAHVHGAIYKQRGWLTSAGREIKNKEEILSLLEALHLPKRLAIIHCPGHQKAKDPISRGNQMADRVAKQAAQGVNLLPAGKRTADGSEFEKRTADGSEFESPKKKAKVE

SEQ ID NO: 84 - protein, 2082 aa, synthetic construct
MPAAKRVKLDGGDKKYSIGLDIGTNSVGWAVITDEYKVPSKKFKVLGNTDRHSIKKNLIGALLFDSGETAEATRLKRTARRRYTRRKNRICYLQEIFSNEMAKVDDSFFHRLEESFLVEEDKKHERHPIFGNIVDEVAYHEKYPTIYHLRKKLVDSTDKADLRLIYLALAHMIKFRGHFLIEGDLNPDNSDVDKLFIQLVQTYNQLFEENPINASGVDAKAILSARLSKSRRLENLIAQLPGEKKNGLFGNLIALSLGLTPNFKSNFDLAEDAKLQLSKDTYDDDLDNLLAQIGDQYADLFLAAKNLSDAILLSDILRVNTEITKAPLSASMIKRYDEHHQDLTLLKALVRQQLPEKYKEIFFDQSKNGYAGYIDGGASQEEFYKFIKPILEKMDGTEELLVKLNREDLLRKQRTFDNGSIPHQIHLGELHAILRRQEDFYPFLKDNREKIEKILTFRIPYYVGPLARGNSRFAWMTRKSEETITPWNFEEVVDKGASAQSFIERMTNFDKNLPNEKVLPKHSLLYEYFTVYNELTKVKYVTEGMRKPAFLSGEQKKAIVDLLFKTNRKVTVKQLKEDYFKKIECFDSVEISGVEDRFNASLGTYHDLLKIIKDKDFLDNEENEDILEDIVLTLTLFEDREMIEERLKTYAHLFDDKVMKQLKRRRYTGWGRLSRKLINGIRDKQSGKTILDFLKSDGFANRNFMQLIHDDSLTFKEDIQKAQVSGQGDSLHEHIANLAGSPAIKKGILQTVKVVDELVKVMGRHKPENIVIEMARENQTTQKGQKNSRERMKRIEEGIKELGSQILKEHPVENTQLQNEKLYLYYLQNGRDMYVDQELDINRLSDYDVDHIVPQSFLKDDSIDNKVLTRSDKARGKSDNVPSEEVVKKMKNYWRQLLNAKLITQRKFDNLTKAERGGLSELDKAGFIKRQLVETRQITKHVAQILDSRMNTKYDENDKLIREVKVITLKSKLVSDFRKDFQFYKVREINNYHHAHDAYLNAVVGTALIKKYPKLESEFVYGDYKVYDVRKMIAKSEQEIGKATAKYFFYSNIMNFFKTEITLANGEIRKRPLIETNGETGEIVWDKGRDFATVRKVLSMPQVNIVKKTEVQTGGFSKESILPKRNSDKLIARKKDWDPKKYGGFDSPTVAYSVLVVAKVEKGKSKKLKSVKELLGITIMERSSFEKNPIDFLEAKGYKEVKKDLIIKLPKYSLFELENGRKRMLASAGELQKGNELALPSKYVNFLYLASHYEKLKGSPEDNEQKQLFVEQHKHYLDEIIEQISEFSKRVILADANLDKVLSAYNKHRDKPIREQAENIIHLFTLTNLGAPAAFKYFDTTIDRKRYTSTKEVLDATLIHQSITGLYETRIDLSQLGGDGGGGGGSGGLDDEYRLYSPLVKPDQNIQFWLEQFPQAWAETAGMGLAKQVPPQVIQLKASATPVSVRQYPLSKEAQEGIRPHVQRLIQQGILVPVQSPWNTPLLPVRKPGTNDYRPVQDLREVNKRVQDIHPTVPNPYNLLCALPPQRSWYTVLDLKDAFFCLRLHPTSQPLFAFEWRDPGTGRTGQLTWTRLPQGFKNSPTIFNEALHRDLANFRIQHPQVTLLQYVDDLLLAGATKQDCLEGTKALLLELSDLGYRASAKKAQICRREVTYLGYSLRDGQRWLTEARKKTVVQIPAPTTAKQVREFLGKAGFCRLFIPGFATLAAPLYPLTKPKGEFSWAPEHQKAFDAIKKALLSAPALALPDVTKPFTLYVDERKGVARGVLTQTLGPWRRPVAYLSKKLDPVASGWPVCLKAIAAVAILVKDADKLTLGQNITVIAPHALENIVRQPPDRWMTNARMTHYQSLLLTERVTFAPPAALNPATLLPEETDEPVTHDCHQLLIEETGVRKDLTDIPLTGEVLTWFTDGSSYVVEGKRMAGAAVVDGTRTIWASSLPEGTSAQKAELMALTQALRLAEGKSINIYTDSRYAFATAHVHGAIYKQRGWLTSAGREIKNKEEILSLLEALHLPKRLAIIHCPGHQKAKDPISRGNQMADRVAKQAAQGVNLLPAGKRTADGSEFEKRTADGSEFESPKKKAKVE

SEQ ID NO: 85 - protein, 2086 aa, synthetic construct
MPAAKRVKLDGGDKKYSIGLDIGTNSVGWAVITDEYKVPSKKFKVLGNTDRHSIKKNLIGALLFDSGETAEATRLKRTARRRYTRRKNRICYLQEIFSNEMAKVDDSFFHRLEESFLVEEDKKHERHPIFGNIVDEVAYHEKYPTIYHLRKKLVDSTDKADLRLIYLALAHMIKFRGHFLIEGDLNPDNSDVDKLFIQLVQTYNQLFEENPINASGVDAKAILSARLSKSRRLENLIAQLPGEKKNGLFGNLIALSLGLTPNFKSNFDLAEDAKLQLSKDTYDDDLDNLLAQIGDQYADLFLAAKNLSDAILLSDILRVNTEITKAPLSASMIKRYDEHHQDLTLLKALVRQQLPEKYKEIFFDQSKNGYAGYIDGGASQEEFYKFIKPILEKMDGTEELLVKLNREDLLRKQRTFDNGSIPHQIHLGELHAILRRQEDFYPFLKDNREKIEKILTFRIPYYVGPLARGNSRFAWMTRKSEETITPWNFEEVVDKGASAQSFIERMTNFDKNLPNEKVLPKHSLLYEYFTVYNELTKVKYVTEGMRKPAFLSGEQKKAIVDLLFKTNRKVTVKQLKEDYFKKIECFDSVEISGVEDRFNASLGTYHDLLKIIKDKDFLDNEENEDILEDIVLTLTLFEDREMIEERLKTYAHLFDDKVMKQLKRRRYTGWGRLSRKLINGIRDKQSGKTILDFLKSDGFANRNFMQLIHDDSLTFKEDIQKAQVSGQGDSLHEHIANLAGSPAIKKGILQTVKVVDELVKVMGRHKPENIVIEMARENQTTQKGQKNSRERMKRIEEGIKELGSQILKEHPVENTQLQNEKLYLYYLQNGRDMYVDQELDINRLSDYDVDHIVPQSFLKDDSIDNKVLTRSDKARGKSDNVPSEEVVKKMKNYWRQLLNAKLITQRKFDNLTKAERGGLSELDKAGFIKRQLVETRQITKHVAQILDSRMNTKYDENDKLIREVKVITLKSKLVSDFRKDFQFYKVREINNYHHAHDAYLNAVVGTALIKKYPKLESEFVYGDYKVYDVRKMIAKSEQEIGKATAKYFFYSNIMNFFKTEITLANGEIRKRPLIETNGETGEIVWDKGRDFATVRKVLSMPQVNIVKKTEVQTGGFSKESILPKRNSDKLIARKKDWDPKKYGGFDSPTVAYSVLVVAKVEKGKSKKLKSVKELLGITIMERSSFEKNPIDFLEAKGYKEVKKDLIIKLPKYSLFELENGRKRMLASAGELQKGNELALPSKYVNFLYLASHYEKLKGSPEDNEQKQLFVEQHKHYLDEIIEQISEFSKRVILADANLDKVLSAYNKHRDKPIREQAENIIHLFTLTNLGAPAAFKYFDTTIDRKRYTSTKEVLDATLIHQSITGLYETRIDLSQLGGDGGGSSGGSGGGGGLDDEYRLYSPLVKPDQNIQFWLEQFPQAWAETAGMGLAKQVPPQVIQLKASATPVSVRQYPLSKEAQEGIRPHVQRLIQQGILVPVQSPWNTPLLPVRKPGTNDYRPVQDLREVNKRVQDIHPTVPNPYNLLCALPPQRSWYTVLDLKDAFFCLRLHPTSQPLFAFEWRDPGTGRTGQLTWTRLPQGFKNSPTIFNEALHRDLANFRIQHPQVTLLQYVDDLLLAGATKQDCLEGTKALLLELSDLGYRASAKKAQICRREVTYLGYSLRDGQRWLTEARKKTVVQIPAPTTAKQVREFLGKAGFCRLFIPGFATLAAPLYPLTKPKGEFSWAPEHQKAFDAIKKALLSAPALALPDVTKPFTLYVDERKGVARGVLTQTLGPWRRPVAYLSKKLDPVASGWPVCLKAIAAVAILVKDADKLTLGQNITVIAPHALENIVRQPPDRWMTNARMTHYQSLLLTERVTFAPPAALNPATLLPEETDEPVTHDCHQLLIEETGVRKDLTDIPLTGEVLTWFTDGSSYVVEGKRMAGAAVVDGTRTIWASSLPEGTSAQKAELMALTQALRLAEGKSINIYTDSRYAFATAHVHGAIYKQRGWLTSAGREIKNKEEILSLLEALHLPKRLAIIHCPGHQKAKDPISRGNQMADRVAKQAAQGVNLLPAGKRTADGSEFEKRTADGSEFESPKKKAKVE

SEQ ID NO: 86 - protein, 2088 aa, synthetic construct
MPAAKRVKLDGGDKKYSIGLDIGTNSVGWAVITDEYKVPSKKFKVLGNTDRHSIKKNLIGALLFDSGETAEATRLKRTARRRYTRRKNRICYLQEIFSNEMAKVDDSFFHRLEESFLVEEDKKHERHPIFGNIVDEVAYHEKYPTIYHLRKKLVDSTDKADLRLIYLALAHMIKFRGHFLIEGDLNPDNSDVDKLFIQLVQTYNQLFEENPINASGVDAKAILSARLSKSRRLENLIAQLPGEKKNGLFGNLIALSLGLTPNFKSNFDLAEDAKLQLSKDTYDDDLDNLLAQIGDQYADLFLAAKNLSDAILLSDILRVNTEITKAPLSASMIKRYDEHHQDLTLLKALVRQQLPEKYKEIFFDQSKNGYAGYIDGGASQEEFYKFIKPILEKMDGTEELLVKLNREDLLRKQRTFDNGSIPHQIHLGELHAILRRQEDFYPFLKDNREKIEKILTFRIPYYVGPLARGNSRFAWMTRKSEETITPWNFEEVVDKGASAQSFIERMTNFDKNLPNEKVLPKHSLLYEYFTVYNELTKVKYVTEGMRKPAFLSGEQKKAIVDLLFKTNRKVTVKQLKEDYFKKIECFDSVEISGVEDRFNASLGTYHDLLKIIKDKDFLDNEENEDILEDIVLTLTLFEDREMIEERLKTYAHLFDDKVMKQLKRRRYTGWGRLSRKLINGIRDKQSGKTILDFLKSDGFANRNFMQLIHDDSLTFKEDIQKAQVSGQGDSLHEHIANLAGSPAIKKGILQTVKVVDELVKVMGRHKPENIVIEMARENQTTQKGQKNSRERMKRIEEGIKELGSQILKEHPVENTQLQNEKLYLYYLQNGRDMYVDQELDINRLSDYDVDHIVPQSFLKDDSIDNKVLTRSDKARGKSDNVPSEEVVKKMKNYWRQLLNAKLITQRKFDNLTKAERGGLSELDKAGFIKRQLVETRQITKHVAQILDSRMNTKYDENDKLIREVKVITLKSKLVSDFRKDFQFYKVREINNYHHAHDAYLNAVVGTALIKKYPKLESEFVYGDYKVYDVRKMIAKSEQEIGKATAKYFFYSNIMNFFKTEITLANGEIRKRPLIETNGETGEIVWDKGRDFATVRKVLSMPQVNIVKKTEVQTGGFSKESILPKRNSDKLIARKKDWDPKKYGGFDSPTVAYSVLVVAKVEKGKSKKLKSVKELLGITIMERSSFEKNPIDFLEAKGYKEVKKDLIIKLPKYSLFELENGRKRMLASAGELQKGNELALPSKYVNFLYLASHYEKLKGSPEDNEQKQLFVEQHKHYLDEIIEQISEFSKRVILADANLDKVLSAYNKHRDKPIREQAENIIHLFTLTNLGAPAAFKYFDTTIDRKRYTSTKEVLDATLIHQSITGLYETRIDLSQLGGDGGGSSPAPEAAAKGGLDDEYRLYSPLVKPDQNIQFWLEQFPQAWAETAGMGLAKQVPPQVIQLKASATPVSVRQYPLSKEAQEGIRPHVQRLIQQGILVPVQSPWNTPLLPVRKPGTNDYRPVQDLREVNKRVQDIHPTVPNPYNLLCALPPQRSWYTVLDLKDAFFCLRLHPTSQPLFAFEWRDPGTGRTGQLTWTRLPQGFKNSPTIFNEALHRDLANFRIQHPQVTLLQYVDDLLLAGATKQDCLEGTKALLLELSDLGYRASAKKAQICRREVTYLGYSLRDGQRWLTEARKKTVVQIPAPTTAKQVREFLGKAGFCRLFIPGFATLAAPLYPLTKPKGEFSWAPEHQKAFDAIKKALLSAPALALPDVTKPFTLYVDERKGVARGVLTQTLGPWRRPVAYLSKKLDPVASGWPVCLKAIAAVAILVKDADKLTLGQNITVIAPHALENIVRQPPDRWMTNARMTHYQSLLLTERVTFAPPAALNPATLLPEETDEPVTHDCHQLLIEETGVRKDLTDIPLTGEVLTWFTDGSSYVVEGKRMAGAAVVDGTRTIWASSLPEGTSAQKAELMALTQALRLAEGKSINIYTDSRYAFATAHVHGAIYKQRGWLTSAGREIKNKEEILSLLEALHLPKRLAIIHCPGHQKAKDPISRGNQMADRVAKQAAQGVNLLPAGKRTADGSEFEKRTADGSEFESPKKKAKVE

SEQ ID NO: 87 - protein, 2083 aa, synthetic construct
MPAAKRVKLDGGDKKYSIGLDIGTNSVGWAVITDEYKVPSKKFKVLGNTDRHSIKKNLIGALLFDSGETAEATRLKRTARRRYTRRKNRICYLQEIFSNEMAKVDDSFFHRLEESFLVEEDKKHERHPIFGNIVDEVAYHEKYPTIYHLRKKLVDSTDKADLRLIYLALAHMIKFRGHFLIEGDLNPDNSDVDKLFIQLVQTYNQLFEENPINASGVDAKAILSARLSKSRRLENLIAQLPGEKKNGLFGNLIALSLGLTPNFKSNFDLAEDAKLQLSKDTYDDDLDNLLAQIGDQYADLFLAAKNLSDAILLSDILRVNTEITKAPLSASMIKRYDEHHQDLTLLKALVRQQLPEKYKEIFFDQSKNGYAGYIDGGASQEEFYKFIKPILEKMDGTEELLVKLNREDLLRKQRTFDNGSIPHQIHLGELHAILRRQEDFYPFLKDNREKIEKILTFRIPYYVGPLARGNSRFAWMTRKSEETITPWNFEEVVDKGASAQSFIERMTNFDKNLPNEKVLPKHSLLYEYFTVYNELTKVKYVTEGMRKPAFLSGEQKKAIVDLLFKTNRKVTVKQLKEDYFKKIECFDSVEISGVEDRFNASLGTYHDLLKIIKDKDFLDNEENEDILEDIVLTLTLFEDREMIEERLKTYAHLFDDKVMKQLKRRRYTGWGRLSRKLINGIRDKQSGKTILDFLKSDGFANRNFMQLIHDDSLTFKEDIQKAQVSGQGDSLHEHIANLAGSPAIKKGILQTVKVVDELVKVMGRHKPENIVIEMARENQTTQKGQKNSRERMKRIEEGIKELGSQILKEHPVENTQLQNEKLYLYYLQNGRDMYVDQELDINRLSDYDVDHIVPQSFLKDDSIDNKVLTRSDKARGKSDNVPSEEVVKKMKNYWRQLLNAKLITQRKFDNLTKAERGGLSELDKAGFIKRQLVETRQITKHVAQILDSRMNTKYDENDKLIREVKVITLKSKLVSDFRKDFQFYKVREINNYHHAHDAYLNAVVGTALIKKYPKLESEFVYGDYKVYDVRKMIAKSEQEIGKATAKYFFYSNIMNFFKTEITLANGEIRKRPLIETNGETGEIVWDKGRDFATVRKVLSMPQVNIVKKTEVQTGGFSKESILPKRNSDKLIARKKDWDPKKYGGFDSPTVAYSVLVVAKVEKGKSKKLKSVKELLGITIMERSSFEKNPIDFLEAKGYKEVKKDLIIKLPKYSLFELENGRKRMLASAGELQKGNELALPSKYVNFLYLASHYEKLKGSPEDNEQKQLFVEQHKHYLDEIIEQISEFSKRVILADANLDKVLSAYNKHRDKPIREQAENIIHLFTLTNLGAPAAFKYFDTTIDRKRYTSTKEVLDATLIHQSITGLYETRIDLSQLGGDGGGGGGGSGGLDDEYRLYSPLVKPDQNIQFWLEQFPQAWAETAGMGLAKQVPPQVIQLKASATPVSVRQYPLSKEAQEGIRPHVQRLIQQGILVPVQSPWNTPLLPVRKPGTNDYRPVQDLREVNKRVQDIHPTVPNPYNLLCALPPQRSWYTVLDLKDAFFCLRLHPTSQPLFAFEWRDPGTGRTGQLTWTRLPQGFKNSPTIFNEALHRDLANFRIQHPQVTLLQYVDDLLLAGATKQDCLEGTKALLLELSDLGYRASAKKAQICRREVTYLGYSLRDGQRWLTEARKKTVVQIPAPTTAKQVREFLGKAGFCRLFIPGFATLAAPLYPLTKPKGEFSWAPEHQKAFDAIKKALLSAPALALPDVTKPFTLYVDERKGVARGVLTQTLGPWRRPVAYLSKKLDPVASGWPVCLKAIAAVAILVKDADKLTLGQNITVIAPHALENIVRQPPDRWMTNARMTHYQSLLLTERVTFAPPAALNPATLLPEETDEPVTHDCHQLLIEETGVRKDLTDIPLTGEVLTWFTDGSSYVVEGKRMAGAAVVDGTRTIWASSLPEGTSAQKAELMALTQALRLAEGKSINIYTDSRYAFATAHVHGAIYKQRGWLTSAGREIKNKEEILSLLEALHLPKRLAIIHCPGHQKAKDPISRGNQMADRVAKQAAQGVNLLPAGKRTADGSEFEKRTADGSEFESPKKKAKVE

SEQ ID NO: 88 - protein, 2083 aa, synthetic construct
MPAAKRVKLDGGDKKYSIGLDIGTNSVGWAVITDEYKVPSKKFKVLGNTDRHSIKKNLIGALLFDSGETAEATRLKRTARRRYTRRKNRICYLQEIFSNEMAKVDDSFFHRLEESFLVEEDKKHERHPIFGNIVDEVAYHEKYPTIYHLRKKLVDSTDKADLRLIYLALAHMIKFRGHFLIEGDLNPDNSDVDKLFIQLVQTYNQLFEENPINASGVDAKAILSARLSKSRRLENLIAQLPGEKKNGLFGNLIALSLGLTPNFKSNFDLAEDAKLQLSKDTYDDDLDNLLAQIGDQYADLFLAAKNLSDAILLSDILRVNTEITKAPLSASMIKRYDEHHQDLTLLKALVRQQLPEKYKEIFFDQSKNGYAGYIDGGASQEEFYKFIKPILEKMDGTEELLVKLNREDLLRKQRTFDNGSIPHQIHLGELHAILRRQEDFYPFLKDNREKIEKILTFRIPYYVGPLARGNSRFAWMTRKSEETITPWNFEEVVDKGASAQSFIERMTNFDKNLPNEKVLPKHSLLYEYFTVYNELTKVKYVTEGMRKPAFLSGEQKKAIVDLLFKTNRKVTVKQLKEDYFKKIECFDSVEISGVEDRFNASLGTYHDLLKIIKDKDFLDNEENEDILEDIVLTLTLFEDREMIEERLKTYAHLFDDKVMKQLKRRRYTGWGRLSRKLINGIRDKQSGKTILDFLKSDGFANRNFMQLIHDDSLTFKEDIQKAQVSGQGDSLHEHIANLAGSPAIKKGILQTVKVVDELVKVMGRHKPENIVIEMARENQTTQKGQKNSRERMKRIEEGIKELGSQILKEHPVENTQLQNEKLYLYYLQNGRDMYVDQELDINRLSDYDVDHIVPQSFLKDDSIDNKVLTRSDKARGKSDNVPSEEVVKKMKNYWRQLLNAKLITQRKFDNLTKAERGGLSELDKAGFIKRQLVETRQITKHVAQILDSRMNTKYDENDKLIREVKVITLKSKLVSDFRKDFQFYKVREINNYHHAHDAYLNAVVGTALIKKYPKLESEFVYGDYKVYDVRKMIAKSEQEIGKATAKYFFYSNIMNFFKTEITLANGEIRKRPLIETNGETGEIVWDKGRDFATVRKVLSMPQVNIVKKTEVQTGGFSKESILPKRNSDKLIARKKDWDPKKYGGFDSPTVAYSVLVVAKVEKGKSKKLKSVKELLGITIMERSSFEKNPIDFLEAKGYKEVKKDLIIKLPKYSLFELENGRKRMLASAGELQKGNELALPSKYVNFLYLASHYEKLKGSPEDNEQKQLFVEQHKHYLDEIIEQISEFSKRVILADANLDKVLSAYNKHRDKPIREQAENIIHLFTLTNLGAPAAFKYFDTTIDRKRYTSTKEVLDATLIHQSITGLYETRIDLSQLGGDGGGSSGGSGGLDDEYRLYSPLVKPDQNIQFWLEQFPQAWAETAGMGLAKQVPPQVIQLKASATPVSVRQYPLSKEAQEGIRPHVQRLIQQGILVPVQSPWNTPLLPVRKPGTNDYRPVQDLREVNKRVQDIHPTVPNPYNLLCALPPQRSWYTVLDLKDAFFCLRLHPTSQPLFAFEWRDPGTGRTGQLTWTRLPQGFKNSPTIFNEALHRDLANFRIQHPQVTLLQYVDDLLLAGATKQDCLEGTKALLLELSDLGYRASAKKAQICRREVTYLGYSLRDGQRWLTEARKKTVVQIPAPTTAKQVREFLGKAGFCRLFIPGFATLAAPLYPLTKPKGEFSWAPEHQKAFDAIKKALLSAPALALPDVTKPFTLYVDERKGVARGVLTQTLGPWRRPVAYLSKKLDPVASGWPVCLKAIAAVAILVKDADKLTLGQNITVIAPHALENIVRQPPDRWMTNARMTHYQSLLLTERVTFAPPAALNPATLLPEETDEPVTHDCHQLLIEETGVRKDLTDIPLTGEVLTWFTDGSSYVVEGKRMAGAAVVDGTRTIWASSLPEGTSAQKAELMALTQALRLAEGKSINIYTDSRYAFATAHVHGAIYKQRGWLTSAGREIKNKEEILSLLEALHLPKRLAIIHCPGHQKAKDPISRGNQMADRVAKQAAQGVNLLPAGKRTADGSEFEKRTADGSEFESPKKKAKVE

SEQ ID NO: 89 - protein, 2086 aa, synthetic construct
MPAAKRVKLDGGDKKYSIGLDIGTNSVGWAVITDEYKVPSKKFKVLGNTDRHSIKKNLIGALLFDSGETAEATRLKRTARRRYTRRKNRICYLQEIFSNEMAKVDDSFFHRLEESFLVEEDKKHERHPIFGNIVDEVAYHEKYPTIYHLRKKLVDSTDKADLRLIYLALAHMIKFRGHFLIEGDLNPDNSDVDKLFIQLVQTYNQLFEENPINASGVDAKAILSARLSKSRRLENLIAQLPGEKKNGLFGNLIALSLGLTPNFKSNFDLAEDAKLQLSKDTYDDDLDNLLAQIGDQYADLFLAAKNLSDAILLSDILRVNTEITKAPLSASMIKRYDEHHQDLTLLKALVRQQLPEKYKEIFFDQSKNGYAGYIDGGASQEEFYKFIKPILEKMDGTEELLVKLNREDLLRKQRTFDNGSIPHQIHLGELHAILRRQEDFYPFLKDNREKIEKILTFRIPYYVGPLARGNSRFAWMTRKSEETITPWNFEEVVDKGASAQSFIERMTNFDKNLPNEKVLPKHSLLYEYFTVYNELTKVKYVTEGMRKPAFLSGEQKKAIVDLLFKTNRKVTVKQLKEDYFKKIECFDSVEISGVEDRFNASLGTYHDLLKIIKDKDFLDNEENEDILEDIVLTLTLFEDREMIEERLKTYAHLFDDKVMKQLKRRRYTGWGRLSRKLINGIRDKQSGKTILDFLKSDGFANRNFMQLIHDDSLTFKEDIQKAQVSGQGDSLHEHIANLAGSPAIKKGILQTVKVVDELVKVMGRHKPENIVIEMARENQTTQKGQKNSRERMKRIEEGIKELGSQILKEHPVENTQLQNEKLYLYYLQNGRDMYVDQELDINRLSDYDVDHIVPQSFLKDDSIDNKVLTRSDKARGKSDNVPSEEVVKKMKNYWRQLLNAKLITQRKFDNLTKAERGGLSELDKAGFIKRQLVETRQITKHVAQILDSRMNTKYDENDKLIREVKVITLKSKLVSDFRKDFQFYKVREINNYHHAHDAYLNAVVGTALIKKYPKLESEFVYGDYKVYDVRKMIAKSEQEIGKATAKYFFYSNIMNFFKTEITLANGEIRKRPLIETNGETGEIVWDKGRDFATVRKVLSMPQVNIVKKTEVQTGGFSKESILPKRNSDKLIARKKDWDPKKYGGFDSPTVAYSVLVVAKVEKGKSKKLKSVKELLGITIMERSSFEKNPIDFLEAKGYKEVKKDLIIKLPKYSLFELENGRKRMLASAGELQKGNELALPSKYVNFLYLASHYEKLKGSPEDNEQKQLFVEQHKHYLDEIIEQISEFSKRVILADANLDKVLSAYNKHRDKPIREQAENIIHLFTLTNLGAPAAFKYFDTTIDRKRYTSTKEVLDATLIHQSITGLYETRIDLSQLGGDGGPAPGSSGGGGGLDDEYRLYSPLVKPDQNIQFWLEQFPQAWAETAGMGLAKQVPPQVIQLKASATPVSVRQYPLSKEAQEGIRPHVQRLIQQGILVPVQSPWNTPLLPVRKPGTNDYRPVQDLREVNKRVQDIHPTVPNPYNLLCALPPQRSWYTVLDLKDAFFCLRLHPTSQPLFAFEWRDPGTGRTGQLTWTRLPQGFKNSPTIFNEALHRDLANFRIQHPQVTLLQYVDDLLLAGATKQDCLEGTKALLLELSDLGYRASAKKAQICRREVTYLGYSLRDGQRWLTEARKKTVVQIPAPTTAKQVREFLGKAGFCRLFIPGFATLAAPLYPLTKPKGEFSWAPEHQKAFDAIKKALLSAPALALPDVTKPFTLYVDERKGVARGVLTQTLGPWRRPVAYLSKKLDPVASGWPVCLKAIAAVAILVKDADKLTLGQNITVIAPHALENIVRQPPDRWMTNARMTHYQSLLLTERVTFAPPAALNPATLLPEETDEPVTHDCHQLLIEETGVRKDLTDIPLTGEVLTWFTDGSSYVVEGKRMAGAAVVDGTRTIWASSLPEGTSAQKAELMALTQALRLAEGKSINIYTDSRYAFATAHVHGAIYKQRGWLTSAGREIKNKEEILSLLEALHLPKRLAIIHCPGHQKAKDPISRGNQMADRVAKQAAQGVNLLPAGKRTADGSEFEKRTADGSEFESPKKKAKVE

SEQ ID NO: 90 - protein, 2093 aa, synthetic construct
MPAAKRVKLDGGDKKYSIGLDIGTNSVGWAVITDEYKVPSKKFKVLGNTDRHSIKKNLIGALLFDSGETAEATRLKRTARRRYTRRKNRICYLQEIFSNEMAKVDDSFFHRLEESFLVEEDKKHERHPIFGNIVDEVAYHEKYPTIYHLRKKLVDSTDKADLRLIYLALAHMIKFRGHFLIEGDLNPDNSDVDKLFIQLVQTYNQLFEENPINASGVDAKAILSARLSKSRRLENLIAQLPGEKKNGLFGNLIALSLGLTPNFKSNFDLAEDAKLQLSKDTYDDDLDNLLAQIGDQYADLFLAAKNLSDAILLSDILRVNTEITKAPLSASMIKRYDEHHQDLTLLKALVRQQLPEKYKEIFFDQSKNGYAGYIDGGASQEEFYKFIKPILEKMDGTEELLVKLNREDLLRKQRTFDNGSIPHQIHLGELHAILRRQEDFYPFLKDNREKIEKILTFRIPYYVGPLARGNSRFAWMTRKSEETITPWNFEEVVDKGASAQSFIERMTNFDKNLPNEKVLPKHSLLYEYFTVYNELTKVKYVTEGMRKPAFLSGEQKKAIVDLLFKTNRKVTVKQLKEDYFKKIECFDSVEISGVEDRFNASLGTYHDLLKIIKDKDFLDNEENEDILEDIVLTLTLFEDREMIEERLKTYAHLFDDKVMKQLKRRRYTGWGRLSRKLINGIRDKQSGKTILDFLKSDGFANRNFMQLIHDDSLTFKEDIQKAQVSGQGDSLHEHIANLAGSPAIKKGILQTVKVVDELVKVMGRHKPENIVIEMARENQTTQKGQKNSRERMKRIEEGIKELGSQILKEHPVENTQLQNEKLYLYYLQNGRDMYVDQELDINRLSDYDVDHIVPQSFLKDDSIDNKVLTRSDKARGKSDNVPSEEVVKKMKNYWRQLLNAKLITQRKFDNLTKAERGGLSELDKAGFIKRQLVETRQITKHVAQILDSRMNTKYDENDKLIREVKVITLKSKLVSDFRKDFQFYKVREINNYHHAHDAYLNAVVGTALIKKYPKLESEFVYGDYKVYDVRKMIAKSEQEIGKATAKYFFYSNIMNFFKTEITLANGEIRKRPLIETNGETGEIVWDKGRDFATVRKVLSMPQVNIVKKTEVQTGGFSKESILPKRNSDKLIARKKDWDPKKYGGFDSPTVAYSVLVVAKVEKGKSKKLKSVKELLGITIMERSSFEKNPIDFLEAKGYKEVKKDLIIKLPKYSLFELENGRKRMLASAGELQKGNELALPSKYVNFLYLASHYEKLKGSPEDNEQKQLFVEQHKHYLDEIIEQISEFSKRVILADANLDKVLSAYNKHRDKPIREQAENIIHLFTLTNLGAPAAFKYFDTTIDRKRYTSTKEVLDATLIHQSITGLYETRIDLSQLGGDGGSGSETPGTSESATPESGGLDDEYRLYSPLVKPDQNIQFWLEQFPQAWAETAGMGLAKQVPPQVIQLKASATPVSVRQYPLSKEAQEGIRPHVQRLIQQGILVPVQSPWNTPLLPVRKPGTNDYRPVQDLREVNKRVQDIHPTVPNPYNLLCALPPQRSWYTVLDLKDAFFCLRLHPTSQPLFAFEWRDPGTGRTGQLTWTRLPQGFKNSPTIFNEALHRDLANFRIQHPQVTLLQYVDDLLLAGATKQDCLEGTKALLLELSDLGYRASAKKAQICRREVTYLGYSLRDGQRWLTEARKKTVVQIPAPTTAKQVREFLGKAGFCRLFIPGFATLAAPLYPLTKPKGEFSWAPEHQKAFDAIKKALLSAPALALPDVTKPFTLYVDERKGVARGVLTQTLGPWRRPVAYLSKKLDPVASGWPVCLKAIAAVAILVKDADKLTLGQNITVIAPHALENIVRQPPDRWMTNARMTHYQSLLLTERVTFAPPAALNPATLLPEETDEPVTHDCHQLLIEETGVRKDLTDIPLTGEVLTWFTDGSSYVVEGKRMAGAAVVDGTRTIWASSLPEGTSAQKAELMALTQALRLAEGKSINIYTDSRYAFATAHVHGAIYKQRGWLTSAGREIKNKEEILSLLEALHLPKRLAIIHCPGHQKAKDPISRGNQMADRVAKQAAQGVNLLPAGKRTADGSEFEKRTADGSEFESPKKKAKVE

SEQ ID NO: 91 - protein, 2086 aa, synthetic construct
MPAAKRVKLDGGDKKYSIGLDIGTNSVGWAVITDEYKVPSKKFKVLGNTDRHSIKKNLIGALLFDSGETAEATRLKRTARRRYTRRKNRICYLQEIFSNEMAKVDDSFFHRLEESFLVEEDKKHERHPIFGNIVDEVAYHEKYPTIYHLRKKLVDSTDKADLRLIYLALAHMIKFRGHFLIEGDLNPDNSDVDKLFIQLVQTYNQLFEENPINASGVDAKAILSARLSKSRRLENLIAQLPGEKKNGLFGNLIALSLGLTPNFKSNFDLAEDAKLQLSKDTYDDDLDNLLAQIGDQYADLFLAAKNLSDAILLSDILRVNTEITKAPLSASMIKRYDEHHQDLTLLKALVRQQLPEKYKEIFFDQSKNGYAGYIDGGASQEEFYKFIKPILEKMDGTEELLVKLNREDLLRKQRTFDNGSIPHQIHLGELHAILRRQEDFYPFLKDNREKIEKILTFRIPYYVGPLARGNSRFAWMTRKSEETITPWNFEEVVDKGASAQSFIERMTNFDKNLPNEKVLPKHSLLYEYFTVYNELTKVKYVTEGMRKPAFLSGEQKKAIVDLLFKTNRKVTVKQLKEDYFKKIECFDSVEISGVEDRFNASLGTYHDLLKIIKDKDFLDNEENEDILEDIVLTLTLFEDREMIEERLKTYAHLFDDKVMKQLKRRRYTGWGRLSRKLINGIRDKQSGKTILDFLKSDGFANRNFMQLIHDDSLTFKEDIQKAQVSGQGDSLHEHIANLAGSPAIKKGILQTVKVVDELVKVMGRHKPENIVIEMARENQTTQKGQKNSRERMKRIEEGIKELGSQILKEHPVENTQLQNEKLYLYYLQNGRDMYVDQELDINRLSDYDVDHIVPQSFLKDDSIDNKVLTRSDKARGKSDNVPSEEVVKKMKNYWRQLLNAKLITQRKFDNLTKAERGGLSELDKAGFIKRQLVETRQITKHVAQILDSRMNTKYDENDKLIREVKVITLKSKLVSDFRKDFQFYKVREINNYHHAHDAYLNAVVGTALIKKYPKLESEFVYGDYKVYDVRKMIAKSEQEIGKATAKYFFYSNIMNFFKTEITLANGEIRKRPLIETNGETGEIVWDKGRDFATVRKVLSMPQVNIVKKTEVQTGGFSKESILPKRNSDKLIARKKDWDPKKYGGFDSPTVAYSVLVVAKVEKGKSKKLKSVKELLGITIMERSSFEKNPIDFLEAKGYKEVKKDLIIKLPKYSLFELENGRKRMLASAGELQKGNELALPSKYVNFLYLASHYEKLKGSPEDNEQKQLFVEQHKHYLDEIIEQISEFSKRVILADANLDKVLSAYNKHRDKPIREQAENIIHLFTLTNLGAPAAFKYFDTTIDRKRYTSTKEVLDATLIHQSITGLYETRIDLSQLGGDGGGSSGGGPAPGGLDDEYRLYSPLVKPDQNIQFWLEQFPQAWAETAGMGLAKQVPPQVIQLKASATPVSVRQYPLSKEAQEGIRPHVQRLIQQGILVPVQSPWNTPLLPVRKPGTNDYRPVQDLREVNKRVQDIHPTVPNPYNLLCALPPQRSWYTVLDLKDAFFCLRLHPTSQPLFAFEWRDPGTGRTGQLTWTRLPQGFKNSPTIFNEALHRDLANFRIQHPQVTLLQYVDDLLLAGATKQDCLEGTKALLLELSDLGYRASAKKAQICRREVTYLGYSLRDGQRWLTEARKKTVVQIPAPTTAKQVREFLGKAGFCRLFIPGFATLAAPLYPLTKPKGEFSWAPEHQKAFDAIKKALLSAPALALPDVTKPFTLYVDERKGVARGVLTQTLGPWRRPVAYLSKKLDPVASGWPVCLKAIAAVAILVKDADKLTLGQNITVIAPHALENIVRQPPDRWMTNARMTHYQSLLLTERVTFAPPAALNPATLLPEETDEPVTHDCHQLLIEETGVRKDLTDIPLTGEVLTWFTDGSSYVVEGKRMAGAAVVDGTRTIWASSLPEGTSAQKAELMALTQALRLAEGKSINIYTDSRYAFATAHVHGAIYKQRGWLTSAGREIKNKEEILSLLEALHLPKRLAIIHCPGHQKAKDPISRGNQMADRVAKQAAQGVNLLPAGKRTADGSEFEKRTADGSEFESPKKKAKVE

SEQ ID NO: 92 - protein, 2088 aa, synthetic construct
MPAAKRVKLDGGDKKYSIGLDIGTNSVGWAVITDEYKVPSKKFKVLGNTDRHSIKKNLIGALLFDSGETAEATRLKRTARRRYTRRKNRICYLQEIFSNEMAKVDDSFFHRLEESFLVEEDKKHERHPIFGNIVDEVAYHEKYPTIYHLRKKLVDSTDKADLRLIYLALAHMIKFRGHFLIEGDLNPDNSDVDKLFIQLVQTYNQLFEENPINASGVDAKAILSARLSKSRRLENLIAQLPGEKKNGLFGNLIALSLGLTPNFKSNFDLAEDAKLQLSKDTYDDDLDNLLAQIGDQYADLFLAAKNLSDAILLSDILRVNTEITKAPLSASMIKRYDEHHQDLTLLKALVRQQLPEKYKEIFFDQSKNGYAGYIDGGASQEEFYKFIKPILEKMDGTEELLVKLNREDLLRKQRTFDNGSIPHQIHLGELHAILRRQEDFYPFLKDNREKIEKILTFRIPYYVGPLARGNSRFAWMTRKSEETITPWNFEEVVDKGASAQSFIERMTNFDKNLPNEKVLPKHSLLYEYFTVYNELTKVKYVTEGMRKPAFLSGEQKKAIVDLLFKTNRKVTVKQLKEDYFKKIECFDSVEISGVEDRFNASLGTYHDLLKIIKDKDFLDNEENEDILEDIVLTLTLFEDREMIEERLKTYAHLFDDKVMKQLKRRRYTGWGRLSRKLINGIRDKQSGKTILDFLKSDGFANRNFMQLIHDDSLTFKEDIQKAQVSGQGDSLHEHIANLAGSPAIKKGILQTVKVVDELVKVMGRHKPENIVIEMARENQTTQKGQKNSRERMKRIEEGIKELGSQILKEHPVENTQLQNEKLYLYYLQNGRDMYVDQELDINRLSDYDVDHIVPQSFLKDDSIDNKVLTRSDKARGKSDNVPSEEVVKKMKNYWRQLLNAKLITQRKFDNLTKAERGGLSELDKAGFIKRQLVETRQITKHVAQILDSRMNTKYDENDKLIREVKVITLKSKLVSDFRKDFQFYKVREINNYHHAHDAYLNAVVGTALIKKYPKLESEFVYGDYKVYDVRKMIAKSEQEIGKATAKYFFYSNIMNFFKTEITLANGEIRKRPLIETNGETGEIVWDKGRDFATVRKVLSMPQVNIVKKTEVQTGGFSKESILPKRNSDKLIARKKDWDPKKYGGFDSPTVAYSVLVVAKVEKGKSKKLKSVKELLGITIMERSSFEKNPIDFLEAKGYKEVKKDLIIKLPKYSLFELENGRKRMLASAGELQKGNELALPSKYVNFLYLASHYEKLKGSPEDNEQKQLFVEQHKHYLDEIIEQISEFSKRVILADANLDKVLSAYNKHRDKPIREQAENIIHLFTLTNLGAPAAFKYFDTTIDRKRYTSTKEVLDATLIHQSITGLYETRIDLSQLGGDGGGGSEAAAKGSSGGLDDEYRLYSPLVKPDQNIQFWLEQFPQAWAETAGMGLAKQVPPQVIQLKASATPVSVRQYPLSKEAQEGIRPHVQRLIQQGILVPVQSPWNTPLLPVRKPGTNDYRPVQDLREVNKRVQDIHPTVPNPYNLLCALPPQRSWYTVLDLKDAFFCLRLHPTSQPLFAFEWRDPGTGRTGQLTWTRLPQGFKNSPTIFNEALHRDLANFRIQHPQVTLLQYVDDLLLAGATKQDCLEGTKALLLELSDLGYRASAKKAQICRREVTYLGYSLRDGQRWLTEARKKTVVQIPAPTTAKQVREFLGKAGFCRLFIPGFATLAAPLYPLTKPKGEFSWAPEHQKAFDAIKKALLSAPALALPDVTKPFTLYVDERKGVARGVLTQTLGPWRRPVAYLSKKLDPVASGWPVCLKAIAAVAILVKDADKLTLGQNITVIAPHALENIVRQPPDRWMTNARMTHYQSLLLTERVTFAPPAALNPATLLPEETDEPVTHDCHQLLIEETGVRKDLTDIPLTGEVLTWFTDGSSYVVEGKRMAGAAVVDGTRTIWASSLPEGTSAQKAELMALTQALRLAEGKSINIYTDSRYAFATAHVHGAIYKQRGWLTSAGREIKNKEEILSLLEALHLPKRLAIIHCPGHQKAKDPISRGNQMADRVAKQAAQGVNLLPAGKRTADGSEFEKRTADGSEFESPKKKAKVE

SEQ ID NO: 93 - protein, 2088 aa, synthetic construct
MPAAKRVKLDGGDKKYSIGLDIGTNSVGWAVITDEYKVPSKKFKVLGNTDRHSIKKNLIGALLFDSGETAEATRLKRTARRRYTRRKNRICYLQEIFSNEMAKVDDSFFHRLEESFLVEEDKKHERHPIFGNIVDEVAYHEKYPTIYHLRKKLVDSTDKADLRLIYLALAHMIKFRGHFLIEGDLNPDNSDVDKLFIQLVQTYNQLFEENPINASGVDAKAILSARLSKSRRLENLIAQLPGEKKNGLFGNLIALSLGLTPNFKSNFDLAEDAKLQLSKDTYDDDLDNLLAQIGDQYADLFLAAKNLSDAILLSDILRVNTEITKAPLSASMIKRYDEHHQDLTLLKALVRQQLPEKYKEIFFDQSKNGYAGYIDGGASQEEFYKFIKPILEKMDGTEELLVKLNREDLLRKQRTFDNGSIPHQIHLGELHAILRRQEDFYPFLKDNREKIEKILTFRIPYYVGPLARGNSRFAWMTRKSEETITPWNFEEVVDKGASAQSFIERMTNFDKNLPNEKVLPKHSLLYEYFTVYNELTKVKYVTEGMRKPAFLSGEQKKAIVDLLFKTNRKVTVKQLKEDYFKKIECFDSVEISGVEDRFNASLGTYHDLLKIIKDKDFLDNEENEDILEDIVLTLTLFEDREMIEERLKTYAHLFDDKVMKQLKRRRYTGWGRLSRKLINGIRDKQSGKTILDFLKSDGFANRNFMQLIHDDSLTFKEDIQKAQVSGQGDSLHEHIANLAGSPAIKKGILQTVKVVDELVKVMGRHKPENIVIEMARENQTTQKGQKNSRERMKRIEEGIKELGSQILKEHPVENTQLQNEKLYLYYLQNGRDMYVDQELDINRLSDYDVDHIVPQSFLKDDSIDNKVLTRSDKARGKSDNVPSEEVVKKMKNYWRQLLNAKLITQRKFDNLTKAERGGLSELDKAGFIKRQLVETRQITKHVAQILDSRMNTKYDENDKLIREVKVITLKSKLVSDFRKDFQFYKVREINNYHHAHDAYLNAVVGTALIKKYPKLESEFVYGDYKVYDVRKMIAKSEQEIGKATAKYFFYSNIMNFFKTEITLANGEIRKRPLIETNGETGEIVWDKGRDFATVRKVLSMPQVNIVKKTEVQTGGFSKESILPKRNSDKLIARKKDWDPKKYGGFDSPTVAYSVLVVAKVEKGKSKKLKSVKELLGITIMERSSFEKNPIDFLEAKGYKEVKKDLIIKLPKYSLFELENGRKRMLASAGELQKGNELALPSKYVNFLYLASHYEKLKGSPEDNEQKQLFVEQHKHYLDEIIEQISEFSKRVILADANLDKVLSAYNKHRDKPIREQAENIIHLFTLTNLGAPAAFKYFDTTIDRKRYTSTKEVLDATLIHQSITGLYETRIDLSQLGGDGGPAPEAAAKGSSGGLDDEYRLYSPLVKPDQNIQFWLEQFPQAWAETAGMGLAKQVPPQVIQLKASATPVSVRQYPLSKEAQEGIRPHVQRLIQQGILVPVQSPWNTPLLPVRKPGTNDYRPVQDLREVNKRVQDIHPTVPNPYNLLCALPPQRSWYTVLDLKDAFFCLRLHPTSQPLFAFEWRDPGTGRTGQLTWTRLPQGFKNSPTIFNEALHRDLANFRIQHPQVTLLQYVDDLLLAGATKQDCLEGTKALLLELSDLGYRASAKKAQICRREVTYLGYSLRDGQRWLTEARKKTVVQIPAPTTAKQVREFLGKAGFCRLFIPGFATLAAPLYPLTKPKGEFSWAPEHQKAFDAIKKALLSAPALALPDVTKPFTLYVDERKGVARGVLTQTLGPWRRPVAYLSKKLDPVASGWPVCLKAIAAVAILVKDADKLTLGQNITVIAPHALENIVRQPPDRWMTNARMTHYQSLLLTERVTFAPPAALNPATLLPEETDEPVTHDCHQLLIEETGVRKDLTDIPLTGEVLTWFTDGSSYVVEGKRMAGAAVVDGTRTIWASSLPEGTSAQKAELMALTQALRLAEGKSINIYTDSRYAFATAHVHGAIYKQRGWLTSAGREIKNKEEILSLLEALHLPKRLAIIHCPGHQKAKDPISRGNQMADRVAKQAAQGVNLLPAGKRTADGSEFEKRTADGSEFESPKKKAKVE

SEQ ID NO: 94 - protein, 2088 aa, synthetic construct
MPAAKRVKLDGGDKKYSIGLDIGTNSVGWAVITDEYKVPSKKFKVLGNTDRHSIKKNLIGALLFDSGETAEATRLKRTARRRYTRRKNRICYLQEIFSNEMAKVDDSFFHRLEESFLVEEDKKHERHPIFGNIVDEVAYHEKYPTIYHLRKKLVDSTDKADLRLIYLALAHMIKFRGHFLIEGDLNPDNSDVDKLFIQLVQTYNQLFEENPINASGVDAKAILSARLSKSRRLENLIAQLPGEKKNGLFGNLIALSLGLTPNFKSNFDLAEDAKLQLSKDTYDDDLDNLLAQIGDQYADLFLAAKNLSDAILLSDILRVNTEITKAPLSASMIKRYDEHHQDLTLLKALVRQQLPEKYKEIFFDQSKNGYAGYIDGGASQEEFYKFIKPILEKMDGTEELLVKLNREDLLRKQRTFDNGSIPHQIHLGELHAILRRQEDFYPFLKDNREKIEKILTFRIPYYVGPLARGNSRFAWMTRKSEETITPWNFEEVVDKGASAQSFIERMTNFDKNLPNEKVLPKHSLLYEYFTVYNELTKVKYVTEGMRKPAFLSGEQKKAIVDLLFKTNRKVTVKQLKEDYFKKIECFDSVEISGVEDRFNASLGTYHDLLKIIKDKDFLDNEENEDILEDIVLTLTLFEDREMIEERLKTYAHLFDDKVMKQLKRRRYTGWGRLSRKLINGIRDKQSGKTILDFLKSDGFANRNFMQLIHDDSLTFKEDIQKAQVSGQGDSLHEHIANLAGSPAIKKGILQTVKVVDELVKVMGRHKPENIVIEMARENQTTQKGQKNSRERMKRIEEGIKELGSQILKEHPVENTQLQNEKLYLYYLQNGRDMYVDQELDINRLSDYDVDHIVPQSFLKDDSIDNKVLTRSDKARGKSDNVPSEEVVKKMKNYWRQLLNAKLITQRKFDNLTKAERGGLSELDKAGFIKRQLVETRQITKHVAQILDSRMNTKYDENDKLIREVKVITLKSKLVSDFRKDFQFYKVREINNYHHAHDAYLNAVVGTALIKKYPKLESEFVYGDYKVYDVRKMIAKSEQEIGKATAKYFFYSNIMNFFKTEITLANGEIRKRPLIETNGETGEIVWDKGRDFATVRKVLSMPQVNIVKKTEVQTGGFSKESILPKRNSDKLIARKKDWDPKKYGGFDSPTVAYSVLVVAKVEKGKSKKLKSVKELLGITIMERSSFEKNPIDFLEAKGYKEVKKDLIIKLPKYSLFELENGRKRMLASAGELQKGNELALPSKYVNFLYLASHYEKLKGSPEDNEQKQLFVEQHKHYLDEIIEQISEFSKRVILADANLDKVLSAYNKHRDKPIREQAENIIHLFTLTNLGAPAAFKYFDTTIDRKRYTSTKEVLDATLIHQSITGLYETRIDLSQLGGDGGGGSGGGEAAAKGGLDDEYRLYSPLVKPDQNIQFWLEQFPQAWAETAGMGLAKQVPPQVIQLKASATPVSVRQYPLSKEAQEGIRPHVQRLIQQGILVPVQSPWNTPLLPVRKPGTNDYRPVQDLREVNKRVQDIHPTVPNPYNLLCALPPQRSWYTVLDLKDAFFCLRLHPTSQPLFAFEWRDPGTGRTGQLTWTRLPQGFKNSPTIFNEALHRDLANFRIQHPQVTLLQYVDDLLLAGATKQDCLEGTKALLLELSDLGYRASAKKAQICRREVTYLGYSLRDGQRWLTEARKKTVVQIPAPTTAKQVREFLGKAGFCRLFIPGFATLAAPLYPLTKPKGEFSWAPEHQKAFDAIKKALLSAPALALPDVTKPFTLYVDERKGVARGVLTQTLGPWRRPVAYLSKKLDPVASGWPVCLKAIAAVAILVKDADKLTLGQNITVIAPHALENIVRQPPDRWMTNARMTHYQSLLLTERVTFAPPAALNPATLLPEETDEPVTHDCHQLLIEETGVRKDLTDIPLTGEVLTWFTDGSSYVVEGKRMAGAAVVDGTRTIWASSLPEGTSAQKAELMALTQALRLAEGKSINIYTDSRYAFATAHVHGAIYKQRGWLTSAGREIKNKEEILSLLEALHLPKRLAIIHCPGHQKAKDPISRGNQMADRVAKQAAQGVNLLPAGKRTADGSEFEKRTADGSEFESPKKKAKVE

SEQ ID NO: 95 - protein, 2086 aa, synthetic construct
MPAAKRVKLDGGDKKYSIGLDIGTNSVGWAVITDEYKVPSKKFKVLGNTDRHSIKKNLIGALLFDSGETAEATRLKRTARRRYTRRKNRICYLQEIFSNEMAKVDDSFFHRLEESFLVEEDKKHERHPIFGNIVDEVAYHEKYPTIYHLRKKLVDSTDKADLRLIYLALAHMIKFRGHFLIEGDLNPDNSDVDKLFIQLVQTYNQLFEENPINASGVDAKAILSARLSKSRRLENLIAQLPGEKKNGLFGNLIALSLGLTPNFKSNFDLAEDAKLQLSKDTYDDDLDNLLAQIGDQYADLFLAAKNLSDAILLSDILRVNTEITKAPLSASMIKRYDEHHQDLTLLKALVRQQLPEKYKEIFFDQSKNGYAGYIDGGASQEEFYKFIKPILEKMDGTEELLVKLNREDLLRKQRTFDNGSIPHQIHLGELHAILRRQEDFYPFLKDNREKIEKILTFRIPYYVGPLARGNSRFAWMTRKSEETITPWNFEEVVDKGASAQSFIERMTNFDKNLPNEKVLPKHSLLYEYFTVYNELTKVKYVTEGMRKPAFLSGEQKKAIVDLLFKTNRKVTVKQLKEDYFKKIECFDSVEISGVEDRFNASLGTYHDLLKIIKDKDFLDNEENEDILEDIVLTLTLFEDREMIEERLKTYAHLFDDKVMKQLKRRRYTGWGRLSRKLINGIRDKQSGKTILDFLKSDGFANRNFMQLIHDDSLTFKEDIQKAQVSGQGDSLHEHIANLAGSPAIKKGILQTVKVVDELVKVMGRHKPENIVIEMARENQTTQKGQKNSRERMKRIEEGIKELGSQILKEHPVENTQLQNEKLYLYYLQNGRDMYVDQELDINRLSDYDVDHIVPQSFLKDDSIDNKVLTRSDKARGKSDNVPSEEVVKKMKNYWRQLLNAKLITQRKFDNLTKAERGGLSELDKAGFIKRQLVETRQITKHVAQILDSRMNTKYDENDKLIREVKVITLKSKLVSDFRKDFQFYKVREINNYHHAHDAYLNAVVGTALIKKYPKLESEFVYGDYKVYDVRKMIAKSEQEIGKATAKYFFYSNIMNFFKTEITLANGEIRKRPLIETNGETGEIVWDKGRDFATVRKVLSMPQVNIVKKTEVQTGGFSKESILPKRNSDKLIARKKDWDPKKYGGFDSPTVAYSVLVVAKVEKGKSKKLKSVKELLGITIMERSSFEKNPIDFLEAKGYKEVKKDLIIKLPKYSLFELENGRKRMLASAGELQKGNELALPSKYVNFLYLASHYEKLKGSPEDNEQKQLFVEQHKHYLDEIIEQISEFSKRVILADANLDKVLSAYNKHRDKPIREQAENIIHLFTLTNLGAPAAFKYFDTTIDRKRYTSTKEVLDATLIHQSITGLYETRIDLSQLGGDGGGGGGSSGGSGGLDDEYRLYSPLVKPDQNIQFWLEQFPQAWAETAGMGLAKQVPPQVIQLKASATPVSVRQYPLSKEAQEGIRPHVQRLIQQGILVPVQSPWNTPLLPVRKPGTNDYRPVQDLREVNKRVQDIHPTVPNPYNLLCALPPQRSWYTVLDLKDAFFCLRLHPTSQPLFAFEWRDPGTGRTGQLTWTRLPQGFKNSPTIFNEALHRDLANFRIQHPQVTLLQYVDDLLLAGATKQDCLEGTKALLLELSDLGYRASAKKAQICRREVTYLGYSLRDGQRWLTEARKKTVVQIPAPTTAKQVREFLGKAGFCRLFIPGFATLAAPLYPLTKPKGEFSWAPEHQKAFDAIKKALLSAPALALPDVTKPFTLYVDERKGVARGVLTQTLGPWRRPVAYLSKKLDPVASGWPVCLKAIAAVAILVKDADKLTLGQNITVIAPHALENIVRQPPDRWMTNARMTHYQSLLLTERVTFAPPAALNPATLLPEETDEPVTHDCHQLLIEETGVRKDLTDIPLTGEVLTWFTDGSSYVVEGKRMAGAAVVDGTRTIWASSLPEGTSAQKAELMALTQALRLAEGKSINIYTDSRYAFATAHVHGAIYKQRGWLTSAGREIKNKEEILSLLEALHLPKRLAIIHCPGHQKAKDPISRGNQMADRVAKQAAQGVNLLPAGKRTADGSEFEKRTADGSEFESPKKKAKVE

SEQ ID NO: 96 - protein, 2104 aa, synthetic construct
MPAAKRVKLDGGDKKYSIGLDIGTNSVGWAVITDEYKVPSKKFKVLGNTDRHSIKKNLIGALLFDSGETAEATRLKRTARRRYTRRKNRICYLQEIFSNEMAKVDDSFFHRLEESFLVEEDKKHERHPIFGNIVDEVAYHEKYPTIYHLRKKLVDSTDKADLRLIYLALAHMIKFRGHFLIEGDLNPDNSDVDKLFIQLVQTYNQLFEENPINASGVDAKAILSARLSKSRRLENLIAQLPGEKKNGLFGNLIALSLGLTPNFKSNFDLAEDAKLQLSKDTYDDDLDNLLAQIGDQYADLFLAAKNLSDAILLSDILRVNTEITKAPLSASMIKRYDEHHQDLTLLKALVRQQLPEKYKEIFFDQSKNGYAGYIDGGASQEEFYKFIKPILEKMDGTEELLVKLNREDLLRKQRTFDNGSIPHQIHLGELHAILRRQEDFYPFLKDNREKIEKILTFRIPYYVGPLARGNSRFAWMTRKSEETITPWNFEEVVDKGASAQSFIERMTNFDKNLPNEKVLPKHSLLYEYFTVYNELTKVKYVTEGMRKPAFLSGEQKKAIVDLLFKTNRKVTVKQLKEDYFKKIECFDSVEISGVEDRFNASLGTYHDLLKIIKDKDFLDNEENEDILEDIVLTLTLFEDREMIEERLKTYAHLFDDKVMKQLKRRRYTGWGRLSRKLINGIRDKQSGKTILDFLKSDGFANRNFMQLIHDDSLTFKEDIQKAQVSGQGDSLHEHIANLAGSPAIKKGILQTVKVVDELVKVMGRHKPENIVIEMARENQTTQKGQKNSRERMKRIEEGIKELGSQILKEHPVENTQLQNEKLYLYYLQNGRDMYVDQELDINRLSDYDVDHIVPQSFLKDDSIDNKVLTRSDKARGKSDNVPSEEVVKKMKNYWRQLLNAKLITQRKFDNLTKAERGGLSELDKAGFIKRQLVETRQITKHVAQILDSRMNTKYDENDKLIREVKVITLKSKLVSDFRKDFQFYKVREINNYHHAHDAYLNAVVGTALIKKYPKLESEFVYGDYKVYDVRKMIAKSEQEIGKATAKYFFYSNIMNFFKTEITLANGEIRKRPLIETNGETGEIVWDKGRDFATVRKVLSMPQVNIVKKTEVQTGGFSKESILPKRNSDKLIARKKDWDPKKYGGFDSPTVAYSVLVVAKVEKGKSKKLKSVKELLGITIMERSSFEKNPIDFLEAKGYKEVKKDLIIKLPKYSLFELENGRKRMLASAGELQKGNELALPSKYVNFLYLASHYEKLKGSPEDNEQKQLFVEQHKHYLDEIIEQISEFSKRVILADANLDKVLSAYNKHRDKPIREQAENIIHLFTLTNLGAPAAFKYFDTTIDRKRYTSTKEVLDATLIHQSITGLYETRIDLSQLGGDGGEAAAKEAAAKEAAAKEAAAKEAAAKGGTLQLDDEYRLYSPLVKPDQNIQFWLEQFPQAWAETAGMGLAKQVPPQVIQLKASATPVSVRQYPLSKEAQEGIRPHVQRLIQQGILVPVQSPWNTPLLPVRKPGTNDYRPVQDLREVNKRVQDIHPTVPNPYNLLCALPPQRSWYTVLDLKDAFFCLRLHPTSQPLFAFEWRDPGTGRTGQLTWTRLPQGFKNSPTIFDEALHRDLANFRIQHPQVTLLQYVDDLLLAGATKQDCLEGTKALLLELSDLGYRASAKKAQICRREVTYLGYSLRDGQRWLTEARKKTVVQIPAPTTAKQVREFLGTAGFCRLWIPGFATLAAPLYPLTKEKGEFSWAPEHQKAFDAIKKALLSAPALALPDVTKPFTLYVDERKGVARGVLTQTLGPWRRPVAYLSKKLDPVASGWPVCLKAIAAVAILVKDADKLTLGQNITVIAPHALENIVRQPPDRWMTNARMTHYQSLLLTERVTFAPPAALNPATLLPEETDEPVTHDCHQLLIEETGVRKDLTDIPLTGEVLTWFTDGSSYVVEGKRMAGAAVVDGTRTIWASSLPEGTSAQKAELMALTQALRLAEGKSINIYTDSRYAFATAHVHGAIYKQRGLLTSAGREIKNKEEILSLLEALHLPKRLAIIHCPGHQKAKDPISRGNQMADRVAKQAAQGVNLLAGKRTADGSEFEKRTADGSEFESPKKKAKVE

SEQ ID NO: 97 - protein, 2094 aa, synthetic construct
MPAAKRVKLDGGDKKYSIGLDIGTNSVGWAVITDEYKVPSKKFKVLGNTDRHSIKKNLIGALLFDSGETAEATRLKRTARRRYTRRKNRICYLQEIFSNEMAKVDDSFFHRLEESFLVEEDKKHERHPIFGNIVDEVAYHEKYPTIYHLRKKLVDSTDKADLRLIYLALAHMIKFRGHFLIEGDLNPDNSDVDKLFIQLVQTYNQLFEENPINASGVDAKAILSARLSKSRRLENLIAQLPGEKKNGLFGNLIALSLGLTPNFKSNFDLAEDAKLQLSKDTYDDDLDNLLAQIGDQYADLFLAAKNLSDAILLSDILRVNTEITKAPLSASMIKRYDEHHQDLTLLKALVRQQLPEKYKEIFFDQSKNGYAGYIDGGASQEEFYKFIKPILEKMDGTEELLVKLNREDLLRKQRTFDNGSIPHQIHLGELHAILRRQEDFYPFLKDNREKIEKILTFRIPYYVGPLARGNSRFAWMTRKSEETITPWNFEEVVDKGASAQSFIERMTNFDKNLPNEKVLPKHSLLYEYFTVYNELTKVKYVTEGMRKPAFLSGEQKKAIVDLLFKTNRKVTVKQLKEDYFKKIECFDSVEISGVEDRFNASLGTYHDLLKIIKDKDFLDNEENEDILEDIVLTLTLFEDREMIEERLKTYAHLFDDKVMKQLKRRRYTGWGRLSRKLINGIRDKQSGKTILDFLKSDGFANRNFMQLIHDDSLTFKEDIQKAQVSGQGDSLHEHIANLAGSPAIKKGILQTVKVVDELVKVMGRHKPENIVIEMARENQTTQKGQKNSRERMKRIEEGIKELGSQILKEHPVENTQLQNEKLYLYYLQNGRDMYVDQELDINRLSDYDVDHIVPQSFLKDDSIDNKVLTRSDKARGKSDNVPSEEVVKKMKNYWRQLLNAKLITQRKFDNLTKAERGGLSELDKAGFIKRQLVETRQITKHVAQILDSRMNTKYDENDKLIREVKVITLKSKLVSDFRKDFQFYKVREINNYHHAHDAYLNAVVGTALIKKYPKLESEFVYGDYKVYDVRKMIAKSEQEIGKATAKYFFYSNIMNFFKTEITLANGEIRKRPLIETNGETGEIVWDKGRDFATVRKVLSMPQVNIVKKTEVQTGGFSKESILPKRNSDKLIARKKDWDPKKYGGFDSPTVAYSVLVVAKVEKGKSKKLKSVKELLGITIMERSSFEKNPIDFLEAKGYKEVKKDLIIKLPKYSLFELENGRKRMLASAGELQKGNELALPSKYVNFLYLASHYEKLKGSPEDNEQKQLFVEQHKHYLDEIIEQISEFSKRVILADANLDKVLSAYNKHRDKPIREQAENIIHLFTLTNLGAPAAFKYFDTTIDRKRYTSTKEVLDATLIHQSITGLYETRIDLSQLGGDGGEAAAKGGGGSEAAAKGGTLQLDDEYRLYSPLVKPDQNIQFWLEQFPQAWAETAGMGLAKQVPPQVIQLKASATPVSVRQYPLSKEAQEGIRPHVQRLIQQGILVPVQSPWNTPLLPVRKPGTNDYRPVQDLREVNKRVQDIHPTVPNPYNLLCALPPQRSWYTVLDLKDAFFCLRLHPTSQPLFAFEWRDPGTGRTGQLTWTRLPQGFKNSPTIFDEALHRDLANFRIQHPQVTLLQYVDDLLLAGATKQDCLEGTKALLLELSDLGYRASAKKAQICRREVTYLGYSLRDGQRWLTEARKKTVVQIPAPTTAKQVREFLGTAGFCRLWIPGFATLAAPLYPLTKEKGEFSWAPEHQKAFDAIKKALLSAPALALPDVTKPFTLYVDERKGVARGVLTQTLGPWRRPVAYLSKKLDPVASGWPVCLKAIAAVAILVKDADKLTLGQNITVIAPHALENIVRQPPDRWMTNARMTHYQSLLLTERVTFAPPAALNPATLLPEETDEPVTHDCHQLLIEETGVRKDLTDIPLTGEVLTWFTDGSSYVVEGKRMAGAAVVDGTRTIWASSLPEGTSAQKAELMALTQALRLAEGKSINIYTDSRYAFATAHVHGAIYKQRGLLTSAGREIKNKEEILSLLEALHLPKRLAIIHCPGHQKAKDPISRGNQMADRVAKQAAQGVNLLAGKRTADGSEFEKRTADGSEFESPKKKAKVE

SEQ ID NO: 98 - protein, 2125 aa, synthetic construct
MPAAKRVKLDGGDKKYSIGLDIGTNSVGWAVITDEYKVPSKKFKVLGNTDRHSIKKNLIGALLFDSGETAEATRLKRTARRRYTRRKNRICYLQEIFSNEMAKVDDSFFHRLEESFLVEEDKKHERHPIFGNIVDEVAYHEKYPTIYHLRKKLVDSTDKADLRLIYLALAHMIKFRGHFLIEGDLNPDNSDVDKLFIQLVQTYNQLFEENPINASGVDAKAILSARLSKSRRLENLIAQLPGEKKNGLFGNLIALSLGLTPNFKSNFDLAEDAKLQLSKDTYDDDLDNLLAQIGDQYADLFLAAKNLSDAILLSDILRVNTEITKAPLSASMIKRYDEHHQDLTLLKALVRQQLPEKYKEIFFDQSKNGYAGYIDGGASQEEFYKFIKPILEKMDGTEELLVKLNREDLLRKQRTFDNGSIPHQIHLGELHAILRRQEDFYPFLKDNREKIEKILTFRIPYYVGPLARGNSRFAWMTRKSEETITPWNFEEVVDKGASAQSFIERMTNFDKNLPNEKVLPKHSLLYEYFTVYNELTKVKYVTEGMRKPAFLSGEQKKAIVDLLFKTNRKVTVKQLKEDYFKKIECFDSVEISGVEDRFNASLGTYHDLLKIIKDKDFLDNEENEDILEDIVLTLTLFEDREMIEERLKTYAHLFDDKVMKQLKRRRYTGWGRLSRKLINGIRDKQSGKTILDFLKSDGFANRNFMQLIHDDSLTFKEDIQKAQVSGQGDSLHEHIANLAGSPAIKKGILQTVKVVDELVKVMGRHKPENIVIEMARENQTTQKGQKNSRERMKRIEEGIKELGSQILKEHPVENTQLQNEKLYLYYLQNGRDMYVDQELDINRLSDYDVDHIVPQSFLKDDSIDNKVLTRSDKARGKSDNVPSEEVVKKMKNYWRQLLNAKLITQRKFDNLTKAERGGLSELDKAGFIKRQLVETRQITKHVAQILDSRMNTKYDENDKLIREVKVITLKSKLVSDFRKDFQFYKVREINNYHHAHDAYLNAVVGTALIKKYPKLESEFVYGDYKVYDVRKMIAKSEQEIGKATAKYFFYSNIMNFFKTEITLANGEIRKRPLIETNGETGEIVWDKGRDFATVRKVLSMPQVNIVKKTEVQTGGFSKESILPKRNSDKLIARKKDWDPKKYGGFDSPTVAYSVLVVAKVEKGKSKKLKSVKELLGITIMERSSFEKNPIDFLEAKGYKEVKKDLIIKLPKYSLFELENGRKRMLASAGELQKGNELALPSKYVNFLYLASHYEKLKGSPEDNEQKQLFVEQHKHYLDEIIEQISEFSKRVILADANLDKVLSAYNKHRDKPIREQAENIIHLFTLTNLGAPAAFKYFDTTIDRKRYTSTKEVLDATLIHQSITGLYETRIDLSQLGGDGGAEAAAKEAAAKEAAAKEAAAKALEAEAAAKEAAAKEAAAKEAAAKAGGTLQLDDEYRLYSPLVKPDQNIQFWLEQFPQAWAETAGMGLAKQVPPQVIQLKASATPVSVRQYPLSKEAQEGIRPHVQRLIQQGILVPVQSPWNTPLLPVRKPGTNDYRPVQDLREVNKRVQDIHPTVPNPYNLLCALPPQRSWYTVLDLKDAFFCLRLHPTSQPLFAFEWRDPGTGRTGQLTWTRLPQGFKNSPTIFDEALHRDLANFRIQHPQVTLLQYVDDLLLAGATKQDCLEGTKALLLELSDLGYRASAKKAQICRREVTYLGYSLRDGQRWLTEARKKTVVQIPAPTTAKQVREFLGTAGFCRLWIPGFATLAAPLYPLTKEKGEFSWAPEHQKAFDAIKKALLSAPALALPDVTKPFTLYVDERKGVARGVLTQTLGPWRRPVAYLSKKLDPVASGWPVCLKAIAAVAILVKDADKLTLGQNITVIAPHALENIVRQPPDRWMTNARMTHYQSLLLTERVTFAPPAALNPATLLPEETDEPVTHDCHQLLIEETGVRKDLTDIPLTGEVLTWFTDGSSYVVEGKRMAGAAVVDGTRTIWASSLPEGTSAQKAELMALTQALRLAEGKSINIYTDSRYAFATAHVHGAIYKQRGLLTSAGREIKNKEEILSLLEALHLPKRLAIIHCPGHQKAKDPISRGNQMADRVAKQAAQGVNLLAGKRTADGSEFEKRTADGSEFESPKKKAKVE

SEQ ID NO: 99 - protein, 2094 aa, synthetic construct
MPAAKRVKLDGGDKKYSIGLDIGTNSVGWAVITDEYKVPSKKFKVLGNTDRHSIKKNLIGALLFDSGETAEATRLKRTARRRYTRRKNRICYLQEIFSNEMAKVDDSFFHRLEESFLVEEDKKHERHPIFGNIVDEVAYHEKYPTIYHLRKKLVDSTDKADLRLIYLALAHMIKFRGHFLIEGDLNPDNSDVDKLFIQLVQTYNQLFEENPINASGVDAKAILSARLSKSRRLENLIAQLPGEKKNGLFGNLIALSLGLTPNFKSNFDLAEDAKLQLSKDTYDDDLDNLLAQIGDQYADLFLAAKNLSDAILLSDILRVNTEITKAPLSASMIKRYDEHHQDLTLLKALVRQQLPEKYKEIFFDQSKNGYAGYIDGGASQEEFYKFIKPILEKMDGTEELLVKLNREDLLRKQRTFDNGSIPHQIHLGELHAILRRQEDFYPFLKDNREKIEKILTFRIPYYVGPLARGNSRFAWMTRKSEETITPWNFEEVVDKGASAQSFIERMTNFDKNLPNEKVLPKHSLLYEYFTVYNELTKVKYVTEGMRKPAFLSGEQKKAIVDLLFKTNRKVTVKQLKEDYFKKIECFDSVEISGVEDRFNASLGTYHDLLKIIKDKDFLDNEENEDILEDIVLTLTLFEDREMIEERLKTYAHLFDDKVMKQLKRRRYTGWGRLSRKLINGIRDKQSGKTILDFLKSDGFANRNFMQLIHDDSLTFKEDIQKAQVSGQGDSLHEHIANLAGSPAIKKGILQTVKVVDELVKVMGRHKPENIVIEMARENQTTQKGQKNSRERMKRIEEGIKELGSQILKEHPVENTQLQNEKLYLYYLQNGRDMYVDQELDINRLSDYDVDHIVPQSFLKDDSIDNKVLTRSDKARGKSDNVPSEEVVKKMKNYWRQLLNAKLITQRKFDNLTKAERGGLSELDKAGFIKRQLVETRQITKHVAQILDSRMNTKYDENDKLIREVKVITLKSKLVSDFRKDFQFYKVREINNYHHAHDAYLNAVVGTALIKKYPKLESEFVYGDYKVYDVRKMIAKSEQEIGKATAKYFFYSNIMNFFKTEITLANGEIRKRPLIETNGETGEIVWDKGRDFATVRKVLSMPQVNIVKKTEVQTGGFSKESILPKRNSDKLIARKKDWDPKKYGGFDSPTVAYSVLVVAKVEKGKSKKLKSVKELLGITIMERSSFEKNPIDFLEAKGYKEVKKDLIIKLPKYSLFELENGRKRMLASAGELQKGNELALPSKYVNFLYLASHYEKLKGSPEDNEQKQLFVEQHKHYLDEIIEQISEFSKRVILADANLDKVLSAYNKHRDKPIREQAENIIHLFTLTNLGAPAAFKYFDTTIDRKRYTSTKEVLDATLIHQSITGLYETRIDLSQLGGDGGGSSGSSGSSGSSGSSGGTLQLDDEYRLYSPLVKPDQNIQFWLEQFPQAWAETAGMGLAKQVPPQVIQLKASATPVSVRQYPLSKEAQEGIRPHVQRLIQQGILVPVQSPWNTPLLPVRKPGTNDYRPVQDLREVNKRVQDIHPTVPNPYNLLCALPPQRSWYTVLDLKDAFFCLRLHPTSQPLFAFEWRDPGTGRTGQLTWTRLPQGFKNSPTIFDEALHRDLANFRIQHPQVTLLQYVDDLLLAGATKQDCLEGTKALLLELSDLGYRASAKKAQICRREVTYLGYSLRDGQRWLTEARKKTVVQIPAPTTAKQVREFLGTAGFCRLWIPGFATLAAPLYPLTKEKGEFSWAPEHQKAFDAIKKALLSAPALALPDVTKPFTLYVDERKGVARGVLTQTLGPWRRPVAYLSKKLDPVASGWPVCLKAIAAVAILVKDADKLTLGQNITVIAPHALENIVRQPPDRWMTNARMTHYQSLLLTERVTFAPPAALNPATLLPEETDEPVTHDCHQLLIEETGVRKDLTDIPLTGEVLTWFTDGSSYVVEGKRMAGAAVVDGTRTIWASSLPEGTSAQKAELMALTQALRLAEGKSINIYTDSRYAFATAHVHGAIYKQRGLLTSAGREIKNKEEILSLLEALHLPKRLAIIHCPGHQKAKDPISRGNQMADRVAKQAAQGVNLLAGKRTADGSEFEKRTADGSEFESPKKKAKVE

SEQ ID NO: 100 - protein, 2085 aa, synthetic construct
MPAAKRVKLDGGDKKYSIGLDIGTNSVGWAVITDEYKVPSKKFKVLGNTDRHSIKKNLIGALLFDSGETAEATRLKRTARRRYTRRKNRICYLQEIFSNEMAKVDDSFFHRLEESFLVEEDKKHERHPIFGNIVDEVAYHEKYPTIYHLRKKLVDSTDKADLRLIYLALAHMIKFRGHFLIEGDLNPDNSDVDKLFIQLVQTYNQLFEENPINASGVDAKAILSARLSKSRRLENLIAQLPGEKKNGLFGNLIALSLGLTPNFKSNFDLAEDAKLQLSKDTYDDDLDNLLAQIGDQYADLFLAAKNLSDAILLSDILRVNTEITKAPLSASMIKRYDEHHQDLTLLKALVRQQLPEKYKEIFFDQSKNGYAGYIDGGASQEEFYKFIKPILEKMDGTEELLVKLNREDLLRKQRTFDNGSIPHQIHLGELHAILRRQEDFYPFLKDNREKIEKILTFRIPYYVGPLARGNSRFAWMTRKSEETITPWNFEEVVDKGASAQSFIERMTNFDKNLPNEKVLPKHSLLYEYFTVYNELTKVKYVTEGMRKPAFLSGEQKKAIVDLLFKTNRKVTVKQLKEDYFKKIECFDSVEISGVEDRFNASLGTYHDLLKIIKDKDFLDNEENEDILEDIVLTLTLFEDREMIEERLKTYAHLFDDKVMKQLKRRRYTGWGRLSRKLINGIRDKQSGKTILDFLKSDGFANRNFMQLIHDDSLTFKEDIQKAQVSGQGDSLHEHIANLAGSPAIKKGILQTVKVVDELVKVMGRHKPENIVIEMARENQTTQKGQKNSRERMKRIEEGIKELGSQILKEHPVENTQLQNEKLYLYYLQNGRDMYVDQELDINRLSDYDVDHIVPQSFLKDDSIDNKVLTRSDKARGKSDNVPSEEVVKKMKNYWRQLLNAKLITQRKFDNLTKAERGGLSELDKAGFIKRQLVETRQITKHVAQILDSRMNTKYDENDKLIREVKVITLKSKLVSDFRKDFQFYKVREINNYHHAHDAYLNAVVGTALIKKYPKLESEFVYGDYKVYDVRKMIAKSEQEIGKATAKYFFYSNIMNFFKTEITLANGEIRKRPLIETNGETGEIVWDKGRDFATVRKVLSMPQVNIVKKTEVQTGGFSKESILPKRNSDKLIARKKDWDPKKYGGFDSPTVAYSVLVVAKVEKGKSKKLKSVKELLGITIMERSSFEKNPIDFLEAKGYKEVKKDLIIKLPKYSLFELENGRKRMLASAGELQKGNELALPSKYVNFLYLASHYEKLKGSPEDNEQKQLFVEQHKHYLDEIIEQISEFSKRVILADANLDKVLSAYNKHRDKPIREQAENIIHLFTLTNLGAPAAFKYFDTTIDRKRYTSTKEVLDATLIHQSITGLYETRIDLSQLGGDGGGGGGSSGGTLQLDDEYRLYSPLVKPDQNIQFWLEQFPQAWAETAGMGLAKQVPPQVIQLKASATPVSVRQYPLSKEAQEGIRPHVQRLIQQGILVPVQSPWNTPLLPVRKPGTNDYRPVQDLREVNKRVQDIHPTVPNPYNLLCALPPQRSWYTVLDLKDAFFCLRLHPTSQPLFAFEWRDPGTGRTGQLTWTRLPQGFKNSPTIFDEALHRDLANFRIQHPQVTLLQYVDDLLLAGATKQDCLEGTKALLLELSDLGYRASAKKAQICRREVTYLGYSLRDGQRWLTEARKKTVVQIPAPTTAKQVREFLGTAGFCRLWIPGFATLAAPLYPLTKEKGEFSWAPEHQKAFDAIKKALLSAPALALPDVTKPFTLYVDERKGVARGVLTQTLGPWRRPVAYLSKKLDPVASGWPVCLKAIAAVAILVKDADKLTLGQNITVIAPHALENIVRQPPDRWMTNARMTHYQSLLLTERVTFAPPAALNPATLLPEETDEPVTHDCHQLLIEETGVRKDLTDIPLTGEVLTWFTDGSSYVVEGKRMAGAAVVDGTRTIWASSLPEGTSAQKAELMALTQALRLAEGKSINIYTDSRYAFATAHVHGAIYKQRGLLTSAGREIKNKEEILSLLEALHLPKRLAIIHCPGHQKAKDPISRGNQMADRVAKQAAQGVNLLAGKRTADGSEFEKRTADGSEFESPKKKAKVE

SEQ ID NO: 101 - protein, 2088 aa, synthetic construct
MPAAKRVKLDGGDKKYSIGLDIGTNSVGWAVITDEYKVPSKKFKVLGNTDRHSIKKNLIGALLFDSGETAEATRLKRTARRRYTRRKNRICYLQEIFSNEMAKVDDSFFHRLEESFLVEEDKKHERHPIFGNIVDEVAYHEKYPTIYHLRKKLVDSTDKADLRLIYLALAHMIKFRGHFLIEGDLNPDNSDVDKLFIQLVQTYNQLFEENPINASGVDAKAILSARLSKSRRLENLIAQLPGEKKNGLFGNLIALSLGLTPNFKSNFDLAEDAKLQLSKDTYDDDLDNLLAQIGDQYADLFLAAKNLSDAILLSDILRVNTEITKAPLSASMIKRYDEHHQDLTLLKALVRQQLPEKYKEIFFDQSKNGYAGYIDGGASQEEFYKFIKPILEKMDGTEELLVKLNREDLLRKQRTFDNGSIPHQIHLGELHAILRRQEDFYPFLKDNREKIEKILTFRIPYYVGPLARGNSRFAWMTRKSEETITPWNFEEVVDKGASAQSFIERMTNFDKNLPNEKVLPKHSLLYEYFTVYNELTKVKYVTEGMRKPAFLSGEQKKAIVDLLFKTNRKVTVKQLKEDYFKKIECFDSVEISGVEDRFNASLGTYHDLLKIIKDKDFLDNEENEDILEDIVLTLTLFEDREMIEERLKTYAHLFDDKVMKQLKRRRYTGWGRLSRKLINGIRDKQSGKTILDFLKSDGFANRNFMQLIHDDSLTFKEDIQKAQVSGQGDSLHEHIANLAGSPAIKKGILQTVKVVDELVKVMGRHKPENIVIEMARENQTTQKGQKNSRERMKRIEEGIKELGSQILKEHPVENTQLQNEKLYLYYLQNGRDMYVDQELDINRLSDYDVDHIVPQSFLKDDSIDNKVLTRSDKARGKSDNVPSEEVVKKMKNYWRQLLNAKLITQRKFDNLTKAERGGLSELDKAGFIKRQLVETRQITKHVAQILDSRMNTKYDENDKLIREVKVITLKSKLVSDFRKDFQFYKVREINNYHHAHDAYLNAVVGTALIKKYPKLESEFVYGDYKVYDVRKMIAKSEQEIGKATAKYFFYSNIMNFFKTEITLANGEIRKRPLIETNGETGEIVWDKGRDFATVRKVLSMPQVNIVKKTEVQTGGFSKESILPKRNSDKLIARKKDWDPKKYGGFDSPTVAYSVLVVAKVEKGKSKKLKSVKELLGITIMERSSFEKNPIDFLEAKGYKEVKKDLIIKLPKYSLFELENGRKRMLASAGELQKGNELALPSKYVNFLYLASHYEKLKGSPEDNEQKQLFVEQHKHYLDEIIEQISEFSKRVILADANLDKVLSAYNKHRDKPIREQAENIIHLFTLTNLGAPAAFKYFDTTIDRKRYTSTKEVLDATLIHQSITGLYETRIDLSQLGGDGGGSSGGSPAPGGTLQLDDEYRLYSPLVKPDQNIQFWLEQFPQAWAETAGMGLAKQVPPQVIQLKASATPVSVRQYPLSKEAQEGIRPHVQRLIQQGILVPVQSPWNTPLLPVRKPGTNDYRPVQDLREVNKRVQDIHPTVPNPYNLLCALPPQRSWYTVLDLKDAFFCLRLHPTSQPLFAFEWRDPGTGRTGQLTWTRLPQGFKNSPTIFDEALHRDLANFRIQHPQVTLLQYVDDLLLAGATKQDCLEGTKALLLELSDLGYRASAKKAQICRREVTYLGYSLRDGQRWLTEARKKTVVQIPAPTTAKQVREFLGTAGFCRLWIPGFATLAAPLYPLTKEKGEFSWAPEHQKAFDAIKKALLSAPALALPDVTKPFTLYVDERKGVARGVLTQTLGPWRRPVAYLSKKLDPVASGWPVCLKAIAAVAILVKDADKLTLGQNITVIAPHALENIVRQPPDRWMTNARMTHYQSLLLTERVTFAPPAALNPATLLPEETDEPVTHDCHQLLIEETGVRKDLTDIPLTGEVLTWFTDGSSYVVEGKRMAGAAVVDGTRTIWASSLPEGTSAQKAELMALTQALRLAEGKSINIYTDSRYAFATAHVHGAIYKQRGLLTSAGREIKNKEEILSLLEALHLPKRLAIIHCPGHQKAKDPISRGNQMADRVAKQAAQGVNLLAGKRTADGSEFEKRTADGSEFESPKKKAKVE

SEQ ID NO: 102 - protein, 2089 aa, synthetic construct
MPAAKRVKLDGGDKKYSIGLDIGTNSVGWAVITDEYKVPSKKFKVLGNTDRHSIKKNLIGALLFDSGETAEATRLKRTARRRYTRRKNRICYLQEIFSNEMAKVDDSFFHRLEESFLVEEDKKHERHPIFGNIVDEVAYHEKYPTIYHLRKKLVDSTDKADLRLIYLALAHMIKFRGHFLIEGDLNPDNSDVDKLFIQLVQTYNQLFEENPINASGVDAKAILSARLSKSRRLENLIAQLPGEKKNGLFGNLIALSLGLTPNFKSNFDLAEDAKLQLSKDTYDDDLDNLLAQIGDQYADLFLAAKNLSDAILLSDILRVNTEITKAPLSASMIKRYDEHHQDLTLLKALVRQQLPEKYKEIFFDQSKNGYAGYIDGGASQEEFYKFIKPILEKMDGTEELLVKLNREDLLRKQRTFDNGSIPHQIHLGELHAILRRQEDFYPFLKDNREKIEKILTFRIPYYVGPLARGNSRFAWMTRKSEETITPWNFEEVVDKGASAQSFIERMTNFDKNLPNEKVLPKHSLLYEYFTVYNELTKVKYVTEGMRKPAFLSGEQKKAIVDLLFKTNRKVTVKQLKEDYFKKIECFDSVEISGVEDRFNASLGTYHDLLKIIKDKDFLDNEENEDILEDIVLTLTLFEDREMIEERLKTYAHLFDDKVMKQLKRRRYTGWGRLSRKLINGIRDKQSGKTILDFLKSDGFANRNFMQLIHDDSLTFKEDIQKAQVSGQGDSLHEHIANLAGSPAIKKGILQTVKVVDELVKVMGRHKPENIVIEMARENQTTQKGQKNSRERMKRIEEGIKELGSQILKEHPVENTQLQNEKLYLYYLQNGRDMYVDQELDINRLSDYDVDHIVPQSFLKDDSIDNKVLTRSDKARGKSDNVPSEEVVKKMKNYWRQLLNAKLITQRKFDNLTKAERGGLSELDKAGFIKRQLVETRQITKHVAQILDSRMNTKYDENDKLIREVKVITLKSKLVSDFRKDFQFYKVREINNYHHAHDAYLNAVVGTALIKKYPKLESEFVYGDYKVYDVRKMIAKSEQEIGKATAKYFFYSNIMNFFKTEITLANGEIRKRPLIETNGETGEIVWDKGRDFATVRKVLSMPQVNIVKKTEVQTGGFSKESILPKRNSDKLIARKKDWDPKKYGGFDSPTVAYSVLVVAKVEKGKSKKLKSVKELLGITIMERSSFEKNPIDFLEAKGYKEVKKDLIIKLPKYSLFELENGRKRMLASAGELQKGNELALPSKYVNFLYLASHYEKLKGSPEDNEQKQLFVEQHKHYLDEIIEQISEFSKRVILADANLDKVLSAYNKHRDKPIREQAENIIHLFTLTNLGAPAAFKYFDTTIDRKRYTSTKEVLDATLIHQSITGLYETRIDLSQLGGDGGGGGGSGGGGSGGTLQLDDEYRLYSPLVKPDQNIQFWLEQFPQAWAETAGMGLAKQVPPQVIQLKASATPVSVRQYPLSKEAQEGIRPHVQRLIQQGILVPVQSPWNTPLLPVRKPGTNDYRPVQDLREVNKRVQDIHPTVPNPYNLLCALPPQRSWYTVLDLKDAFFCLRLHPTSQPLFAFEWRDPGTGRTGQLTWTRLPQGFKNSPTIFDEALHRDLANFRIQHPQVTLLQYVDDLLLAGATKQDCLEGTKALLLELSDLGYRASAKKAQICRREVTYLGYSLRDGQRWLTEARKKTVVQIPAPTTAKQVREFLGTAGFCRLWIPGFATLAAPLYPLTKEKGEFSWAPEHQKAFDAIKKALLSAPALALPDVTKPFTLYVDERKGVARGVLTQTLGPWRRPVAYLSKKLDPVASGWPVCLKAIAAVAILVKDADKLTLGQNITVIAPHALENIVRQPPDRWMTNARMTHYQSLLLTERVTFAPPAALNPATLLPEETDEPVTHDCHQLLIEETGVRKDLTDIPLTGEVLTWFTDGSSYVVEGKRMAGAAVVDGTRTIWASSLPEGTSAQKAELMALTQALRLAEGKSINIYTDSRYAFATAHVHGAIYKQRGLLTSAGREIKNKEEILSLLEALHLPKRLAIIHCPGHQKAKDPISRGNQMADRVAKQAAQGVNLLAGKRTADGSEFEKRTADGSEFESPKKKAKVE

SEQ ID NO: 103 - protein, 2091 aa, synthetic construct
MPAAKRVKLDGGDKKYSIGLDIGTNSVGWAVITDEYKVPSKKFKVLGNTDRHSIKKNLIGALLFDSGETAEATRLKRTARRRYTRRKNRICYLQEIFSNEMAKVDDSFFHRLEESFLVEEDKKHERHPIFGNIVDEVAYHEKYPTIYHLRKKLVDSTDKADLRLIYLALAHMIKFRGHFLIEGDLNPDNSDVDKLFIQLVQTYNQLFEENPINASGVDAKAILSARLSKSRRLENLIAQLPGEKKNGLFGNLIALSLGLTPNFKSNFDLAEDAKLQLSKDTYDDDLDNLLAQIGDQYADLFLAAKNLSDAILLSDILRVNTEITKAPLSASMIKRYDEHHQDLTLLKALVRQQLPEKYKEIFFDQSKNGYAGYIDGGASQEEFYKFIKPILEKMDGTEELLVKLNREDLLRKQRTFDNGSIPHQIHLGELHAILRRQEDFYPFLKDNREKIEKILTFRIPYYVGPLARGNSRFAWMTRKSEETITPWNFEEVVDKGASAQSFIERMTNFDKNLPNEKVLPKHSLLYEYFTVYNELTKVKYVTEGMRKPAFLSGEQKKAIVDLLFKTNRKVTVKQLKEDYFKKIECFDSVEISGVEDRFNASLGTYHDLLKIIKDKDFLDNEENEDILEDIVLTLTLFEDREMIEERLKTYAHLFDDKVMKQLKRRRYTGWGRLSRKLINGIRDKQSGKTILDFLKSDGFANRNFMQLIHDDSLTFKEDIQKAQVSGQGDSLHEHIANLAGSPAIKKGILQTVKVVDELVKVMGRHKPENIVIEMARENQTTQKGQKNSRERMKRIEEGIKELGSQILKEHPVENTQLQNEKLYLYYLQNGRDMYVDQELDINRLSDYDVDHIVPQSFLKDDSIDNKVLTRSDKARGKSDNVPSEEVVKKMKNYWRQLLNAKLITQRKFDNLTKAERGGLSELDKAGFIKRQLVETRQITKHVAQILDSRMNTKYDENDKLIREVKVITLKSKLVSDFRKDFQFYKVREINNYHHAHDAYLNAVVGTALIKKYPKLESEFVYGDYKVYDVRKMIAKSEQEIGKATAKYFFYSNIMNFFKTEITLANGEIRKRPLIETNGETGEIVWDKGRDFATVRKVLSMPQVNIVKKTEVQTGGFSKESILPKRNSDKLIARKKDWDPKKYGGFDSPTVAYSVLVVAKVEKGKSKKLKSVKELLGITIMERSSFEKNPIDFLEAKGYKEVKKDLIIKLPKYSLFELENGRKRMLASAGELQKGNELALPSKYVNFLYLASHYEKLKGSPEDNEQKQLFVEQHKHYLDEIIEQISEFSKRVILADANLDKVLSAYNKHRDKPIREQAENIIHLFTLTNLGAPAAFKYFDTTIDRKRYTSTKEVLDATLIHQSITGLYETRIDLSQLGGDGGGSSGSSGSSGSSGGTLQLDDEYRLYSPLVKPDQNIQFWLEQFPQAWAETAGMGLAKQVPPQVIQLKASATPVSVRQYPLSKEAQEGIRPHVQRLIQQGILVPVQSPWNTPLLPVRKPGTNDYRPVQDLREVNKRVQDIHPTVPNPYNLLCALPPQRSWYTVLDLKDAFFCLRLHPTSQPLFAFEWRDPGTGRTGQLTWTRLPQGFKNSPTIFDEALHRDLANFRIQHPQVTLLQYVDDLLLAGATKQDCLEGTKALLLELSDLGYRASAKKAQICRREVTYLGYSLRDGQRWLTEARKKTVVQIPAPTTAKQVREFLGTAGFCRLWIPGFATLAAPLYPLTKEKGEFSWAPEHQKAFDAIKKALLSAPALALPDVTKPFTLYVDERKGVARGVLTQTLGPWRRPVAYLSKKLDPVASGWPVCLKAIAAVAILVKDADKLTLGQNITVIAPHALENIVRQPPDRWMTNARMTHYQSLLLTERVTFAPPAALNPATLLPEETDEPVTHDCHQLLIEETGVRKDLTDIPLTGEVLTWFTDGSSYVVEGKRMAGAAVVDGTRTIWASSLPEGTSAQKAELMALTQALRLAEGKSINIYTDSRYAFATAHVHGAIYKQRGLLTSAGREIKNKEEILSLLEALHLPKRLAIIHCPGHQKAKDPISRGNQMADRVAKQAAQGVNLLAGKRTADGSEFEKRTADGSEFESPKKKAKVE

SEQ ID NO: 104 - protein, 2090 aa, synthetic construct
MPAAKRVKLDGGDKKYSIGLDIGTNSVGWAVITDEYKVPSKKFKVLGNTDRHSIKKNLIGALLFDSGETAEATRLKRTARRRYTRRKNRICYLQEIFSNEMAKVDDSFFHRLEESFLVEEDKKHERHPIFGNIVDEVAYHEKYPTIYHLRKKLVDSTDKADLRLIYLALAHMIKFRGHFLIEGDLNPDNSDVDKLFIQLVQTYNQLFEENPINASGVDAKAILSARLSKSRRLENLIAQLPGEKKNGLFGNLIALSLGLTPNFKSNFDLAEDAKLQLSKDTYDDDLDNLLAQIGDQYADLFLAAKNLSDAILLSDILRVNTEITKAPLSASMIKRYDEHHQDLTLLKALVRQQLPEKYKEIFFDQSKNGYAGYIDGGASQEEFYKFIKPILEKMDGTEELLVKLNREDLLRKQRTFDNGSIPHQIHLGELHAILRRQEDFYPFLKDNREKIEKILTFRIPYYVGPLARGNSRFAWMTRKSEETITPWNFEEVVDKGASAQSFIERMTNFDKNLPNEKVLPKHSLLYEYFTVYNELTKVKYVTEGMRKPAFLSGEQKKAIVDLLFKTNRKVTVKQLKEDYFKKIECFDSVEISGVEDRFNASLGTYHDLLKIIKDKDFLDNEENEDILEDIVLTLTLFEDREMIEERLKTYAHLFDDKVMKQLKRRRYTGWGRLSRKLINGIRDKQSGKTILDFLKSDGFANRNFMQLIHDDSLTFKEDIQKAQVSGQGDSLHEHIANLAGSPAIKKGILQTVKVVDELVKVMGRHKPENIVIEMARENQTTQKGQKNSRERMKRIEEGIKELGSQILKEHPVENTQLQNEKLYLYYLQNGRDMYVDQELDINRLSDYDVDHIVPQSFLKDDSIDNKVLTRSDKARGKSDNVPSEEVVKKMKNYWRQLLNAKLITQRKFDNLTKAERGGLSELDKAGFIKRQLVETRQITKHVAQILDSRMNTKYDENDKLIREVKVITLKSKLVSDFRKDFQFYKVREINNYHHAHDAYLNAVVGTALIKKYPKLESEFVYGDYKVYDVRKMIAKSEQEIGKATAKYFFYSNIMNFFKTEITLANGEIRKRPLIETNGETGEIVWDKGRDFATVRKVLSMPQVNIVKKTEVQTGGFSKESILPKRNSDKLIARKKDWDPKKYGGFDSPTVAYSVLVVAKVEKGKSKKLKSVKELLGITIMERSSFEKNPIDFLEAKGYKEVKKDLIIKLPKYSLFELENGRKRMLASAGELQKGNELALPSKYVNFLYLASHYEKLKGSPEDNEQKQLFVEQHKHYLDEIIEQISEFSKRVILADANLDKVLSAYNKHRDKPIREQAENIIHLFTLTNLGAPAAFKYFDTTIDRKRYTSTKEVLDATLIHQSITGLYETRIDLSQLGGDGGPAPGSSEAAAKGGTLQLDDEYRLYSPLVKPDQNIQFWLEQFPQAWAETAGMGLAKQVPPQVIQLKASATPVSVRQYPLSKEAQEGIRPHVQRLIQQGILVPVQSPWNTPLLPVRKPGTNDYRPVQDLREVNKRVQDIHPTVPNPYNLLCALPPQRSWYTVLDLKDAFFCLRLHPTSQPLFAFEWRDPGTGRTGQLTWTRLPQGFKNSPTIFDEALHRDLANFRIQHPQVTLLQYVDDLLLAGATKQDCLEGTKALLLELSDLGYRASAKKAQICRREVTYLGYSLRDGQRWLTEARKKTVVQIPAPTTAKQVREFLGTAGFCRLWIPGFATLAAPLYPLTKEKGEFSWAPEHQKAFDAIKKALLSAPALALPDVTKPFTLYVDERKGVARGVLTQTLGPWRRPVAYLSKKLDPVASGWPVCLKAIAAVAILVKDADKLTLGQNITVIAPHALENIVRQPPDRWMTNARMTHYQSLLLTERVTFAPPAALNPATLLPEETDEPVTHDCHQLLIEETGVRKDLTDIPLTGEVLTWFTDGSSYVVEGKRMAGAAVVDGTRTIWASSLPEGTSAQKAELMALTQALRLAEGKSINIYTDSRYAFATAHVHGAIYKQRGLLTSAGREIKNKEEILSLLEALHLPKRLAIIHCPGHQKAKDPISRGNQMADRVAKQAAQGVNLLAGKRTADGSEFEKRTADGSEFESPKKKAKVE

SEQ ID NO: 105 - protein, 2085 aa, synthetic construct
MPAAKRVKLDGGDKKYSIGLDIGTNSVGWAVITDEYKVPSKKFKVLGNTDRHSIKKNLIGALLFDSGETAEATRLKRTARRRYTRRKNRICYLQEIFSNEMAKVDDSFFHRLEESFLVEEDKKHERHPIFGNIVDEVAYHEKYPTIYHLRKKLVDSTDKADLRLIYLALAHMIKFRGHFLIEGDLNPDNSDVDKLFIQLVQTYNQLFEENPINASGVDAKAILSARLSKSRRLENLIAQLPGEKKNGLFGNLIALSLGLTPNFKSNFDLAEDAKLQLSKDTYDDDLDNLLAQIGDQYADLFLAAKNLSDAILLSDILRVNTEITKAPLSASMIKRYDEHHQDLTLLKALVRQQLPEKYKEIFFDQSKNGYAGYIDGGASQEEFYKFIKPILEKMDGTEELLVKLNREDLLRKQRTFDNGSIPHQIHLGELHAILRRQEDFYPFLKDNREKIEKILTFRIPYYVGPLARGNSRFAWMTRKSEETITPWNFEEVVDKGASAQSFIERMTNFDKNLPNEKVLPKHSLLYEYFTVYNELTKVKYVTEGMRKPAFLSGEQKKAIVDLLFKTNRKVTVKQLKEDYFKKIECFDSVEISGVEDRFNASLGTYHDLLKIIKDKDFLDNEENEDILEDIVLTLTLFEDREMIEERLKTYAHLFDDKVMKQLKRRRYTGWGRLSRKLINGIRDKQSGKTILDFLKSDGFANRNFMQLIHDDSLTFKEDIQKAQVSGQGDSLHEHIANLAGSPAIKKGILQTVKVVDELVKVMGRHKPENIVIEMARENQTTQKGQKNSRERMKRIEEGIKELGSQILKEHPVENTQLQNEKLYLYYLQNGRDMYVDQELDINRLSDYDVDHIVPQSFLKDDSIDNKVLTRSDKARGKSDNVPSEEVVKKMKNYWRQLLNAKLITQRKFDNLTKAERGGLSELDKAGFIKRQLVETRQITKHVAQILDSRMNTKYDENDKLIREVKVITLKSKLVSDFRKDFQFYKVREINNYHHAHDAYLNAVVGTALIKKYPKLESEFVYGDYKVYDVRKMIAKSEQEIGKATAKYFFYSNIMNFFKTEITLANGEIRKRPLIETNGETGEIVWDKGRDFATVRKVLSMPQVNIVKKTEVQTGGFSKESILPKRNSDKLIARKKDWDPKKYGGFDSPTVAYSVLVVAKVEKGKSKKLKSVKELLGITIMERSSFEKNPIDFLEAKGYKEVKKDLIIKLPKYSLFELENGRKRMLASAGELQKGNELALPSKYVNFLYLASHYEKLKGSPEDNEQKQLFVEQHKHYLDEIIEQISEFSKRVILADANLDKVLSAYNKHRDKPIREQAENIIHLFTLTNLGAPAAFKYFDTTIDRKRYTSTKEVLDATLIHQSITGLYETRIDLSQLGGDGGGGSGSSGGTLQLDDEYRLYSPLVKPDQNIQFWLEQFPQAWAETAGMGLAKQVPPQVIQLKASATPVSVRQYPLSKEAQEGIRPHVQRLIQQGILVPVQSPWNTPLLPVRKPGTNDYRPVQDLREVNKRVQDIHPTVPNPYNLLCALPPQRSWYTVLDLKDAFFCLRLHPTSQPLFAFEWRDPGTGRTGQLTWTRLPQGFKNSPTIFDEALHRDLANFRIQHPQVTLLQYVDDLLLAGATKQDCLEGTKALLLELSDLGYRASAKKAQICRREVTYLGYSLRDGQRWLTEARKKTVVQIPAPTTAKQVREFLGTAGFCRLWIPGFATLAAPLYPLTKEKGEFSWAPEHQKAFDAIKKALLSAPALALPDVTKPFTLYVDERKGVARGVLTQTLGPWRRPVAYLSKKLDPVASGWPVCLKAIAAVAILVKDADKLTLGQNITVIAPHALENIVRQPPDRWMTNARMTHYQSLLLTERVTFAPPAALNPATLLPEETDEPVTHDCHQLLIEETGVRKDLTDIPLTGEVLTWFTDGSSYVVEGKRMAGAAVVDGTRTIWASSLPEGTSAQKAELMALTQALRLAEGKSINIYTDSRYAFATAHVHGAIYKQRGLLTSAGREIKNKEEILSLLEALHLPKRLAIIHCPGHQKAKDPISRGNQMADRVAKQAAQGVNLLAGKRTADGSEFEKRTADGSEFESPKKKAKVE

SEQ ID NO: 106 - protein, 2088 aa, synthetic construct
MPAAKRVKLDGGDKKYSIGLDIGTNSVGWAVITDEYKVPSKKFKVLGNTDRHSIKKNLIGALLFDSGETAEATRLKRTARRRYTRRKNRICYLQEIFSNEMAKVDDSFFHRLEESFLVEEDKKHERHPIFGNIVDEVAYHEKYPTIYHLRKKLVDSTDKADLRLIYLALAHMIKFRGHFLIEGDLNPDNSDVDKLFIQLVQTYNQLFEENPINASGVDAKAILSARLSKSRRLENLIAQLPGEKKNGLFGNLIALSLGLTPNFKSNFDLAEDAKLQLSKDTYDDDLDNLLAQIGDQYADLFLAAKNLSDAILLSDILRVNTEITKAPLSASMIKRYDEHHQDLTLLKALVRQQLPEKYKEIFFDQSKNGYAGYIDGGASQEEFYKFIKPILEKMDGTEELLVKLNREDLLRKQRTFDNGSIPHQIHLGELHAILRRQEDFYPFLKDNREKIEKILTFRIPYYVGPLARGNSRFAWMTRKSEETITPWNFEEVVDKGASAQSFIERMTNFDKNLPNEKVLPKHSLLYEYFTVYNELTKVKYVTEGMRKPAFLSGEQKKAIVDLLFKTNRKVTVKQLKEDYFKKIECFDSVEISGVEDRFNASLGTYHDLLKIIKDKDFLDNEENEDILEDIVLTLTLFEDREMIEERLKTYAHLFDDKVMKQLKRRRYTGWGRLSRKLINGIRDKQSGKTILDFLKSDGFANRNFMQLIHDDSLTFKEDIQKAQVSGQGDSLHEHIANLAGSPAIKKGILQTVKVVDELVKVMGRHKPENIVIEMARENQTTQKGQKNSRERMKRIEEGIKELGSQILKEHPVENTQLQNEKLYLYYLQNGRDMYVDQELDINRLSDYDVDHIVPQSFLKDDSIDNKVLTRSDKARGKSDNVPSEEVVKKMKNYWRQLLNAKLITQRKFDNLTKAERGGLSELDKAGFIKRQLVETRQITKHVAQILDSRMNTKYDENDKLIREVKVITLKSKLVSDFRKDFQFYKVREINNYHHAHDAYLNAVVGTALIKKYPKLESEFVYGDYKVYDVRKMIAKSEQEIGKATAKYFFYSNIMNFFKTEITLANGEIRKRPLIETNGETGEIVWDKGRDFATVRKVLSMPQVNIVKKTEVQTGGFSKESILPKRNSDKLIARKKDWDPKKYGGFDSPTVAYSVLVVAKVEKGKSKKLKSVKELLGITIMERSSFEKNPIDFLEAKGYKEVKKDLIIKLPKYSLFELENGRKRMLASAGELQKGNELALPSKYVNFLYLASHYEKLKGSPEDNEQKQLFVEQHKHYLDEIIEQISEFSKRVILADANLDKVLSAYNKHRDKPIREQAENIIHLFTLTNLGAPAAFKYFDTTIDRKRYTSTKEVLDATLIHQSITGLYETRIDLSQLGGDGGPAPGSSGGGGGTLQLDDEYRLYSPLVKPDQNIQFWLEQFPQAWAETAGMGLAKQVPPQVIQLKASATPVSVRQYPLSKEAQEGIRPHVQRLIQQGILVPVQSPWNTPLLPVRKPGTNDYRPVQDLREVNKRVQDIHPTVPNPYNLLCALPPQRSWYTVLDLKDAFFCLRLHPTSQPLFAFEWRDPGTGRTGQLTWTRLPQGFKNSPTIFDEALHRDLANFRIQHPQVTLLQYVDDLLLAGATKQDCLEGTKALLLELSDLGYRASAKKAQICRREVTYLGYSLRDGQRWLTEARKKTVVQIPAPTTAKQVREFLGTAGFCRLWIPGFATLAAPLYPLTKEKGEFSWAPEHQKAFDAIKKALLSAPALALPDVTKPFTLYVDERKGVARGVLTQTLGPWRRPVAYLSKKLDPVASGWPVCLKAIAAVAILVKDADKLTLGQNITVIAPHALENIVRQPPDRWMTNARMTHYQSLLLTERVTFAPPAALNPATLLPEETDEPVTHDCHQLLIEETGVRKDLTDIPLTGEVLTWFTDGSSYVVEGKRMAGAAVVDGTRTIWASSLPEGTSAQKAELMALTQALRLAEGKSINIYTDSRYAFATAHVHGAIYKQRGLLTSAGREIKNKEEILSLLEALHLPKRLAIIHCPGHQKAKDPISRGNQMADRVAKQAAQGVNLLAGKRTADGSEFEKRTADGSEFESPKKKAKVE

SEQ ID NO: 107 - protein, 2088 aa, synthetic construct
MPAAKRVKLDGGDKKYSIGLDIGTNSVGWAVITDEYKVPSKKFKVLGNTDRHSIKKNLIGALLFDSGETAEATRLKRTARRRYTRRKNRICYLQEIFSNEMAKVDDSFFHRLEESFLVEEDKKHERHPIFGNIVDEVAYHEKYPTIYHLRKKLVDSTDKADLRLIYLALAHMIKFRGHFLIEGDLNPDNSDVDKLFIQLVQTYNQLFEENPINASGVDAKAILSARLSKSRRLENLIAQLPGEKKNGLFGNLIALSLGLTPNFKSNFDLAEDAKLQLSKDTYDDDLDNLLAQIGDQYADLFLAAKNLSDAILLSDILRVNTEITKAPLSASMIKRYDEHHQDLTLLKALVRQQLPEKYKEIFFDQSKNGYAGYIDGGASQEEFYKFIKPILEKMDGTEELLVKLNREDLLRKQRTFDNGSIPHQIHLGELHAILRRQEDFYPFLKDNREKIEKILTFRIPYYVGPLARGNSRFAWMTRKSEETITPWNFEEVVDKGASAQSFIERMTNFDKNLPNEKVLPKHSLLYEYFTVYNELTKVKYVTEGMRKPAFLSGEQKKAIVDLLFKTNRKVTVKQLKEDYFKKIECFDSVEISGVEDRFNASLGTYHDLLKIIKDKDFLDNEENEDILEDIVLTLTLFEDREMIEERLKTYAHLFDDKVMKQLKRRRYTGWGRLSRKLINGIRDKQSGKTILDFLKSDGFANRNFMQLIHDDSLTFKEDIQKAQVSGQGDSLHEHIANLAGSPAIKKGILQTVKVVDELVKVMGRHKPENIVIEMARENQTTQKGQKNSRERMKRIEEGIKELGSQILKEHPVENTQLQNEKLYLYYLQNGRDMYVDQELDINRLSDYDVDHIVPQSFLKDDSIDNKVLTRSDKARGKSDNVPSEEVVKKMKNYWRQLLNAKLITQRKFDNLTKAERGGLSELDKAGFIKRQLVETRQITKHVAQILDSRMNTKYDENDKLIREVKVITLKSKLVSDFRKDFQFYKVREINNYHHAHDAYLNAVVGTALIKKYPKLESEFVYGDYKVYDVRKMIAKSEQEIGKATAKYFFYSNIMNFFKTEITLANGEIRKRPLIETNGETGEIVWDKGRDFATVRKVLSMPQVNIVKKTEVQTGGFSKESILPKRNSDKLIARKKDWDPKKYGGFDSPTVAYSVLVVAKVEKGKSKKLKSVKELLGITIMERSSFEKNPIDFLEAKGYKEVKKDLIIKLPKYSLFELENGRKRMLASAGELQKGNELALPSKYVNFLYLASHYEKLKGSPEDNEQKQLFVEQHKHYLDEIIEQISEFSKRVILADANLDKVLSAYNKHRDKPIREQAENIIHLFTLTNLGAPAAFKYFDTTIDRKRYTSTKEVLDATLIHQSITGLYETRIDLSQLGGDGGGGGPAPGSSGGTLQLDDEYRLYSPLVKPDQNIQFWLEQFPQAWAETAGMGLAKQVPPQVIQLKASATPVSVRQYPLSKEAQEGIRPHVQRLIQQGILVPVQSPWNTPLLPVRKPGTNDYRPVQDLREVNKRVQDIHPTVPNPYNLLCALPPQRSWYTVLDLKDAFFCLRLHPTSQPLFAFEWRDPGTGRTGQLTWTRLPQGFKNSPTIFDEALHRDLANFRIQHPQVTLLQYVDDLLLAGATKQDCLEGTKALLLELSDLGYRASAKKAQICRREVTYLGYSLRDGQRWLTEARKKTVVQIPAPTTAKQVREFLGTAGFCRLWIPGFATLAAPLYPLTKEKGEFSWAPEHQKAFDAIKKALLSAPALALPDVTKPFTLYVDERKGVARGVLTQTLGPWRRPVAYLSKKLDPVASGWPVCLKAIAAVAILVKDADKLTLGQNITVIAPHALENIVRQPPDRWMTNARMTHYQSLLLTERVTFAPPAALNPATLLPEETDEPVTHDCHQLLIEETGVRKDLTDIPLTGEVLTWFTDGSSYVVEGKRMAGAAVVDGTRTIWASSLPEGTSAQKAELMALTQALRLAEGKSINIYTDSRYAFATAHVHGAIYKQRGLLTSAGREIKNKEEILSLLEALHLPKRLAIIHCPGHQKAKDPISRGNQMADRVAKQAAQGVNLLAGKRTADGSEFEKRTADGSEFESPKKKAKVE

SEQ ID NO: 108 - protein, 2090 aa, synthetic construct
MPAAKRVKLDGGDKKYSIGLDIGTNSVGWAVITDEYKVPSKKFKVLGNTDRHSIKKNLIGALLFDSGETAEATRLKRTARRRYTRRKNRICYLQEIFSNEMAKVDDSFFHRLEESFLVEEDKKHERHPIFGNIVDEVAYHEKYPTIYHLRKKLVDSTDKADLRLIYLALAHMIKFRGHFLIEGDLNPDNSDVDKLFIQLVQTYNQLFEENPINASGVDAKAILSARLSKSRRLENLIAQLPGEKKNGLFGNLIALSLGLTPNFKSNFDLAEDAKLQLSKDTYDDDLDNLLAQIGDQYADLFLAAKNLSDAILLSDILRVNTEITKAPLSASMIKRYDEHHQDLTLLKALVRQQLPEKYKEIFFDQSKNGYAGYIDGGASQEEFYKFIKPILEKMDGTEELLVKLNREDLLRKQRTFDNGSIPHQIHLGELHAILRRQEDFYPFLKDNREKIEKILTFRIPYYVGPLARGNSRFAWMTRKSEETITPWNFEEVVDKGASAQSFIERMTNFDKNLPNEKVLPKHSLLYEYFTVYNELTKVKYVTEGMRKPAFLSGEQKKAIVDLLFKTNRKVTVKQLKEDYFKKIECFDSVEISGVEDRFNASLGTYHDLLKIIKDKDFLDNEENEDILEDIVLTLTLFEDREMIEERLKTYAHLFDDKVMKQLKRRRYTGWGRLSRKLINGIRDKQSGKTILDFLKSDGFANRNFMQLIHDDSLTFKEDIQKAQVSGQGDSLHEHIANLAGSPAIKKGILQTVKVVDELVKVMGRHKPENIVIEMARENQTTQKGQKNSRERMKRIEEGIKELGSQILKEHPVENTQLQNEKLYLYYLQNGRDMYVDQELDINRLSDYDVDHIVPQSFLKDDSIDNKVLTRSDKARGKSDNVPSEEVVKKMKNYWRQLLNAKLITQRKFDNLTKAERGGLSELDKAGFIKRQLVETRQITKHVAQILDSRMNTKYDENDKLIREVKVITLKSKLVSDFRKDFQFYKVREINNYHHAHDAYLNAVVGTALIKKYPKLESEFVYGDYKVYDVRKMIAKSEQEIGKATAKYFFYSNIMNFFKTEITLANGEIRKRPLIETNGETGEIVWDKGRDFATVRKVLSMPQVNIVKKTEVQTGGFSKESILPKRNSDKLIARKKDWDPKKYGGFDSPTVAYSVLVVAKVEKGKSKKLKSVKELLGITIMERSSFEKNPIDFLEAKGYKEVKKDLIIKLPKYSLFELENGRKRMLASAGELQKGNELALPSKYVNFLYLASHYEKLKGSPEDNEQKQLFVEQHKHYLDEIIEQISEFSKRVILADANLDKVLSAYNKHRDKPIREQAENIIHLFTLTNLGAPAAFKYFDTTIDRKRYTSTKEVLDATLIHQSITGLYETRIDLSQLGGDGGGGGEAAAKPAPGGTLQLDDEYRLYSPLVKPDQNIQFWLEQFPQAWAETAGMGLAKQVPPQVIQLKASATPVSVRQYPLSKEAQEGIRPHVQRLIQQGILVPVQSPWNTPLLPVRKPGTNDYRPVQDLREVNKRVQDIHPTVPNPYNLLCALPPQRSWYTVLDLKDAFFCLRLHPTSQPLFAFEWRDPGTGRTGQLTWTRLPQGFKNSPTIFDEALHRDLANFRIQHPQVTLLQYVDDLLLAGATKQDCLEGTKALLLELSDLGYRASAKKAQICRREVTYLGYSLRDGQRWLTEARKKTVVQIPAPTTAKQVREFLGTAGFCRLWIPGFATLAAPLYPLTKEKGEFSWAPEHQKAFDAIKKALLSAPALALPDVTKPFTLYVDERKGVARGVLTQTLGPWRRPVAYLSKKLDPVASGWPVCLKAIAAVAILVKDADKLTLGQNITVIAPHALENIVRQPPDRWMTNARMTHYQSLLLTERVTFAPPAALNPATLLPEETDEPVTHDCHQLLIEETGVRKDLTDIPLTGEVLTWFTDGSSYVVEGKRMAGAAVVDGTRTIWASSLPEGTSAQKAELMALTQALRLAEGKSINIYTDSRYAFATAHVHGAIYKQRGLLTSAGREIKNKEEILSLLEALHLPKRLAIIHCPGHQKAKDPISRGNQMADRVAKQAAQGVNLLAGKRTADGSEFEKRTADGSEFESPKKKAKVE

SEQ ID NO: 109 - protein, 2085 aa, synthetic construct
MPAAKRVKLDGGDKKYSIGLDIGTNSVGWAVITDEYKVPSKKFKVLGNTDRHSIKKNLIGALLFDSGETAEATRLKRTARRRYTRRKNRICYLQEIFSNEMAKVDDSFFHRLEESFLVEEDKKHERHPIFGNIVDEVAYHEKYPTIYHLRKKLVDSTDKADLRLIYLALAHMIKFRGHFLIEGDLNPDNSDVDKLFIQLVQTYNQLFEENPINASGVDAKAILSARLSKSRRLENLIAQLPGEKKNGLFGNLIALSLGLTPNFKSNFDLAEDAKLQLSKDTYDDDLDNLLAQIGDQYADLFLAAKNLSDAILLSDILRVNTEITKAPLSASMIKRYDEHHQDLTLLKALVRQQLPEKYKEIFFDQSKNGYAGYIDGGASQEEFYKFIKPILEKMDGTEELLVKLNREDLLRKQRTFDNGSIPHQIHLGELHAILRRQEDFYPFLKDNREKIEKILTFRIPYYVGPLARGNSRFAWMTRKSEETITPWNFEEVVDKGASAQSFIERMTNFDKNLPNEKVLPKHSLLYEYFTVYNELTKVKYVTEGMRKPAFLSGEQKKAIVDLLFKTNRKVTVKQLKEDYFKKIECFDSVEISGVEDRFNASLGTYHDLLKIIKDKDFLDNEENEDILEDIVLTLTLFEDREMIEERLKTYAHLFDDKVMKQLKRRRYTGWGRLSRKLINGIRDKQSGKTILDFLKSDGFANRNFMQLIHDDSLTFKEDIQKAQVSGQGDSLHEHIANLAGSPAIKKGILQTVKVVDELVKVMGRHKPENIVIEMARENQTTQKGQKNSRERMKRIEEGIKELGSQILKEHPVENTQLQNEKLYLYYLQNGRDMYVDQELDINRLSDYDVDHIVPQSFLKDDSIDNKVLTRSDKARGKSDNVPSEEVVKKMKNYWRQLLNAKLITQRKFDNLTKAERGGLSELDKAGFIKRQLVETRQITKHVAQILDSRMNTKYDENDKLIREVKVITLKSKLVSDFRKDFQFYKVREINNYHHAHDAYLNAVVGTALIKKYPKLESEFVYGDYKVYDVRKMIAKSEQEIGKATAKYFFYSNIMNFFKTEITLANGEIRKRPLIETNGETGEIVWDKGRDFATVRKVLSMPQVNIVKKTEVQTGGFSKESILPKRNSDKLIARKKDWDPKKYGGFDSPTVAYSVLVVAKVEKGKSKKLKSVKELLGITIMERSSFEKNPIDFLEAKGYKEVKKDLIIKLPKYSLFELENGRKRMLASAGELQKGNELALPSKYVNFLYLASHYEKLKGSPEDNEQKQLFVEQHKHYLDEIIEQISEFSKRVILADANLDKVLSAYNKHRDKPIREQAENIIHLFTLTNLGAPAAFKYFDTTIDRKRYTSTKEVLDATLIHQSITGLYETRIDLSQLGGDGGGGSPAPGGTLQLDDEYRLYSPLVKPDQNIQFWLEQFPQAWAETAGMGLAKQVPPQVIQLKASATPVSVRQYPLSKEAQEGIRPHVQRLIQQGILVPVQSPWNTPLLPVRKPGTNDYRPVQDLREVNKRVQDIHPTVPNPYNLLCALPPQRSWYTVLDLKDAFFCLRLHPTSQPLFAFEWRDPGTGRTGQLTWTRLPQGFKNSPTIFDEALHRDLANFRIQHPQVTLLQYVDDLLLAGATKQDCLEGTKALLLELSDLGYRASAKKAQICRREVTYLGYSLRDGQRWLTEARKKTVVQIPAPTTAKQVREFLGTAGFCRLWIPGFATLAAPLYPLTKEKGEFSWAPEHQKAFDAIKKALLSAPALALPDVTKPFTLYVDERKGVARGVLTQTLGPWRRPVAYLSKKLDPVASGWPVCLKAIAAVAILVKDADKLTLGQNITVIAPHALENIVRQPPDRWMTNARMTHYQSLLLTERVTFAPPAALNPATLLPEETDEPVTHDCHQLLIEETGVRKDLTDIPLTGEVLTWFTDGSSYVVEGKRMAGAAVVDGTRTIWASSLPEGTSAQKAELMALTQALRLAEGKSINIYTDSRYAFATAHVHGAIYKQRGLLTSAGREIKNKEEILSLLEALHLPKRLAIIHCPGHQKAKDPISRGNQMADRVAKQAAQGVNLLAGKRTADGSEFEKRTADGSEFESPKKKAKVE

SEQ ID NO: 110 - protein, 2085 aa, synthetic construct
MPAAKRVKLDGGDKKYSIGLDIGTNSVGWAVITDEYKVPSKKFKVLGNTDRHSIKKNLIGALLFDSGETAEATRLKRTARRRYTRRKNRICYLQEIFSNEMAKVDDSFFHRLEESFLVEEDKKHERHPIFGNIVDEVAYHEKYPTIYHLRKKLVDSTDKADLRLIYLALAHMIKFRGHFLIEGDLNPDNSDVDKLFIQLVQTYNQLFEENPINASGVDAKAILSARLSKSRRLENLIAQLPGEKKNGLFGNLIALSLGLTPNFKSNFDLAEDAKLQLSKDTYDDDLDNLLAQIGDQYADLFLAAKNLSDAILLSDILRVNTEITKAPLSASMIKRYDEHHQDLTLLKALVRQQLPEKYKEIFFDQSKNGYAGYIDGGASQEEFYKFIKPILEKMDGTEELLVKLNREDLLRKQRTFDNGSIPHQIHLGELHAILRRQEDFYPFLKDNREKIEKILTFRIPYYVGPLARGNSRFAWMTRKSEETITPWNFEEVVDKGASAQSFIERMTNFDKNLPNEKVLPKHSLLYEYFTVYNELTKVKYVTEGMRKPAFLSGEQKKAIVDLLFKTNRKVTVKQLKEDYFKKIECFDSVEISGVEDRFNASLGTYHDLLKIIKDKDFLDNEENEDILEDIVLTLTLFEDREMIEERLKTYAHLFDDKVMKQLKRRRYTGWGRLSRKLINGIRDKQSGKTILDFLKSDGFANRNFMQLIHDDSLTFKEDIQKAQVSGQGDSLHEHIANLAGSPAIKKGILQTVKVVDELVKVMGRHKPENIVIEMARENQTTQKGQKNSRERMKRIEEGIKELGSQILKEHPVENTQLQNEKLYLYYLQNGRDMYVDQELDINRLSDYDVDHIVPQSFLKDDSIDNKVLTRSDKARGKSDNVPSEEVVKKMKNYWRQLLNAKLITQRKFDNLTKAERGGLSELDKAGFIKRQLVETRQITKHVAQILDSRMNTKYDENDKLIREVKVITLKSKLVSDFRKDFQFYKVREINNYHHAHDAYLNAVVGTALIKKYPKLESEFVYGDYKVYDVRKMIAKSEQEIGKATAKYFFYSNIMNFFKTEITLANGEIRKRPLIETNGETGEIVWDKGRDFATVRKVLSMPQVNIVKKTEVQTGGFSKESILPKRNSDKLIARKKDWDPKKYGGFDSPTVAYSVLVVAKVEKGKSKKLKSVKELLGITIMERSSFEKNPIDFLEAKGYKEVKKDLIIKLPKYSLFELENGRKRMLASAGELQKGNELALPSKYVNFLYLASHYEKLKGSPEDNEQKQLFVEQHKHYLDEIIEQISEFSKRVILADANLDKVLSAYNKHRDKPIREQAENIIHLFTLTNLGAPAAFKYFDTTIDRKRYTSTKEVLDATLIHQSITGLYETRIDLSQLGGDGGGSSGSSGGTLQLDDEYRLYSPLVKPDQNIQFWLEQFPQAWAETAGMGLAKQVPPQVIQLKASATPVSVRQYPLSKEAQEGIRPHVQRLIQQGILVPVQSPWNTPLLPVRKPGTNDYRPVQDLREVNKRVQDIHPTVPNPYNLLCALPPQRSWYTVLDLKDAFFCLRLHPTSQPLFAFEWRDPGTGRTGQLTWTRLPQGFKNSPTIFDEALHRDLANFRIQHPQVTLLQYVDDLLLAGATKQDCLEGTKALLLELSDLGYRASAKKAQICRREVTYLGYSLRDGQRWLTEARKKTVVQIPAPTTAKQVREFLGTAGFCRLWIPGFATLAAPLYPLTKEKGEFSWAPEHQKAFDAIKKALLSAPALALPDVTKPFTLYVDERKGVARGVLTQTLGPWRRPVAYLSKKLDPVASGWPVCLKAIAAVAILVKDADKLTLGQNITVIAPHALENIVRQPPDRWMTNARMTHYQSLLLTERVTFAPPAALNPATLLPEETDEPVTHDCHQLLIEETGVRKDLTDIPLTGEVLTWFTDGSSYVVEGKRMAGAAVVDGTRTIWASSLPEGTSAQKAELMALTQALRLAEGKSINIYTDSRYAFATAHVHGAIYKQRGLLTSAGREIKNKEEILSLLEALHLPKRLAIIHCPGHQKAKDPISRGNQMADRVAKQAAQGVNLLAGKRTADGSEFEKRTADGSEFESPKKKAKVE

SEQ ID NO: 111 - protein, 2091 aa, synthetic construct
MPAAKRVKLDGGDKKYSIGLDIGTNSVGWAVITDEYKVPSKKFKVLGNTDRHSIKKNLIGALLFDSGETAEATRLKRTARRRYTRRKNRICYLQEIFSNEMAKVDDSFFHRLEESFLVEEDKKHERHPIFGNIVDEVAYHEKYPTIYHLRKKLVDSTDKADLRLIYLALAHMIKFRGHFLIEGDLNPDNSDVDKLFIQLVQTYNQLFEENPINASGVDAKAILSARLSKSRRLENLIAQLPGEKKNGLFGNLIALSLGLTPNFKSNFDLAEDAKLQLSKDTYDDDLDNLLAQIGDQYADLFLAAKNLSDAILLSDILRVNTEITKAPLSASMIKRYDEHHQDLTLLKALVRQQLPEKYKEIFFDQSKNGYAGYIDGGASQEEFYKFIKPILEKMDGTEELLVKLNREDLLRKQRTFDNGSIPHQIHLGELHAILRRQEDFYPFLKDNREKIEKILTFRIPYYVGPLARGNSRFAWMTRKSEETITPWNFEEVVDKGASAQSFIERMTNFDKNLPNEKVLPKHSLLYEYFTVYNELTKVKYVTEGMRKPAFLSGEQKKAIVDLLFKTNRKVTVKQLKEDYFKKIECFDSVEISGVEDRFNASLGTYHDLLKIIKDKDFLDNEENEDILEDIVLTLTLFEDREMIEERLKTYAHLFDDKVMKQLKRRRYTGWGRLSRKLINGIRDKQSGKTILDFLKSDGFANRNFMQLIHDDSLTFKEDIQKAQVSGQGDSLHEHIANLAGSPAIKKGILQTVKVVDELVKVMGRHKPENIVIEMARENQTTQKGQKNSRERMKRIEEGIKELGSQILKEHPVENTQLQNEKLYLYYLQNGRDMYVDQELDINRLSDYDVDHIVPQSFLKDDSIDNKVLTRSDKARGKSDNVPSEEVVKKMKNYWRQLLNAKLITQRKFDNLTKAERGGLSELDKAGFIKRQLVETRQITKHVAQILDSRMNTKYDENDKLIREVKVITLKSKLVSDFRKDFQFYKVREINNYHHAHDAYLNAVVGTALIKKYPKLESEFVYGDYKVYDVRKMIAKSEQEIGKATAKYFFYSNIMNFFKTEITLANGEIRKRPLIETNGETGEIVWDKGRDFATVRKVLSMPQVNIVKKTEVQTGGFSKESILPKRNSDKLIARKKDWDPKKYGGFDSPTVAYSVLVVAKVEKGKSKKLKSVKELLGITIMERSSFEKNPIDFLEAKGYKEVKKDLIIKLPKYSLFELENGRKRMLASAGELQKGNELALPSKYVNFLYLASHYEKLKGSPEDNEQKQLFVEQHKHYLDEIIEQISEFSKRVILADANLDKVLSAYNKHRDKPIREQAENIIHLFTLTNLGAPAAFKYFDTTIDRKRYTSTKEVLDATLIHQSITGLYETRIDLSQLGGDGGGGSGGSGGSGGSGGTLQLDDEYRLYSPLVKPDQNIQFWLEQFPQAWAETAGMGLAKQVPPQVIQLKASATPVSVRQYPLSKEAQEGIRPHVQRLIQQGILVPVQSPWNTPLLPVRKPGTNDYRPVQDLREVNKRVQDIHPTVPNPYNLLCALPPQRSWYTVLDLKDAFFCLRLHPTSQPLFAFEWRDPGTGRTGQLTWTRLPQGFKNSPTIFDEALHRDLANFRIQHPQVTLLQYVDDLLLAGATKQDCLEGTKALLLELSDLGYRASAKKAQICRREVTYLGYSLRDGQRWLTEARKKTVVQIPAPTTAKQVREFLGTAGFCRLWIPGFATLAAPLYPLTKEKGEFSWAPEHQKAFDAIKKALLSAPALALPDVTKPFTLYVDERKGVARGVLTQTLGPWRRPVAYLSKKLDPVASGWPVCLKAIAAVAILVKDADKLTLGQNITVIAPHALENIVRQPPDRWMTNARMTHYQSLLLTERVTFAPPAALNPATLLPEETDEPVTHDCHQLLIEETGVRKDLTDIPLTGEVLTWFTDGSSYVVEGKRMAGAAVVDGTRTIWASSLPEGTSAQKAELMALTQALRLAEGKSINIYTDSRYAFATAHVHGAIYKQRGLLTSAGREIKNKEEILSLLEALHLPKRLAIIHCPGHQKAKDPISRGNQMADRVAKQAAQGVNLLAGKRTADGSEFEKRTADGSEFESPKKKAKVE

SEQ ID NO: 112 - protein, 2090 aa, synthetic construct
MPAAKRVKLDGGDKKYSIGLDIGTNSVGWAVITDEYKVPSKKFKVLGNTDRHSIKKNLIGALLFDSGETAEATRLKRTARRRYTRRKNRICYLQEIFSNEMAKVDDSFFHRLEESFLVEEDKKHERHPIFGNIVDEVAYHEKYPTIYHLRKKLVDSTDKADLRLIYLALAHMIKFRGHFLIEGDLNPDNSDVDKLFIQLVQTYNQLFEENPINASGVDAKAILSARLSKSRRLENLIAQLPGEKKNGLFGNLIALSLGLTPNFKSNFDLAEDAKLQLSKDTYDDDLDNLLAQIGDQYADLFLAAKNLSDAILLSDILRVNTEITKAPLSASMIKRYDEHHQDLTLLKALVRQQLPEKYKEIFFDQSKNGYAGYIDGGASQEEFYKFIKPILEKMDGTEELLVKLNREDLLRKQRTFDNGSIPHQIHLGELHAILRRQEDFYPFLKDNREKIEKILTFRIPYYVGPLARGNSRFAWMTRKSEETITPWNFEEVVDKGASAQSFIERMTNFDKNLPNEKVLPKHSLLYEYFTVYNELTKVKYVTEGMRKPAFLSGEQKKAIVDLLFKTNRKVTVKQLKEDYFKKIECFDSVEISGVEDRFNASLGTYHDLLKIIKDKDFLDNEENEDILEDIVLTLTLFEDREMIEERLKTYAHLFDDKVMKQLKRRRYTGWGRLSRKLINGIRDKQSGKTILDFLKSDGFANRNFMQLIHDDSLTFKEDIQKAQVSGQGDSLHEHIANLAGSPAIKKGILQTVKVVDELVKVMGRHKPENIVIEMARENQTTQKGQKNSRERMKRIEEGIKELGSQILKEHPVENTQLQNEKLYLYYLQNGRDMYVDQELDINRLSDYDVDHIVPQSFLKDDSIDNKVLTRSDKARGKSDNVPSEEVVKKMKNYWRQLLNAKLITQRKFDNLTKAERGGLSELDKAGFIKRQLVETRQITKHVAQILDSRMNTKYDENDKLIREVKVITLKSKLVSDFRKDFQFYKVREINNYHHAHDAYLNAVVGTALIKKYPKLESEFVYGDYKVYDVRKMIAKSEQEIGKATAKYFFYSNIMNFFKTEITLANGEIRKRPLIETNGETGEIVWDKGRDFATVRKVLSMPQVNIVKKTEVQTGGFSKESILPKRNSDKLIARKKDWDPKKYGGFDSPTVAYSVLVVAKVEKGKSKKLKSVKELLGITIMERSSFEKNPIDFLEAKGYKEVKKDLIIKLPKYSLFELENGRKRMLASAGELQKGNELALPSKYVNFLYLASHYEKLKGSPEDNEQKQLFVEQHKHYLDEIIEQISEFSKRVILADANLDKVLSAYNKHRDKPIREQAENIIHLFTLTNLGAPAAFKYFDTTIDRKRYTSTKEVLDATLIHQSITGLYETRIDLSQLGGDGGEAAAKGGGPAPGGTLQLDDEYRLYSPLVKPDQNIQFWLEQFPQAWAETAGMGLAKQVPPQVIQLKASATPVSVRQYPLSKEAQEGIRPHVQRLIQQGILVPVQSPWNTPLLPVRKPGTNDYRPVQDLREVNKRVQDIHPTVPNPYNLLCALPPQRSWYTVLDLKDAFFCLRLHPTSQPLFAFEWRDPGTGRTGQLTWTRLPQGFKNSPTIFDEALHRDLANFRIQHPQVTLLQYVDDLLLAGATKQDCLEGTKALLLELSDLGYRASAKKAQICRREVTYLGYSLRDGQRWLTEARKKTVVQIPAPTTAKQVREFLGTAGFCRLWIPGFATLAAPLYPLTKEKGEFSWAPEHQKAFDAIKKALLSAPALALPDVTKPFTLYVDERKGVARGVLTQTLGPWRRPVAYLSKKLDPVASGWPVCLKAIAAVAILVKDADKLTLGQNITVIAPHALENIVRQPPDRWMTNARMTHYQSLLLTERVTFAPPAALNPATLLPEETDEPVTHDCHQLLIEETGVRKDLTDIPLTGEVLTWFTDGSSYVVEGKRMAGAAVVDGTRTIWASSLPEGTSAQKAELMALTQALRLAEGKSINIYTDSRYAFATAHVHGAIYKQRGLLTSAGREIKNKEEILSLLEALHLPKRLAIIHCPGHQKAKDPISRGNQMADRVAKQAAQGVNLLAGKRTADGSEFEKRTADGSEFESPKKKAKVE

SEQ ID NO: 113 - protein, 2097 aa, synthetic construct
MPAAKRVKLDGGDKKYSIGLDIGTNSVGWAVITDEYKVPSKKFKVLGNTDRHSIKKNLIGALLFDSGETAEATRLKRTARRRYTRRKNRICYLQEIFSNEMAKVDDSFFHRLEESFLVEEDKKHERHPIFGNIVDEVAYHEKYPTIYHLRKKLVDSTDKADLRLIYLALAHMIKFRGHFLIEGDLNPDNSDVDKLFIQLVQTYNQLFEENPINASGVDAKAILSARLSKSRRLENLIAQLPGEKKNGLFGNLIALSLGLTPNFKSNFDLAEDAKLQLSKDTYDDDLDNLLAQIGDQYADLFLAAKNLSDAILLSDILRVNTEITKAPLSASMIKRYDEHHQDLTLLKALVRQQLPEKYKEIFFDQSKNGYAGYIDGGASQEEFYKFIKPILEKMDGTEELLVKLNREDLLRKQRTFDNGSIPHQIHLGELHAILRRQEDFYPFLKDNREKIEKILTFRIPYYVGPLARGNSRFAWMTRKSEETITPWNFEEVVDKGASAQSFIERMTNFDKNLPNEKVLPKHSLLYEYFTVYNELTKVKYVTEGMRKPAFLSGEQKKAIVDLLFKTNRKVTVKQLKEDYFKKIECFDSVEISGVEDRFNASLGTYHDLLKIIKDKDFLDNEENEDILEDIVLTLTLFEDREMIEERLKTYAHLFDDKVMKQLKRRRYTGWGRLSRKLINGIRDKQSGKTILDFLKSDGFANRNFMQLIHDDSLTFKEDIQKAQVSGQGDSLHEHIANLAGSPAIKKGILQTVKVVDELVKVMGRHKPENIVIEMARENQTTQKGQKNSRERMKRIEEGIKELGSQILKEHPVENTQLQNEKLYLYYLQNGRDMYVDQELDINRLSDYDVDHIVPQSFLKDDSIDNKVLTRSDKARGKSDNVPSEEVVKKMKNYWRQLLNAKLITQRKFDNLTKAERGGLSELDKAGFIKRQLVETRQITKHVAQILDSRMNTKYDENDKLIREVKVITLKSKLVSDFRKDFQFYKVREINNYHHAHDAYLNAVVGTALIKKYPKLESEFVYGDYKVYDVRKMIAKSEQEIGKATAKYFFYSNIMNFFKTEITLANGEIRKRPLIETNGETGEIVWDKGRDFATVRKVLSMPQVNIVKKTEVQTGGFSKESILPKRNSDKLIARKKDWDPKKYGGFDSPTVAYSVLVVAKVEKGKSKKLKSVKELLGITIMERSSFEKNPIDFLEAKGYKEVKKDLIIKLPKYSLFELENGRKRMLASAGELQKGNELALPSKYVNFLYLASHYEKLKGSPEDNEQKQLFVEQHKHYLDEIIEQISEFSKRVILADANLDKVLSAYNKHRDKPIREQAENIIHLFTLTNLGAPAAFKYFDTTIDRKRYTSTKEVLDATLIHQSITGLYETRIDLSQLGGDGGGSSGSSGSSGSSGSSGSSGGTLQLDDEYRLYSPLVKPDQNIQFWLEQFPQAWAETAGMGLAKQVPPQVIQLKASATPVSVRQYPLSKEAQEGIRPHVQRLIQQGILVPVQSPWNTPLLPVRKPGTNDYRPVQDLREVNKRVQDIHPTVPNPYNLLCALPPQRSWYTVLDLKDAFFCLRLHPTSQPLFAFEWRDPGTGRTGQLTWTRLPQGFKNSPTIFNEALHRDLANFRIQHPQVTLLQYVDDLLLAGATKQDCLEGTKALLLELSDLGYRASAKKAQICRREVTYLGYSLRDGQRWLTEARKKTVVQIPAPTTAKQVREFLGTAGFCRLWIPGFATLAAPLYPLTKPKGEFSWAPEHQKAFDAIKKALLSAPALALPDVTKPFTLYVDERKGVARGVLTQTLGPWRRPVAYLSKKLDPVASGWPVCLKAIAAVAILVKDADKLTLGQNITVIAPHALENIVRQPPDRWMTNARMTHYQSLLLTERVTFAPPAALNPATLLPEETDEPVTHDCHQLLIEETGVRKDLTDIPLTGEVLTWFTDGSSYVVEGKRMAGAAVVDGTRTIWASSLPEGTSAQKAELMALTQALRLAEGKSINIYTDSRYAFATAHVHGAIYKQRGWLTSAGREIKNKEEILSLLEALHLPKRLAIIHCPGHQKAKDPISRGNQMADRVAKQAAQGVNLLAGKRTADGSEFEKRTADGSEFESPKKKAKVE

SEQ ID NO: 114 - protein, 2087 aa, synthetic construct
MPAAKRVKLDGGDKKYSIGLDIGTNSVGWAVITDEYKVPSKKFKVLGNTDRHSIKKNLIGALLFDSGETAEATRLKRTARRRYTRRKNRICYLQEIFSNEMAKVDDSFFHRLEESFLVEEDKKHERHPIFGNIVDEVAYHEKYPTIYHLRKKLVDSTDKADLRLIYLALAHMIKFRGHFLIEGDLNPDNSDVDKLFIQLVQTYNQLFEENPINASGVDAKAILSARLSKSRRLENLIAQLPGEKKNGLFGNLIALSLGLTPNFKSNFDLAEDAKLQLSKDTYDDDLDNLLAQIGDQYADLFLAAKNLSDAILLSDILRVNTEITKAPLSASMIKRYDEHHQDLTLLKALVRQQLPEKYKEIFFDQSKNGYAGYIDGGASQEEFYKFIKPILEKMDGTEELLVKLNREDLLRKQRTFDNGSIPHQIHLGELHAILRRQEDFYPFLKDNREKIEKILTFRIPYYVGPLARGNSRFAWMTRKSEETITPWNFEEVVDKGASAQSFIERMTNFDKNLPNEKVLPKHSLLYEYFTVYNELTKVKYVTEGMRKPAFLSGEQKKAIVDLLFKTNRKVTVKQLKEDYFKKIECFDSVEISGVEDRFNASLGTYHDLLKIIKDKDFLDNEENEDILEDIVLTLTLFEDREMIEERLKTYAHLFDDKVMKQLKRRRYTGWGRLSRKLINGIRDKQSGKTILDFLKSDGFANRNFMQLIHDDSLTFKEDIQKAQVSGQGDSLHEHIANLAGSPAIKKGILQTVKVVDELVKVMGRHKPENIVIEMARENQTTQKGQKNSRERMKRIEEGIKELGSQILKEHPVENTQLQNEKLYLYYLQNGRDMYVDQELDINRLSDYDVDHIVPQSFLKDDSIDNKVLTRSDKARGKSDNVPSEEVVKKMKNYWRQLLNAKLITQRKFDNLTKAERGGLSELDKAGFIKRQLVETRQITKHVAQILDSRMNTKYDENDKLIREVKVITLKSKLVSDFRKDFQFYKVREINNYHHAHDAYLNAVVGTALIKKYPKLESEFVYGDYKVYDVRKMIAKSEQEIGKATAKYFFYSNIMNFFKTEITLANGEIRKRPLIETNGETGEIVWDKGRDFATVRKVLSMPQVNIVKKTEVQTGGFSKESILPKRNSDKLIARKKDWDPKKYGGFDSPTVAYSVLVVAKVEKGKSKKLKSVKELLGITIMERSSFEKNPIDFLEAKGYKEVKKDLIIKLPKYSLFELENGRKRMLASAGELQKGNELALPSKYVNFLYLASHYEKLKGSPEDNEQKQLFVEQHKHYLDEIIEQISEFSKRVILADANLDKVLSAYNKHRDKPIREQAENIIHLFTLTNLGAPAAFKYFDTTIDRKRYTSTKEVLDATLIHQSITGLYETRIDLSQLGGDGGGGGGGGGGGGTLQLDDEYRLYSPLVKPDQNIQFWLEQFPQAWAETAGMGLAKQVPPQVIQLKASATPVSVRQYPLSKEAQEGIRPHVQRLIQQGILVPVQSPWNTPLLPVRKPGTNDYRPVQDLREVNKRVQDIHPTVPNPYNLLCALPPQRSWYTVLDLKDAFFCLRLHPTSQPLFAFEWRDPGTGRTGQLTWTRLPQGFKNSPTIFNEALHRDLANFRIQHPQVTLLQYVDDLLLAGATKQDCLEGTKALLLELSDLGYRASAKKAQICRREVTYLGYSLRDGQRWLTEARKKTVVQIPAPTTAKQVREFLGTAGFCRLWIPGFATLAAPLYPLTKPKGEFSWAPEHQKAFDAIKKALLSAPALALPDVTKPFTLYVDERKGVARGVLTQTLGPWRRPVAYLSKKLDPVASGWPVCLKAIAAVAILVKDADKLTLGQNITVIAPHALENIVRQPPDRWMTNARMTHYQSLLLTERVTFAPPAALNPATLLPEETDEPVTHDCHQLLIEETGVRKDLTDIPLTGEVLTWFTDGSSYVVEGKRMAGAAVVDGTRTIWASSLPEGTSAQKAELMALTQALRLAEGKSINIYTDSRYAFATAHVHGAIYKQRGWLTSAGREIKNKEEILSLLEALHLPKRLAIIHCPGHQKAKDPISRGNQMADRVAKQAAQGVNLLAGKRTADGSEFEKRTADGSEFESPKKKAKVE

SEQ ID NO: 115 - protein, 2090 aa, synthetic construct
MPAAKRVKLDGGDKKYSIGLDIGTNSVGWAVITDEYKVPSKKFKVLGNTDRHSIKKNLIGALLFDSGETAEATRLKRTARRRYTRRKNRICYLQEIFSNEMAKVDDSFFHRLEESFLVEEDKKHERHPIFGNIVDEVAYHEKYPTIYHLRKKLVDSTDKADLRLIYLALAHMIKFRGHFLIEGDLNPDNSDVDKLFIQLVQTYNQLFEENPINASGVDAKAILSARLSKSRRLENLIAQLPGEKKNGLFGNLIALSLGLTPNFKSNFDLAEDAKLQLSKDTYDDDLDNLLAQIGDQYADLFLAAKNLSDAILLSDILRVNTEITKAPLSASMIKRYDEHHQDLTLLKALVRQQLPEKYKEIFFDQSKNGYAGYIDGGASQEEFYKFIKPILEKMDGTEELLVKLNREDLLRKQRTFDNGSIPHQIHLGELHAILRRQEDFYPFLKDNREKIEKILTFRIPYYVGPLARGNSRFAWMTRKSEETITPWNFEEVVDKGASAQSFIERMTNFDKNLPNEKVLPKHSLLYEYFTVYNELTKVKYVTEGMRKPAFLSGEQKKAIVDLLFKTNRKVTVKQLKEDYFKKIECFDSVEISGVEDRFNASLGTYHDLLKIIKDKDFLDNEENEDILEDIVLTLTLFEDREMIEERLKTYAHLFDDKVMKQLKRRRYTGWGRLSRKLINGIRDKQSGKTILDFLKSDGFANRNFMQLIHDDSLTFKEDIQKAQVSGQGDSLHEHIANLAGSPAIKKGILQTVKVVDELVKVMGRHKPENIVIEMARENQTTQKGQKNSRERMKRIEEGIKELGSQILKEHPVENTQLQNEKLYLYYLQNGRDMYVDQELDINRLSDYDVDHIVPQSFLKDDSIDNKVLTRSDKARGKSDNVPSEEVVKKMKNYWRQLLNAKLITQRKFDNLTKAERGGLSELDKAGFIKRQLVETRQITKHVAQILDSRMNTKYDENDKLIREVKVITLKSKLVSDFRKDFQFYKVREINNYHHAHDAYLNAVVGTALIKKYPKLESEFVYGDYKVYDVRKMIAKSEQEIGKATAKYFFYSNIMNFFKTEITLANGEIRKRPLIETNGETGEIVWDKGRDFATVRKVLSMPQVNIVKKTEVQTGGFSKESILPKRNSDKLIARKKDWDPKKYGGFDSPTVAYSVLVVAKVEKGKSKKLKSVKELLGITIMERSSFEKNPIDFLEAKGYKEVKKDLIIKLPKYSLFELENGRKRMLASAGELQKGNELALPSKYVNFLYLASHYEKLKGSPEDNEQKQLFVEQHKHYLDEIIEQISEFSKRVILADANLDKVLSAYNKHRDKPIREQAENIIHLFTLTNLGAPAAFKYFDTTIDRKRYTSTKEVLDATLIHQSITGLYETRIDLSQLGGDGGPAPAPAPAPAPGGTLQLDDEYRLYSPLVKPDQNIQFWLEQFPQAWAETAGMGLAKQVPPQVIQLKASATPVSVRQYPLSKEAQEGIRPHVQRLIQQGILVPVQSPWNTPLLPVRKPGTNDYRPVQDLREVNKRVQDIHPTVPNPYNLLCALPPQRSWYTVLDLKDAFFCLRLHPTSQPLFAFEWRDPGTGRTGQLTWTRLPQGFKNSPTIFNEALHRDLANFRIQHPQVTLLQYVDDLLLAGATKQDCLEGTKALLLELSDLGYRASAKKAQICRREVTYLGYSLRDGQRWLTEARKKTVVQIPAPTTAKQVREFLGTAGFCRLWIPGFATLAAPLYPLTKPKGEFSWAPEHQKAFDAIKKALLSAPALALPDVTKPFTLYVDERKGVARGVLTQTLGPWRRPVAYLSKKLDPVASGWPVCLKAIAAVAILVKDADKLTLGQNITVIAPHALENIVRQPPDRWMTNARMTHYQSLLLTERVTFAPPAALNPATLLPEETDEPVTHDCHQLLIEETGVRKDLTDIPLTGEVLTWFTDGSSYVVEGKRMAGAAVVDGTRTIWASSLPEGTSAQKAELMALTQALRLAEGKSINIYTDSRYAFATAHVHGAIYKQRGWLTSAGREIKNKEEILSLLEALHLPKRLAIIHCPGHQKAKDPISRGNQMADRVAKQAAQGVNLLAGKRTADGSEFEKRTADGSEFESPKKKAKVE

SEQ ID NO: 116 - protein, 2090 aa, synthetic construct
MPAAKRVKLDGGDKKYSIGLDIGTNSVGWAVITDEYKVPSKKFKVLGNTDRHSIKKNLIGALLFDSGETAEATRLKRTARRRYTRRKNRICYLQEIFSNEMAKVDDSFFHRLEESFLVEEDKKHERHPIFGNIVDEVAYHEKYPTIYHLRKKLVDSTDKADLRLIYLALAHMIKFRGHFLIEGDLNPDNSDVDKLFIQLVQTYNQLFEENPINASGVDAKAILSARLSKSRRLENLIAQLPGEKKNGLFGNLIALSLGLTPNFKSNFDLAEDAKLQLSKDTYDDDLDNLLAQIGDQYADLFLAAKNLSDAILLSDILRVNTEITKAPLSASMIKRYDEHHQDLTLLKALVRQQLPEKYKEIFFDQSKNGYAGYIDGGASQEEFYKFIKPILEKMDGTEELLVKLNREDLLRKQRTFDNGSIPHQIHLGELHAILRRQEDFYPFLKDNREKIEKILTFRIPYYVGPLARGNSRFAWMTRKSEETITPWNFEEVVDKGASAQSFIERMTNFDKNLPNEKVLPKHSLLYEYFTVYNELTKVKYVTEGMRKPAFLSGEQKKAIVDLLFKTNRKVTVKQLKEDYFKKIECFDSVEISGVEDRFNASLGTYHDLLKIIKDKDFLDNEENEDILEDIVLTLTLFEDREMIEERLKTYAHLFDDKVMKQLKRRRYTGWGRLSRKLINGIRDKQSGKTILDFLKSDGFANRNFMQLIHDDSLTFKEDIQKAQVSGQGDSLHEHIANLAGSPAIKKGILQTVKVVDELVKVMGRHKPENIVIEMARENQTTQKGQKNSRERMKRIEEGIKELGSQILKEHPVENTQLQNEKLYLYYLQNGRDMYVDQELDINRLSDYDVDHIVPQSFLKDDSIDNKVLTRSDKARGKSDNVPSEEVVKKMKNYWRQLLNAKLITQRKFDNLTKAERGGLSELDKAGFIKRQLVETRQITKHVAQILDSRMNTKYDENDKLIREVKVITLKSKLVSDFRKDFQFYKVREINNYHHAHDAYLNAVVGTALIKKYPKLESEFVYGDYKVYDVRKMIAKSEQEIGKATAKYFFYSNIMNFFKTEITLANGEIRKRPLIETNGETGEIVWDKGRDFATVRKVLSMPQVNIVKKTEVQTGGFSKESILPKRNSDKLIARKKDWDPKKYGGFDSPTVAYSVLVVAKVEKGKSKKLKSVKELLGITIMERSSFEKNPIDFLEAKGYKEVKKDLIIKLPKYSLFELENGRKRMLASAGELQKGNELALPSKYVNFLYLASHYEKLKGSPEDNEQKQLFVEQHKHYLDEIIEQISEFSKRVILADANLDKVLSAYNKHRDKPIREQAENIIHLFTLTNLGAPAAFKYFDTTIDRKRYTSTKEVLDATLIHQSITGLYETRIDLSQLGGDGGGSSEAAAKPAPGGTLQLDDEYRLYSPLVKPDQNIQFWLEQFPQAWAETAGMGLAKQVPPQVIQLKASATPVSVRQYPLSKEAQEGIRPHVQRLIQQGILVPVQSPWNTPLLPVRKPGTNDYRPVQDLREVNKRVQDIHPTVPNPYNLLCALPPQRSWYTVLDLKDAFFCLRLHPTSQPLFAFEWRDPGTGRTGQLTWTRLPQGFKNSPTIFNEALHRDLANFRIQHPQVTLLQYVDDLLLAGATKQDCLEGTKALLLELSDLGYRASAKKAQICRREVTYLGYSLRDGQRWLTEARKKTVVQIPAPTTAKQVREFLGTAGFCRLWIPGFATLAAPLYPLTKPKGEFSWAPEHQKAFDAIKKALLSAPALALPDVTKPFTLYVDERKGVARGVLTQTLGPWRRPVAYLSKKLDPVASGWPVCLKAIAAVAILVKDADKLTLGQNITVIAPHALENIVRQPPDRWMTNARMTHYQSLLLTERVTFAPPAALNPATLLPEETDEPVTHDCHQLLIEETGVRKDLTDIPLTGEVLTWFTDGSSYVVEGKRMAGAAVVDGTRTIWASSLPEGTSAQKAELMALTQALRLAEGKSINIYTDSRYAFATAHVHGAIYKQRGWLTSAGREIKNKEEILSLLEALHLPKRLAIIHCPGHQKAKDPISRGNQMADRVAKQAAQGVNLLAGKRTADGSEFEKRTADGSEFESPKKKAKVE

SEQ ID NO: 117 - protein, 2109 aa, synthetic construct
MPAAKRVKLDGGDKKYSIGLDIGTNSVGWAVITDEYKVPSKKFKVLGNTDRHSIKKNLIGALLFDSGETAEATRLKRTARRRYTRRKNRICYLQEIFSNEMAKVDDSFFHRLEESFLVEEDKKHERHPIFGNIVDEVAYHEKYPTIYHLRKKLVDSTDKADLRLIYLALAHMIKFRGHFLIEGDLNPDNSDVDKLFIQLVQTYNQLFEENPINASGVDAKAILSARLSKSRRLENLIAQLPGEKKNGLFGNLIALSLGLTPNFKSNFDLAEDAKLQLSKDTYDDDLDNLLAQIGDQYADLFLAAKNLSDAILLSDILRVNTEITKAPLSASMIKRYDEHHQDLTLLKALVRQQLPEKYKEIFFDQSKNGYAGYIDGGASQEEFYKFIKPILEKMDGTEELLVKLNREDLLRKQRTFDNGSIPHQIHLGELHAILRRQEDFYPFLKDNREKIEKILTFRIPYYVGPLARGNSRFAWMTRKSEETITPWNFEEVVDKGASAQSFIERMTNFDKNLPNEKVLPKHSLLYEYFTVYNELTKVKYVTEGMRKPAFLSGEQKKAIVDLLFKTNRKVTVKQLKEDYFKKIECFDSVEISGVEDRFNASLGTYHDLLKIIKDKDFLDNEENEDILEDIVLTLTLFEDREMIEERLKTYAHLFDDKVMKQLKRRRYTGWGRLSRKLINGIRDKQSGKTILDFLKSDGFANRNFMQLIHDDSLTFKEDIQKAQVSGQGDSLHEHIANLAGSPAIKKGILQTVKVVDELVKVMGRHKPENIVIEMARENQTTQKGQKNSRERMKRIEEGIKELGSQILKEHPVENTQLQNEKLYLYYLQNGRDMYVDQELDINRLSDYDVDHIVPQSFLKDDSIDNKVLTRSDKARGKSDNVPSEEVVKKMKNYWRQLLNAKLITQRKFDNLTKAERGGLSELDKAGFIKRQLVETRQITKHVAQILDSRMNTKYDENDKLIREVKVITLKSKLVSDFRKDFQFYKVREINNYHHAHDAYLNAVVGTALIKKYPKLESEFVYGDYKVYDVRKMIAKSEQEIGKATAKYFFYSNIMNFFKTEITLANGEIRKRPLIETNGETGEIVWDKGRDFATVRKVLSMPQVNIVKKTEVQTGGFSKESILPKRNSDKLIARKKDWDPKKYGGFDSPTVAYSVLVVAKVEKGKSKKLKSVKELLGITIMERSSFEKNPIDFLEAKGYKEVKKDLIIKLPKYSLFELENGRKRMLASAGELQKGNELALPSKYVNFLYLASHYEKLKGSPEDNEQKQLFVEQHKHYLDEIIEQISEFSKRVILADANLDKVLSAYNKHRDKPIREQAENIIHLFTLTNLGAPAAFKYFDTTIDRKRYTSTKEVLDATLIHQSITGLYETRIDLSQLGGDGGEAAAKEAAAKEAAAKEAAAKEAAAKEAAAKGGTLQLDDEYRLYSPLVKPDQNIQFWLEQFPQAWAETAGMGLAKQVPPQVIQLKASATPVSVRQYPLSKEAQEGIRPHVQRLIQQGILVPVQSPWNTPLLPVRKPGTNDYRPVQDLREVNKRVQDIHPTVPNPYNLLCALPPQRSWYTVLDLKDAFFCLRLHPTSQPLFAFEWRDPGTGRTGQLTWTRLPQGFKNSPTIFNEALHRDLANFRIQHPQVTLLQYVDDLLLAGATKQDCLEGTKALLLELSDLGYRASAKKAQICRREVTYLGYSLRDGQRWLTEARKKTVVQIPAPTTAKQVREFLGTAGFCRLWIPGFATLAAPLYPLTKPKGEFSWAPEHQKAFDAIKKALLSAPALALPDVTKPFTLYVDERKGVARGVLTQTLGPWRRPVAYLSKKLDPVASGWPVCLKAIAAVAILVKDADKLTLGQNITVIAPHALENIVRQPPDRWMTNARMTHYQSLLLTERVTFAPPAALNPATLLPEETDEPVTHDCHQLLIEETGVRKDLTDIPLTGEVLTWFTDGSSYVVEGKRMAGAAVVDGTRTIWASSLPEGTSAQKAELMALTQALRLAEGKSINIYTDSRYAFATAHVHGAIYKQRGWLTSAGREIKNKEEILSLLEALHLPKRLAIIHCPGHQKAKDPISRGNQMADRVAKQAAQGVNLLAGKRTADGSEFEKRTADGSEFESPKKKAKVE

SEQ ID NO: 118 - protein, 2094 aa, synthetic construct
MPAAKRVKLDGGDKKYSIGLDIGTNSVGWAVITDEYKVPSKKFKVLGNTDRHSIKKNLIGALLFDSGETAEATRLKRTARRRYTRRKNRICYLQEIFSNEMAKVDDSFFHRLEESFLVEEDKKHERHPIFGNIVDEVAYHEKYPTIYHLRKKLVDSTDKADLRLIYLALAHMIKFRGHFLIEGDLNPDNSDVDKLFIQLVQTYNQLFEENPINASGVDAKAILSARLSKSRRLENLIAQLPGEKKNGLFGNLIALSLGLTPNFKSNFDLAEDAKLQLSKDTYDDDLDNLLAQIGDQYADLFLAAKNLSDAILLSDILRVNTEITKAPLSASMIKRYDEHHQDLTLLKALVRQQLPEKYKEIFFDQSKNGYAGYIDGGASQEEFYKFIKPILEKMDGTEELLVKLNREDLLRKQRTFDNGSIPHQIHLGELHAILRRQEDFYPFLKDNREKIEKILTFRIPYYVGPLARGNSRFAWMTRKSEETITPWNFEEVVDKGASAQSFIERMTNFDKNLPNEKVLPKHSLLYEYFTVYNELTKVKYVTEGMRKPAFLSGEQKKAIVDLLFKTNRKVTVKQLKEDYFKKIECFDSVEISGVEDRFNASLGTYHDLLKIIKDKDFLDNEENEDILEDIVLTLTLFEDREMIEERLKTYAHLFDDKVMKQLKRRRYTGWGRLSRKLINGIRDKQSGKTILDFLKSDGFANRNFMQLIHDDSLTFKEDIQKAQVSGQGDSLHEHIANLAGSPAIKKGILQTVKVVDELVKVMGRHKPENIVIEMARENQTTQKGQKNSRERMKRIEEGIKELGSQILKEHPVENTQLQNEKLYLYYLQNGRDMYVDQELDINRLSDYDVDHIVPQSFLKDDSIDNKVLTRSDKARGKSDNVPSEEVVKKMKNYWRQLLNAKLITQRKFDNLTKAERGGLSELDKAGFIKRQLVETRQITKHVAQILDSRMNTKYDENDKLIREVKVITLKSKLVSDFRKDFQFYKVREINNYHHAHDAYLNAVVGTALIKKYPKLESEFVYGDYKVYDVRKMIAKSEQEIGKATAKYFFYSNIMNFFKTEITLANGEIRKRPLIETNGETGEIVWDKGRDFATVRKVLSMPQVNIVKKTEVQTGGFSKESILPKRNSDKLIARKKDWDPKKYGGFDSPTVAYSVLVVAKVEKGKSKKLKSVKELLGITIMERSSFEKNPIDFLEAKGYKEVKKDLIIKLPKYSLFELENGRKRMLASAGELQKGNELALPSKYVNFLYLASHYEKLKGSPEDNEQKQLFVEQHKHYLDEIIEQISEFSKRVILADANLDKVLSAYNKHRDKPIREQAENIIHLFTLTNLGAPAAFKYFDTTIDRKRYTSTKEVLDATLIHQSITGLYETRIDLSQLGGDGGGSSGSSGSSGSSGSSGGTLQLDDEYRLYSPLVKPDQNIQFWLEQFPQAWAETAGMGLAKQVPPQVIQLKASATPVSVRQYPLSKEAQEGIRPHVQRLIQQGILVPVQSPWNTPLLPVRKPGTNDYRPVQDLREVNKRVQDIHPTVPNPYNLLCALPPQRSWYTVLDLKDAFFCLRLHPTSQPLFAFEWRDPGTGRTGQLTWTRLPQGFKNSPTIFNEALHRDLANFRIQHPQVTLLQYVDDLLLAGATKQDCLEGTKALLLELSDLGYRASAKKAQICRREVTYLGYSLRDGQRWLTEARKKTVVQIPAPTTAKQVREFLGTAGFCRLWIPGFATLAAPLYPLTKPKGEFSWAPEHQKAFDAIKKALLSAPALALPDVTKPFTLYVDERKGVARGVLTQTLGPWRRPVAYLSKKLDPVASGWPVCLKAIAAVAILVKDADKLTLGQNITVIAPHALENIVRQPPDRWMTNARMTHYQSLLLTERVTFAPPAALNPATLLPEETDEPVTHDCHQLLIEETGVRKDLTDIPLTGEVLTWFTDGSSYVVEGKRMAGAAVVDGTRTIWASSLPEGTSAQKAELMALTQALRLAEGKSINIYTDSRYAFATAHVHGAIYKQRGWLTSAGREIKNKEEILSLLEALHLPKRLAIIHCPGHQKAKDPISRGNQMADRVAKQAAQGVNLLAGKRTADGSEFEKRTADGSEFESPKKKAKVE

SEQ ID NO: 119 - protein, 2090 aa, synthetic construct
MPAAKRVKLDGGDKKYSIGLDIGTNSVGWAVITDEYKVPSKKFKVLGNTDRHSIKKNLIGALLFDSGETAEATRLKRTARRRYTRRKNRICYLQEIFSNEMAKVDDSFFHRLEESFLVEEDKKHERHPIFGNIVDEVAYHEKYPTIYHLRKKLVDSTDKADLRLIYLALAHMIKFRGHFLIEGDLNPDNSDVDKLFIQLVQTYNQLFEENPINASGVDAKAILSARLSKSRRLENLIAQLPGEKKNGLFGNLIALSLGLTPNFKSNFDLAEDAKLQLSKDTYDDDLDNLLAQIGDQYADLFLAAKNLSDAILLSDILRVNTEITKAPLSASMIKRYDEHHQDLTLLKALVRQQLPEKYKEIFFDQSKNGYAGYIDGGASQEEFYKFIKPILEKMDGTEELLVKLNREDLLRKQRTFDNGSIPHQIHLGELHAILRRQEDFYPFLKDNREKIEKILTFRIPYYVGPLARGNSRFAWMTRKSEETITPWNFEEVVDKGASAQSFIERMTNFDKNLPNEKVLPKHSLLYEYFTVYNELTKVKYVTEGMRKPAFLSGEQKKAIVDLLFKTNRKVTVKQLKEDYFKKIECFDSVEISGVEDRFNASLGTYHDLLKIIKDKDFLDNEENEDILEDIVLTLTLFEDREMIEERLKTYAHLFDDKVMKQLKRRRYTGWGRLSRKLINGIRDKQSGKTILDFLKSDGFANRNFMQLIHDDSLTFKEDIQKAQVSGQGDSLHEHIANLAGSPAIKKGILQTVKVVDELVKVMGRHKPENIVIEMARENQTTQKGQKNSRERMKRIEEGIKELGSQILKEHPVENTQLQNEKLYLYYLQNGRDMYVDQELDINRLSDYDVDHIVPQSFLKDDSIDNKVLTRSDKARGKSDNVPSEEVVKKMKNYWRQLLNAKLITQRKFDNLTKAERGGLSELDKAGFIKRQLVETRQITKHVAQILDSRMNTKYDENDKLIREVKVITLKSKLVSDFRKDFQFYKVREINNYHHAHDAYLNAVVGTALIKKYPKLESEFVYGDYKVYDVRKMIAKSEQEIGKATAKYFFYSNIMNFFKTEITLANGEIRKRPLIETNGETGEIVWDKGRDFATVRKVLSMPQVNIVKKTEVQTGGFSKESILPKRNSDKLIARKKDWDPKKYGGFDSPTVAYSVLVVAKVEKGKSKKLKSVKELLGITIMERSSFEKNPIDFLEAKGYKEVKKDLIIKLPKYSLFELENGRKRMLASAGELQKGNELALPSKYVNFLYLASHYEKLKGSPEDNEQKQLFVEQHKHYLDEIIEQISEFSKRVILADANLDKVLSAYNKHRDKPIREQAENIIHLFTLTNLGAPAAFKYFDTTIDRKRYTSTKEVLDATLIHQSITGLYETRIDLSQLGGDGGEAAAKGSSGGSGGTLQLDDEYRLYSPLVKPDQNIQFWLEQFPQAWAETAGMGLAKQVPPQVIQLKASATPVSVRQYPLSKEAQEGIRPHVQRLIQQGILVPVQSPWNTPLLPVRKPGTNDYRPVQDLREVNKRVQDIHPTVPNPYNLLCALPPQRSWYTVLDLKDAFFCLRLHPTSQPLFAFEWRDPGTGRTGQLTWTRLPQGFKNSPTIFNEALHRDLANFRIQHPQVTLLQYVDDLLLAGATKQDCLEGTKALLLELSDLGYRASAKKAQICRREVTYLGYSLRDGQRWLTEARKKTVVQIPAPTTAKQVREFLGTAGFCRLWIPGFATLAAPLYPLTKPKGEFSWAPEHQKAFDAIKKALLSAPALALPDVTKPFTLYVDERKGVARGVLTQTLGPWRRPVAYLSKKLDPVASGWPVCLKAIAAVAILVKDADKLTLGQNITVIAPHALENIVRQPPDRWMTNARMTHYQSLLLTERVTFAPPAALNPATLLPEETDEPVTHDCHQLLIEETGVRKDLTDIPLTGEVLTWFTDGSSYVVEGKRMAGAAVVDGTRTIWASSLPEGTSAQKAELMALTQALRLAEGKSINIYTDSRYAFATAHVHGAIYKQRGWLTSAGREIKNKEEILSLLEALHLPKRLAIIHCPGHQKAKDPISRGNQMADRVAKQAAQGVNLLAGKRTADGSEFEKRTADGSEFESPKKKAKVE

SEQ ID NO: 120 - protein, 2082 aa, synthetic construct
MPAAKRVKLDGGDKKYSIGLDIGTNSVGWAVITDEYKVPSKKFKVLGNTDRHSIKKNLIGALLFDSGETAEATRLKRTARRRYTRRKNRICYLQEIFSNEMAKVDDSFFHRLEESFLVEEDKKHERHPIFGNIVDEVAYHEKYPTIYHLRKKLVDSTDKADLRLIYLALAHMIKFRGHFLIEGDLNPDNSDVDKLFIQLVQTYNQLFEENPINASGVDAKAILSARLSKSRRLENLIAQLPGEKKNGLFGNLIALSLGLTPNFKSNFDLAEDAKLQLSKDTYDDDLDNLLAQIGDQYADLFLAAKNLSDAILLSDILRVNTEITKAPLSASMIKRYDEHHQDLTLLKALVRQQLPEKYKEIFFDQSKNGYAGYIDGGASQEEFYKFIKPILEKMDGTEELLVKLNREDLLRKQRTFDNGSIPHQIHLGELHAILRRQEDFYPFLKDNREKIEKILTFRIPYYVGPLARGNSRFAWMTRKSEETITPWNFEEVVDKGASAQSFIERMTNFDKNLPNEKVLPKHSLLYEYFTVYNELTKVKYVTEGMRKPAFLSGEQKKAIVDLLFKTNRKVTVKQLKEDYFKKIECFDSVEISGVEDRFNASLGTYHDLLKIIKDKDFLDNEENEDILEDIVLTLTLFEDREMIEERLKTYAHLFDDKVMKQLKRRRYTGWGRLSRKLINGIRDKQSGKTILDFLKSDGFANRNFMQLIHDDSLTFKEDIQKAQVSGQGDSLHEHIANLAGSPAIKKGILQTVKVVDELVKVMGRHKPENIVIEMARENQTTQKGQKNSRERMKRIEEGIKELGSQILKEHPVENTQLQNEKLYLYYLQNGRDMYVDQELDINRLSDYDVDHIVPQSFLKDDSIDNKVLTRSDKARGKSDNVPSEEVVKKMKNYWRQLLNAKLITQRKFDNLTKAERGGLSELDKAGFIKRQLVETRQITKHVAQILDSRMNTKYDENDKLIREVKVITLKSKLVSDFRKDFQFYKVREINNYHHAHDAYLNAVVGTALIKKYPKLESEFVYGDYKVYDVRKMIAKSEQEIGKATAKYFFYSNIMNFFKTEITLANGEIRKRPLIETNGETGEIVWDKGRDFATVRKVLSMPQVNIVKKTEVQTGGFSKESILPKRNSDKLIARKKDWDPKKYGGFDSPTVAYSVLVVAKVEKGKSKKLKSVKELLGITIMERSSFEKNPIDFLEAKGYKEVKKDLIIKLPKYSLFELENGRKRMLASAGELQKGNELALPSKYVNFLYLASHYEKLKGSPEDNEQKQLFVEQHKHYLDEIIEQISEFSKRVILADANLDKVLSAYNKHRDKPIREQAENIIHLFTLTNLGAPAAFKYFDTTIDRKRYTSTKEVLDATLIHQSITGLYETRIDLSQLGGDGGGSSGGTLQLDDEYRLYSPLVKPDQNIQFWLEQFPQAWAETAGMGLAKQVPPQVIQLKASATPVSVRQYPLSKEAQEGIRPHVQRLIQQGILVPVQSPWNTPLLPVRKPGTNDYRPVQDLREVNKRVQDIHPTVPNPYNLLCALPPQRSWYTVLDLKDAFFCLRLHPTSQPLFAFEWRDPGTGRTGQLTWTRLPQGFKNSPTIFNEALHRDLANFRIQHPQVTLLQYVDDLLLAGATKQDCLEGTKALLLELSDLGYRASAKKAQICRREVTYLGYSLRDGQRWLTEARKKTVVQIPAPTTAKQVREFLGTAGFCRLWIPGFATLAAPLYPLTKPKGEFSWAPEHQKAFDAIKKALLSAPALALPDVTKPFTLYVDERKGVARGVLTQTLGPWRRPVAYLSKKLDPVASGWPVCLKAIAAVAILVKDADKLTLGQNITVIAPHALENIVRQPPDRWMTNARMTHYQSLLLTERVTFAPPAALNPATLLPEETDEPVTHDCHQLLIEETGVRKDLTDIPLTGEVLTWFTDGSSYVVEGKRMAGAAVVDGTRTIWASSLPEGTSAQKAELMALTQALRLAEGKSINIYTDSRYAFATAHVHGAIYKQRGWLTSAGREIKNKEEILSLLEALHLPKRLAIIHCPGHQKAKDPISRGNQMADRVAKQAAQGVNLLAGKRTADGSEFEKRTADGSEFESPKKKAKVE

SEQ ID NO: 121 - protein, 2090 aa, synthetic construct
MPAAKRVKLDGGDKKYSIGLDIGTNSVGWAVITDEYKVPSKKFKVLGNTDRHSIKKNLIGALLFDSGETAEATRLKRTARRRYTRRKNRICYLQEIFSNEMAKVDDSFFHRLEESFLVEEDKKHERHPIFGNIVDEVAYHEKYPTIYHLRKKLVDSTDKADLRLIYLALAHMIKFRGHFLIEGDLNPDNSDVDKLFIQLVQTYNQLFEENPINASGVDAKAILSARLSKSRRLENLIAQLPGEKKNGLFGNLIALSLGLTPNFKSNFDLAEDAKLQLSKDTYDDDLDNLLAQIGDQYADLFLAAKNLSDAILLSDILRVNTEITKAPLSASMIKRYDEHHQDLTLLKALVRQQLPEKYKEIFFDQSKNGYAGYIDGGASQEEFYKFIKPILEKMDGTEELLVKLNREDLLRKQRTFDNGSIPHQIHLGELHAILRRQEDFYPFLKDNREKIEKILTFRIPYYVGPLARGNSRFAWMTRKSEETITPWNFEEVVDKGASAQSFIERMTNFDKNLPNEKVLPKHSLLYEYFTVYNELTKVKYVTEGMRKPAFLSGEQKKAIVDLLFKTNRKVTVKQLKEDYFKKIECFDSVEISGVEDRFNASLGTYHDLLKIIKDKDFLDNEENEDILEDIVLTLTLFEDREMIEERLKTYAHLFDDKVMKQLKRRRYTGWGRLSRKLINGIRDKQSGKTILDFLKSDGFANRNFMQLIHDDSLTFKEDIQKAQVSGQGDSLHEHIANLAGSPAIKKGILQTVKVVDELVKVMGRHKPENIVIEMARENQTTQKGQKNSRERMKRIEEGIKELGSQILKEHPVENTQLQNEKLYLYYLQNGRDMYVDQELDINRLSDYDVDHIVPQSFLKDDSIDNKVLTRSDKARGKSDNVPSEEVVKKMKNYWRQLLNAKLITQRKFDNLTKAERGGLSELDKAGFIKRQLVETRQITKHVAQILDSRMNTKYDENDKLIREVKVITLKSKLVSDFRKDFQFYKVREINNYHHAHDAYLNAVVGTALIKKYPKLESEFVYGDYKVYDVRKMIAKSEQEIGKATAKYFFYSNIMNFFKTEITLANGEIRKRPLIETNGETGEIVWDKGRDFATVRKVLSMPQVNIVKKTEVQTGGFSKESILPKRNSDKLIARKKDWDPKKYGGFDSPTVAYSVLVVAKVEKGKSKKLKSVKELLGITIMERSSFEKNPIDFLEAKGYKEVKKDLIIKLPKYSLFELENGRKRMLASAGELQKGNELALPSKYVNFLYLASHYEKLKGSPEDNEQKQLFVEQHKHYLDEIIEQISEFSKRVILADANLDKVLSAYNKHRDKPIREQAENIIHLFTLTNLGAPAAFKYFDTTIDRKRYTSTKEVLDATLIHQSITGLYETRIDLSQLGGDGGGGGGSSEAAAKGGTLQLDDEYRLYSPLVKPDQNIQFWLEQFPQAWAETAGMGLAKQVPPQVIQLKASATPVSVRQYPLSKEAQEGIRPHVQRLIQQGILVPVQSPWNTPLLPVRKPGTNDYRPVQDLREVNKRVQDIHPTVPNPYNLLCALPPQRSWYTVLDLKDAFFCLRLHPTSQPLFAFEWRDPGTGRTGQLTWTRLPQGFKNSPTIFNEALHRDLANFRIQHPQVTLLQYVDDLLLAGATKQDCLEGTKALLLELSDLGYRASAKKAQICRREVTYLGYSLRDGQRWLTEARKKTVVQIPAPTTAKQVREFLGTAGFCRLWIPGFATLAAPLYPLTKPKGEFSWAPEHQKAFDAIKKALLSAPALALPDVTKPFTLYVDERKGVARGVLTQTLGPWRRPVAYLSKKLDPVASGWPVCLKAIAAVAILVKDADKLTLGQNITVIAPHALENIVRQPPDRWMTNARMTHYQSLLLTERVTFAPPAALNPATLLPEETDEPVTHDCHQLLIEETGVRKDLTDIPLTGEVLTWFTDGSSYVVEGKRMAGAAVVDGTRTIWASSLPEGTSAQKAELMALTQALRLAEGKSINIYTDSRYAFATAHVHGAIYKQRGWLTSAGREIKNKEEILSLLEALHLPKRLAIIHCPGHQKAKDPISRGNQMADRVAKQAAQGVNLLAGKRTADGSEFEKRTADGSEFESPKKKAKVE

SEQ ID NO: 122 - protein, 2095 aa, synthetic construct
MPAAKRVKLDGGDKKYSIGLDIGTNSVGWAVITDEYKVPSKKFKVLGNTDRHSIKKNLIGALLFDSGETAEATRLKRTARRRYTRRKNRICYLQEIFSNEMAKVDDSFFHRLEESFLVEEDKKHERHPIFGNIVDEVAYHEKYPTIYHLRKKLVDSTDKADLRLIYLALAHMIKFRGHFLIEGDLNPDNSDVDKLFIQLVQTYNQLFEENPINASGVDAKAILSARLSKSRRLENLIAQLPGEKKNGLFGNLIALSLGLTPNFKSNFDLAEDAKLQLSKDTYDDDLDNLLAQIGDQYADLFLAAKNLSDAILLSDILRVNTEITKAPLSASMIKRYDEHHQDLTLLKALVRQQLPEKYKEIFFDQSKNGYAGYIDGGASQEEFYKFIKPILEKMDGTEELLVKLNREDLLRKQRTFDNGSIPHQIHLGELHAILRRQEDFYPFLKDNREKIEKILTFRIPYYVGPLARGNSRFAWMTRKSEETITPWNFEEVVDKGASAQSFIERMTNFDKNLPNEKVLPKHSLLYEYFTVYNELTKVKYVTEGMRKPAFLSGEQKKAIVDLLFKTNRKVTVKQLKEDYFKKIECFDSVEISGVEDRFNASLGTYHDLLKIIKDKDFLDNEENEDILEDIVLTLTLFEDREMIEERLKTYAHLFDDKVMKQLKRRRYTGWGRLSRKLINGIRDKQSGKTILDFLKSDGFANRNFMQLIHDDSLTFKEDIQKAQVSGQGDSLHEHIANLAGSPAIKKGILQTVKVVDELVKVMGRHKPENIVIEMARENQTTQKGQKNSRERMKRIEEGIKELGSQILKEHPVENTQLQNEKLYLYYLQNGRDMYVDQELDINRLSDYDVDHIVPQSFLKDDSIDNKVLTRSDKARGKSDNVPSEEVVKKMKNYWRQLLNAKLITQRKFDNLTKAERGGLSELDKAGFIKRQLVETRQITKHVAQILDSRMNTKYDENDKLIREVKVITLKSKLVSDFRKDFQFYKVREINNYHHAHDAYLNAVVGTALIKKYPKLESEFVYGDYKVYDVRKMIAKSEQEIGKATAKYFFYSNIMNFFKTEITLANGEIRKRPLIETNGETGEIVWDKGRDFATVRKVLSMPQVNIVKKTEVQTGGFSKESILPKRNSDKLIARKKDWDPKKYGGFDSPTVAYSVLVVAKVEKGKSKKLKSVKELLGITIMERSSFEKNPIDFLEAKGYKEVKKDLIIKLPKYSLFELENGRKRMLASAGELQKGNELALPSKYVNFLYLASHYEKLKGSPEDNEQKQLFVEQHKHYLDEIIEQISEFSKRVILADANLDKVLSAYNKHRDKPIREQAENIIHLFTLTNLGAPAAFKYFDTTIDRKRYTSTKEVLDATLIHQSITGLYETRIDLSQLGGDGGSGSETPGTSESATPESGGTLQLDDEYRLYSPLVKPDQNIQFWLEQFPQAWAETAGMGLAKQVPPQVIQLKASATPVSVRQYPLSKEAQEGIRPHVQRLIQQGILVPVQSPWNTPLLPVRKPGTNDYRPVQDLREVNKRVQDIHPTVPNPYNLLCALPPQRSWYTVLDLKDAFFCLRLHPTSQPLFAFEWRDPGTGRTGQLTWTRLPQGFKNSPTIFNEALHRDLANFRIQHPQVTLLQYVDDLLLAGATKQDCLEGTKALLLELSDLGYRASAKKAQICRREVTYLGYSLRDGQRWLTEARKKTVVQIPAPTTAKQVREFLGTAGFCRLWIPGFATLAAPLYPLTKPKGEFSWAPEHQKAFDAIKKALLSAPALALPDVTKPFTLYVDERKGVARGVLTQTLGPWRRPVAYLSKKLDPVASGWPVCLKAIAAVAILVKDADKLTLGQNITVIAPHALENIVRQPPDRWMTNARMTHYQSLLLTERVTFAPPAALNPATLLPEETDEPVTHDCHQLLIEETGVRKDLTDIPLTGEVLTWFTDGSSYVVEGKRMAGAAVVDGTRTIWASSLPEGTSAQKAELMALTQALRLAEGKSINIYTDSRYAFATAHVHGAIYKQRGWLTSAGREIKNKEEILSLLEALHLPKRLAIIHCPGHQKAKDPISRGNQMADRVAKQAAQGVNLLAGKRTADGSEFEKRTADGSEFESPKKKAKVE

SEQ ID NO: 123 - protein, 2085 aa, synthetic construct
MPAAKRVKLDGGDKKYSIGLDIGTNSVGWAVITDEYKVPSKKFKVLGNTDRHSIKKNLIGALLFDSGETAEATRLKRTARRRYTRRKNRICYLQEIFSNEMAKVDDSFFHRLEESFLVEEDKKHERHPIFGNIVDEVAYHEKYPTIYHLRKKLVDSTDKADLRLIYLALAHMIKFRGHFLIEGDLNPDNSDVDKLFIQLVQTYNQLFEENPINASGVDAKAILSARLSKSRRLENLIAQLPGEKKNGLFGNLIALSLGLTPNFKSNFDLAEDAKLQLSKDTYDDDLDNLLAQIGDQYADLFLAAKNLSDAILLSDILRVNTEITKAPLSASMIKRYDEHHQDLTLLKALVRQQLPEKYKEIFFDQSKNGYAGYIDGGASQEEFYKFIKPILEKMDGTEELLVKLNREDLLRKQRTFDNGSIPHQIHLGELHAILRRQEDFYPFLKDNREKIEKILTFRIPYYVGPLARGNSRFAWMTRKSEETITPWNFEEVVDKGASAQSFIERMTNFDKNLPNEKVLPKHSLLYEYFTVYNELTKVKYVTEGMRKPAFLSGEQKKAIVDLLFKTNRKVTVKQLKEDYFKKIECFDSVEISGVEDRFNASLGTYHDLLKIIKDKDFLDNEENEDILEDIVLTLTLFEDREMIEERLKTYAHLFDDKVMKQLKRRRYTGWGRLSRKLINGIRDKQSGKTILDFLKSDGFANRNFMQLIHDDSLTFKEDIQKAQVSGQGDSLHEHIANLAGSPAIKKGILQTVKVVDELVKVMGRHKPENIVIEMARENQTTQKGQKNSRERMKRIEEGIKELGSQILKEHPVENTQLQNEKLYLYYLQNGRDMYVDQELDINRLSDYDVDHIVPQSFLKDDSIDNKVLTRSDKARGKSDNVPSEEVVKKMKNYWRQLLNAKLITQRKFDNLTKAERGGLSELDKAGFIKRQLVETRQITKHVAQILDSRMNTKYDENDKLIREVKVITLKSKLVSDFRKDFQFYKVREINNYHHAHDAYLNAVVGTALIKKYPKLESEFVYGDYKVYDVRKMIAKSEQEIGKATAKYFFYSNIMNFFKTEITLANGEIRKRPLIETNGETGEIVWDKGRDFATVRKVLSMPQVNIVKKTEVQTGGFSKESILPKRNSDKLIARKKDWDPKKYGGFDSPTVAYSVLVVAKVEKGKSKKLKSVKELLGITIMERSSFEKNPIDFLEAKGYKEVKKDLIIKLPKYSLFELENGRKRMLASAGELQKGNELALPSKYVNFLYLASHYEKLKGSPEDNEQKQLFVEQHKHYLDEIIEQISEFSKRVILADANLDKVLSAYNKHRDKPIREQAENIIHLFTLTNLGAPAAFKYFDTTIDRKRYTSTKEVLDATLIHQSITGLYETRIDLSQLGGDGGPAPGSSGGTLQLDDEYRLYSPLVKPDQNIQFWLEQFPQAWAETAGMGLAKQVPPQVIQLKASATPVSVRQYPLSKEAQEGIRPHVQRLIQQGILVPVQSPWNTPLLPVRKPGTNDYRPVQDLREVNKRVQDIHPTVPNPYNLLCALPPQRSWYTVLDLKDAFFCLRLHPTSQPLFAFEWRDPGTGRTGQLTWTRLPQGFKNSPTIFNEALHRDLANFRIQHPQVTLLQYVDDLLLAGATKQDCLEGTKALLLELSDLGYRASAKKAQICRREVTYLGYSLRDGQRWLTEARKKTVVQIPAPTTAKQVREFLGTAGFCRLWIPGFATLAAPLYPLTKPKGEFSWAPEHQKAFDAIKKALLSAPALALPDVTKPFTLYVDERKGVARGVLTQTLGPWRRPVAYLSKKLDPVASGWPVCLKAIAAVAILVKDADKLTLGQNITVIAPHALENIVRQPPDRWMTNARMTHYQSLLLTERVTFAPPAALNPATLLPEETDEPVTHDCHQLLIEETGVRKDLTDIPLTGEVLTWFTDGSSYVVEGKRMAGAAVVDGTRTIWASSLPEGTSAQKAELMALTQALRLAEGKSINIYTDSRYAFATAHVHGAIYKQRGWLTSAGREIKNKEEILSLLEALHLPKRLAIIHCPGHQKAKDPISRGNQMADRVAKQAAQGVNLLAGKRTADGSEFEKRTADGSEFESPKKKAKVE

SEQ ID NO: 124 - protein, 2090 aa, synthetic construct
MPAAKRVKLDGGDKKYSIGLDIGTNSVGWAVITDEYKVPSKKFKVLGNTDRHSIKKNLIGALLFDSGETAEATRLKRTARRRYTRRKNRICYLQEIFSNEMAKVDDSFFHRLEESFLVEEDKKHERHPIFGNIVDEVAYHEKYPTIYHLRKKLVDSTDKADLRLIYLALAHMIKFRGHFLIEGDLNPDNSDVDKLFIQLVQTYNQLFEENPINASGVDAKAILSARLSKSRRLENLIAQLPGEKKNGLFGNLIALSLGLTPNFKSNFDLAEDAKLQLSKDTYDDDLDNLLAQIGDQYADLFLAAKNLSDAILLSDILRVNTEITKAPLSASMIKRYDEHHQDLTLLKALVRQQLPEKYKEIFFDQSKNGYAGYIDGGASQEEFYKFIKPILEKMDGTEELLVKLNREDLLRKQRTFDNGSIPHQIHLGELHAILRRQEDFYPFLKDNREKIEKILTFRIPYYVGPLARGNSRFAWMTRKSEETITPWNFEEVVDKGASAQSFIERMTNFDKNLPNEKVLPKHSLLYEYFTVYNELTKVKYVTEGMRKPAFLSGEQKKAIVDLLFKTNRKVTVKQLKEDYFKKIECFDSVEISGVEDRFNASLGTYHDLLKIIKDKDFLDNEENEDILEDIVLTLTLFEDREMIEERLKTYAHLFDDKVMKQLKRRRYTGWGRLSRKLINGIRDKQSGKTILDFLKSDGFANRNFMQLIHDDSLTFKEDIQKAQVSGQGDSLHEHIANLAGSPAIKKGILQTVKVVDELVKVMGRHKPENIVIEMARENQTTQKGQKNSRERMKRIEEGIKELGSQILKEHPVENTQLQNEKLYLYYLQNGRDMYVDQELDINRLSDYDVDHIVPQSFLKDDSIDNKVLTRSDKARGKSDNVPSEEVVKKMKNYWRQLLNAKLITQRKFDNLTKAERGGLSELDKAGFIKRQLVETRQITKHVAQILDSRMNTKYDENDKLIREVKVITLKSKLVSDFRKDFQFYKVREINNYHHAHDAYLNAVVGTALIKKYPKLESEFVYGDYKVYDVRKMIAKSEQEIGKATAKYFFYSNIMNFFKTEITLANGEIRKRPLIETNGETGEIVWDKGRDFATVRKVLSMPQVNIVKKTEVQTGGFSKESILPKRNSDKLIARKKDWDPKKYGGFDSPTVAYSVLVVAKVEKGKSKKLKSVKELLGITIMERSSFEKNPIDFLEAKGYKEVKKDLIIKLPKYSLFELENGRKRMLASAGELQKGNELALPSKYVNFLYLASHYEKLKGSPEDNEQKQLFVEQHKHYLDEIIEQISEFSKRVILADANLDKVLSAYNKHRDKPIREQAENIIHLFTLTNLGAPAAFKYFDTTIDRKRYTSTKEVLDATLIHQSITGLYETRIDLSQLGGDGGPAPEAAAKGGGGGTLQLDDEYRLYSPLVKPDQNIQFWLEQFPQAWAETAGMGLAKQVPPQVIQLKASATPVSVRQYPLSKEAQEGIRPHVQRLIQQGILVPVQSPWNTPLLPVRKPGTNDYRPVQDLREVNKRVQDIHPTVPNPYNLLCALPPQRSWYTVLDLKDAFFCLRLHPTSQPLFAFEWRDPGTGRTGQLTWTRLPQGFKNSPTIFNEALHRDLANFRIQHPQVTLLQYVDDLLLAGATKQDCLEGTKALLLELSDLGYRASAKKAQICRREVTYLGYSLRDGQRWLTEARKKTVVQIPAPTTAKQVREFLGTAGFCRLWIPGFATLAAPLYPLTKPKGEFSWAPEHQKAFDAIKKALLSAPALALPDVTKPFTLYVDERKGVARGVLTQTLGPWRRPVAYLSKKLDPVASGWPVCLKAIAAVAILVKDADKLTLGQNITVIAPHALENIVRQPPDRWMTNARMTHYQSLLLTERVTFAPPAALNPATLLPEETDEPVTHDCHQLLIEETGVRKDLTDIPLTGEVLTWFTDGSSYVVEGKRMAGAAVVDGTRTIWASSLPEGTSAQKAELMALTQALRLAEGKSINIYTDSRYAFATAHVHGAIYKQRGWLTSAGREIKNKEEILSLLEALHLPKRLAIIHCPGHQKAKDPISRGNQMADRVAKQAAQGVNLLAGKRTADGSEFEKRTADGSEFESPKKKAKVE

SEQ ID NO: 125 - protein, 2085 aa, synthetic construct
MPAAKRVKLDGGDKKYSIGLDIGTNSVGWAVITDEYKVPSKKFKVLGNTDRHSIKKNLIGALLFDSGETAEATRLKRTARRRYTRRKNRICYLQEIFSNEMAKVDDSFFHRLEESFLVEEDKKHERHPIFGNIVDEVAYHEKYPTIYHLRKKLVDSTDKADLRLIYLALAHMIKFRGHFLIEGDLNPDNSDVDKLFIQLVQTYNQLFEENPINASGVDAKAILSARLSKSRRLENLIAQLPGEKKNGLFGNLIALSLGLTPNFKSNFDLAEDAKLQLSKDTYDDDLDNLLAQIGDQYADLFLAAKNLSDAILLSDILRVNTEITKAPLSASMIKRYDEHHQDLTLLKALVRQQLPEKYKEIFFDQSKNGYAGYIDGGASQEEFYKFIKPILEKMDGTEELLVKLNREDLLRKQRTFDNGSIPHQIHLGELHAILRRQEDFYPFLKDNREKIEKILTFRIPYYVGPLARGNSRFAWMTRKSEETITPWNFEEVVDKGASAQSFIERMTNFDKNLPNEKVLPKHSLLYEYFTVYNELTKVKYVTEGMRKPAFLSGEQKKAIVDLLFKTNRKVTVKQLKEDYFKKIECFDSVEISGVEDRFNASLGTYHDLLKIIKDKDFLDNEENEDILEDIVLTLTLFEDREMIEERLKTYAHLFDDKVMKQLKRRRYTGWGRLSRKLINGIRDKQSGKTILDFLKSDGFANRNFMQLIHDDSLTFKEDIQKAQVSGQGDSLHEHIANLAGSPAIKKGILQTVKVVDELVKVMGRHKPENIVIEMARENQTTQKGQKNSRERMKRIEEGIKELGSQILKEHPVENTQLQNEKLYLYYLQNGRDMYVDQELDINRLSDYDVDHIVPQSFLKDDSIDNKVLTRSDKARGKSDNVPSEEVVKKMKNYWRQLLNAKLITQRKFDNLTKAERGGLSELDKAGFIKRQLVETRQITKHVAQILDSRMNTKYDENDKLIREVKVITLKSKLVSDFRKDFQFYKVREINNYHHAHDAYLNAVVGTALIKKYPKLESEFVYGDYKVYDVRKMIAKSEQEIGKATAKYFFYSNIMNFFKTEITLANGEIRKRPLIETNGETGEIVWDKGRDFATVRKVLSMPQVNIVKKTEVQTGGFSKESILPKRNSDKLIARKKDWDPKKYGGFDSPTVAYSVLVVAKVEKGKSKKLKSVKELLGITIMERSSFEKNPIDFLEAKGYKEVKKDLIIKLPKYSLFELENGRKRMLASAGELQKGNELALPSKYVNFLYLASHYEKLKGSPEDNEQKQLFVEQHKHYLDEIIEQISEFSKRVILADANLDKVLSAYNKHRDKPIREQAENIIHLFTLTNLGAPAAFKYFDTTIDRKRYTSTKEVLDATLIHQSITGLYETRIDLSQLGGDGGPAPGGSGGTLQLDDEYRLYSPLVKPDQNIQFWLEQFPQAWAETAGMGLAKQVPPQVIQLKASATPVSVRQYPLSKEAQEGIRPHVQRLIQQGILVPVQSPWNTPLLPVRKPGTNDYRPVQDLREVNKRVQDIHPTVPNPYNLLCALPPQRSWYTVLDLKDAFFCLRLHPTSQPLFAFEWRDPGTGRTGQLTWTRLPQGFKNSPTIFNEALHRDLANFRIQHPQVTLLQYVDDLLLAGATKQDCLEGTKALLLELSDLGYRASAKKAQICRREVTYLGYSLRDGQRWLTEARKKTVVQIPAPTTAKQVREFLGTAGFCRLWIPGFATLAAPLYPLTKPKGEFSWAPEHQKAFDAIKKALLSAPALALPDVTKPFTLYVDERKGVARGVLTQTLGPWRRPVAYLSKKLDPVASGWPVCLKAIAAVAILVKDADKLTLGQNITVIAPHALENIVRQPPDRWMTNARMTHYQSLLLTERVTFAPPAALNPATLLPEETDEPVTHDCHQLLIEETGVRKDLTDIPLTGEVLTWFTDGSSYVVEGKRMAGAAVVDGTRTIWASSLPEGTSAQKAELMALTQALRLAEGKSINIYTDSRYAFATAHVHGAIYKQRGWLTSAGREIKNKEEILSLLEALHLPKRLAIIHCPGHQKAKDPISRGNQMADRVAKQAAQGVNLLAGKRTADGSEFEKRTADGSEFESPKKKAKVE

SEQ ID NO: 126 - protein, 2087 aa, synthetic construct
MPAAKRVKLDGGDKKYSIGLDIGTNSVGWAVITDEYKVPSKKFKVLGNTDRHSIKKNLIGALLFDSGETAEATRLKRTARRRYTRRKNRICYLQEIFSNEMAKVDDSFFHRLEESFLVEEDKKHERHPIFGNIVDEVAYHEKYPTIYHLRKKLVDSTDKADLRLIYLALAHMIKFRGHFLIEGDLNPDNSDVDKLFIQLVQTYNQLFEENPINASGVDAKAILSARLSKSRRLENLIAQLPGEKKNGLFGNLIALSLGLTPNFKSNFDLAEDAKLQLSKDTYDDDLDNLLAQIGDQYADLFLAAKNLSDAILLSDILRVNTEITKAPLSASMIKRYDEHHQDLTLLKALVRQQLPEKYKEIFFDQSKNGYAGYIDGGASQEEFYKFIKPILEKMDGTEELLVKLNREDLLRKQRTFDNGSIPHQIHLGELHAILRRQEDFYPFLKDNREKIEKILTFRIPYYVGPLARGNSRFAWMTRKSEETITPWNFEEVVDKGASAQSFIERMTNFDKNLPNEKVLPKHSLLYEYFTVYNELTKVKYVTEGMRKPAFLSGEQKKAIVDLLFKTNRKVTVKQLKEDYFKKIECFDSVEISGVEDRFNASLGTYHDLLKIIKDKDFLDNEENEDILEDIVLTLTLFEDREMIEERLKTYAHLFDDKVMKQLKRRRYTGWGRLSRKLINGIRDKQSGKTILDFLKSDGFANRNFMQLIHDDSLTFKEDIQKAQVSGQGDSLHEHIANLAGSPAIKKGILQTVKVVDELVKVMGRHKPENIVIEMARENQTTQKGQKNSRERMKRIEEGIKELGSQILKEHPVENTQLQNEKLYLYYLQNGRDMYVDQELDINRLSDYDVDHIVPQSFLKDDSIDNKVLTRSDKARGKSDNVPSEEVVKKMKNYWRQLLNAKLITQRKFDNLTKAERGGLSELDKAGFIKRQLVETRQITKHVAQILDSRMNTKYDENDKLIREVKVITLKSKLVSDFRKDFQFYKVREINNYHHAHDAYLNAVVGTALIKKYPKLESEFVYGDYKVYDVRKMIAKSEQEIGKATAKYFFYSNIMNFFKTEITLANGEIRKRPLIETNGETGEIVWDKGRDFATVRKVLSMPQVNIVKKTEVQTGGFSKESILPKRNSDKLIARKKDWDPKKYGGFDSPTVAYSVLVVAKVEKGKSKKLKSVKELLGITIMERSSFEKNPIDFLEAKGYKEVKKDLIIKLPKYSLFELENGRKRMLASAGELQKGNELALPSKYVNFLYLASHYEKLKGSPEDNEQKQLFVEQHKHYLDEIIEQISEFSKRVILADANLDKVLSAYNKHRDKPIREQAENIIHLFTLTNLGAPAAFKYFDTTIDRKRYTSTKEVLDATLIHQSITGLYETRIDLSQLGGDGGEAAAKGGGGGTLQLDDEYRLYSPLVKPDQNIQFWLEQFPQAWAETAGMGLAKQVPPQVIQLKASATPVSVRQYPLSKEAQEGIRPHVQRLIQQGILVPVQSPWNTPLLPVRKPGTNDYRPVQDLREVNKRVQDIHPTVPNPYNLLCALPPQRSWYTVLDLKDAFFCLRLHPTSQPLFAFEWRDPGTGRTGQLTWTRLPQGFKNSPTIFNEALHRDLANFRIQHPQVTLLQYVDDLLLAGATKQDCLEGTKALLLELSDLGYRASAKKAQICRREVTYLGYSLRDGQRWLTEARKKTVVQIPAPTTAKQVREFLGTAGFCRLWIPGFATLAAPLYPLTKPKGEFSWAPEHQKAFDAIKKALLSAPALALPDVTKPFTLYVDERKGVARGVLTQTLGPWRRPVAYLSKKLDPVASGWPVCLKAIAAVAILVKDADKLTLGQNITVIAPHALENIVRQPPDRWMTNARMTHYQSLLLTERVTFAPPAALNPATLLPEETDEPVTHDCHQLLIEETGVRKDLTDIPLTGEVLTWFTDGSSYVVEGKRMAGAAVVDGTRTIWASSLPEGTSAQKAELMALTQALRLAEGKSINIYTDSRYAFATAHVHGAIYKQRGWLTSAGREIKNKEEILSLLEALHLPKRLAIIHCPGHQKAKDPISRGNQMADRVAKQAAQGVNLLAGKRTADGSEFEKRTADGSEFESPKKKAKVE

SEQ ID NO: 127 - protein, 2090 aa, synthetic construct
MPAAKRVKLDGGDKKYSIGLDIGTNSVGWAVITDEYKVPSKKFKVLGNTDRHSIKKNLIGALLFDSGETAEATRLKRTARRRYTRRKNRICYLQEIFSNEMAKVDDSFFHRLEESFLVEEDKKHERHPIFGNIVDEVAYHEKYPTIYHLRKKLVDSTDKADLRLIYLALAHMIKFRGHFLIEGDLNPDNSDVDKLFIQLVQTYNQLFEENPINASGVDAKAILSARLSKSRRLENLIAQLPGEKKNGLFGNLIALSLGLTPNFKSNFDLAEDAKLQLSKDTYDDDLDNLLAQIGDQYADLFLAAKNLSDAILLSDILRVNTEITKAPLSASMIKRYDEHHQDLTLLKALVRQQLPEKYKEIFFDQSKNGYAGYIDGGASQEEFYKFIKPILEKMDGTEELLVKLNREDLLRKQRTFDNGSIPHQIHLGELHAILRRQEDFYPFLKDNREKIEKILTFRIPYYVGPLARGNSRFAWMTRKSEETITPWNFEEVVDKGASAQSFIERMTNFDKNLPNEKVLPKHSLLYEYFTVYNELTKVKYVTEGMRKPAFLSGEQKKAIVDLLFKTNRKVTVKQLKEDYFKKIECFDSVEISGVEDRFNASLGTYHDLLKIIKDKDFLDNEENEDILEDIVLTLTLFEDREMIEERLKTYAHLFDDKVMKQLKRRRYTGWGRLSRKLINGIRDKQSGKTILDFLKSDGFANRNFMQLIHDDSLTFKEDIQKAQVSGQGDSLHEHIANLAGSPAIKKGILQTVKVVDELVKVMGRHKPENIVIEMARENQTTQKGQKNSRERMKRIEEGIKELGSQILKEHPVENTQLQNEKLYLYYLQNGRDMYVDQELDINRLSDYDVDHIVPQSFLKDDSIDNKVLTRSDKARGKSDNVPSEEVVKKMKNYWRQLLNAKLITQRKFDNLTKAERGGLSELDKAGFIKRQLVETRQITKHVAQILDSRMNTKYDENDKLIREVKVITLKSKLVSDFRKDFQFYKVREINNYHHAHDAYLNAVVGTALIKKYPKLESEFVYGDYKVYDVRKMIAKSEQEIGKATAKYFFYSNIMNFFKTEITLANGEIRKRPLIETNGETGEIVWDKGRDFATVRKVLSMPQVNIVKKTEVQTGGFSKESILPKRNSDKLIARKKDWDPKKYGGFDSPTVAYSVLVVAKVEKGKSKKLKSVKELLGITIMERSSFEKNPIDFLEAKGYKEVKKDLIIKLPKYSLFELENGRKRMLASAGELQKGNELALPSKYVNFLYLASHYEKLKGSPEDNEQKQLFVEQHKHYLDEIIEQISEFSKRVILADANLDKVLSAYNKHRDKPIREQAENIIHLFTLTNLGAPAAFKYFDTTIDRKRYTSTKEVLDATLIHQSITGLYETRIDLSQLGGDGGPAPGGGEAAAKGGTLQLDDEYRLYSPLVKPDQNIQFWLEQFPQAWAETAGMGLAKQVPPQVIQLKASATPVSVRQYPLSKEAQEGIRPHVQRLIQQGILVPVQSPWNTPLLPVRKPGTNDYRPVQDLREVNKRVQDIHPTVPNPYNLLCALPPQRSWYTVLDLKDAFFCLRLHPTSQPLFAFEWRDPGTGRTGQLTWTRLPQGFKNSPTIFNEALHRDLANFRIQHPQVTLLQYVDDLLLAGATKQDCLEGTKALLLELSDLGYRASAKKAQICRREVTYLGYSLRDGQRWLTEARKKTVVQIPAPTTAKQVREFLGTAGFCRLWIPGFATLAAPLYPLTKPKGEFSWAPEHQKAFDAIKKALLSAPALALPDVTKPFTLYVDERKGVARGVLTQTLGPWRRPVAYLSKKLDPVASGWPVCLKAIAAVAILVKDADKLTLGQNITVIAPHALENIVRQPPDRWMTNARMTHYQSLLLTERVTFAPPAALNPATLLPEETDEPVTHDCHQLLIEETGVRKDLTDIPLTGEVLTWFTDGSSYVVEGKRMAGAAVVDGTRTIWASSLPEGTSAQKAELMALTQALRLAEGKSINIYTDSRYAFATAHVHGAIYKQRGWLTSAGREIKNKEEILSLLEALHLPKRLAIIHCPGHQKAKDPISRGNQMADRVAKQAAQGVNLLAGKRTADGSEFEKRTADGSEFESPKKKAKVE

SEQ ID NO: 128 - protein, 2087 aa, synthetic construct
MPAAKRVKLDGGDKKYSIGLDIGTNSVGWAVITDEYKVPSKKFKVLGNTDRHSIKKNLIGALLFDSGETAEATRLKRTARRRYTRRKNRICYLQEIFSNEMAKVDDSFFHRLEESFLVEEDKKHERHPIFGNIVDEVAYHEKYPTIYHLRKKLVDSTDKADLRLIYLALAHMIKFRGHFLIEGDLNPDNSDVDKLFIQLVQTYNQLFEENPINASGVDAKAILSARLSKSRRLENLIAQLPGEKKNGLFGNLIALSLGLTPNFKSNFDLAEDAKLQLSKDTYDDDLDNLLAQIGDQYADLFLAAKNLSDAILLSDILRVNTEITKAPLSASMIKRYDEHHQDLTLLKALVRQQLPEKYKEIFFDQSKNGYAGYIDGGASQEEFYKFIKPILEKMDGTEELLVKLNREDLLRKQRTFDNGSIPHQIHLGELHAILRRQEDFYPFLKDNREKIEKILTFRIPYYVGPLARGNSRFAWMTRKSEETITPWNFEEVVDKGASAQSFIERMTNFDKNLPNEKVLPKHSLLYEYFTVYNELTKVKYVTEGMRKPAFLSGEQKKAIVDLLFKTNRKVTVKQLKEDYFKKIECFDSVEISGVEDRFNASLGTYHDLLKIIKDKDFLDNEENEDILEDIVLTLTLFEDREMIEERLKTYAHLFDDKVMKQLKRRRYTGWGRLSRKLINGIRDKQSGKTILDFLKSDGFANRNFMQLIHDDSLTFKEDIQKAQVSGQGDSLHEHIANLAGSPAIKKGILQTVKVVDELVKVMGRHKPENIVIEMARENQTTQKGQKNSRERMKRIEEGIKELGSQILKEHPVENTQLQNEKLYLYYLQNGRDMYVDQELDINRLSDYDVDHIVPQSFLKDDSIDNKVLTRSDKARGKSDNVPSEEVVKKMKNYWRQLLNAKLITQRKFDNLTKAERGGLSELDKAGFIKRQLVETRQITKHVAQILDSRMNTKYDENDKLIREVKVITLKSKLVSDFRKDFQFYKVREINNYHHAHDAYLNAVVGTALIKKYPKLESEFVYGDYKVYDVRKMIAKSEQEIGKATAKYFFYSNIMNFFKTEITLANGEIRKRPLIETNGETGEIVWDKGRDFATVRKVLSMPQVNIVKKTEVQTGGFSKESILPKRNSDKLIARKKDWDPKKYGGFDSPTVAYSVLVVAKVEKGKSKKLKSVKELLGITIMERSSFEKNPIDFLEAKGYKEVKKDLIIKLPKYSLFELENGRKRMLASAGELQKGNELALPSKYVNFLYLASHYEKLKGSPEDNEQKQLFVEQHKHYLDEIIEQISEFSKRVILADANLDKVLSAYNKHRDKPIREQAENIIHLFTLTNLGAPAAFKYFDTTIDRKRYTSTKEVLDATLIHQSITGLYETRIDLSQLGGDGGGSSEAAAKGGTLQLDDEYRLYSPLVKPDQNIQFWLEQFPQAWAETAGMGLAKQVPPQVIQLKASATPVSVRQYPLSKEAQEGIRPHVQRLIQQGILVPVQSPWNTPLLPVRKPGTNDYRPVQDLREVNKRVQDIHPTVPNPYNLLCALPPQRSWYTVLDLKDAFFCLRLHPTSQPLFAFEWRDPGTGRTGQLTWTRLPQGFKNSPTIFNEALHRDLANFRIQHPQVTLLQYVDDLLLAGATKQDCLEGTKALLLELSDLGYRASAKKAQICRREVTYLGYSLRDGQRWLTEARKKTVVQIPAPTTAKQVREFLGTAGFCRLWIPGFATLAAPLYPLTKPKGEFSWAPEHQKAFDAIKKALLSAPALALPDVTKPFTLYVDERKGVARGVLTQTLGPWRRPVAYLSKKLDPVASGWPVCLKAIAAVAILVKDADKLTLGQNITVIAPHALENIVRQPPDRWMTNARMTHYQSLLLTERVTFAPPAALNPATLLPEETDEPVTHDCHQLLIEETGVRKDLTDIPLTGEVLTWFTDGSSYVVEGKRMAGAAVVDGTRTIWASSLPEGTSAQKAELMALTQALRLAEGKSINIYTDSRYAFATAHVHGAIYKQRGWLTSAGREIKNKEEILSLLEALHLPKRLAIIHCPGHQKAKDPISRGNQMADRVAKQAAQGVNLLAGKRTADGSEFEKRTADGSEFESPKKKAKVE

SEQ ID NO: 129 - protein, 2088 aa, synthetic construct
MPAAKRVKLDGGDKKYSIGLDIGTNSVGWAVITDEYKVPSKKFKVLGNTDRHSIKKNLIGALLFDSGETAEATRLKRTARRRYTRRKNRICYLQEIFSNEMAKVDDSFFHRLEESFLVEEDKKHERHPIFGNIVDEVAYHEKYPTIYHLRKKLVDSTDKADLRLIYLALAHMIKFRGHFLIEGDLNPDNSDVDKLFIQLVQTYNQLFEENPINASGVDAKAILSARLSKSRRLENLIAQLPGEKKNGLFGNLIALSLGLTPNFKSNFDLAEDAKLQLSKDTYDDDLDNLLAQIGDQYADLFLAAKNLSDAILLSDILRVNTEITKAPLSASMIKRYDEHHQDLTLLKALVRQQLPEKYKEIFFDQSKNGYAGYIDGGASQEEFYKFIKPILEKMDGTEELLVKLNREDLLRKQRTFDNGSIPHQIHLGELHAILRRQEDFYPFLKDNREKIEKILTFRIPYYVGPLARGNSRFAWMTRKSEETITPWNFEEVVDKGASAQSFIERMTNFDKNLPNEKVLPKHSLLYEYFTVYNELTKVKYVTEGMRKPAFLSGEQKKAIVDLLFKTNRKVTVKQLKEDYFKKIECFDSVEISGVEDRFNASLGTYHDLLKIIKDKDFLDNEENEDILEDIVLTLTLFEDREMIEERLKTYAHLFDDKVMKQLKRRRYTGWGRLSRKLINGIRDKQSGKTILDFLKSDGFANRNFMQLIHDDSLTFKEDIQKAQVSGQGDSLHEHIANLAGSPAIKKGILQTVKVVDELVKVMGRHKPENIVIEMARENQTTQKGQKNSRERMKRIEEGIKELGSQILKEHPVENTQLQNEKLYLYYLQNGRDMYVDQELDINRLSDYDVDHIVPQSFLKDDSIDNKVLTRSDKARGKSDNVPSEEVVKKMKNYWRQLLNAKLITQRKFDNLTKAERGGLSELDKAGFIKRQLVETRQITKHVAQILDSRMNTKYDENDKLIREVKVITLKSKLVSDFRKDFQFYKVREINNYHHAHDAYLNAVVGTALIKKYPKLESEFVYGDYKVYDVRKMIAKSEQEIGKATAKYFFYSNIMNFFKTEITLANGEIRKRPLIETNGETGEIVWDKGRDFATVRKVLSMPQVNIVKKTEVQTGGFSKESILPKRNSDKLIARKKDWDPKKYGGFDSPTVAYSVLVVAKVEKGKSKKLKSVKELLGITIMERSSFEKNPIDFLEAKGYKEVKKDLIIKLPKYSLFELENGRKRMLASAGELQKGNELALPSKYVNFLYLASHYEKLKGSPEDNEQKQLFVEQHKHYLDEIIEQISEFSKRVILADANLDKVLSAYNKHRDKPIREQAENIIHLFTLTNLGAPAAFKYFDTTIDRKRYTSTKEVLDATLIHQSITGLYETRIDLSQLGGDGGPAPGSSGGGGGTLQLDDEYRLYSPLVKPDQNIQFWLEQFPQAWAETAGMGLAKQVPPQVIQLKASATPVSVRQYPLSKEAQEGIRPHVQRLIQQGILVPVQSPWNTPLLPVRKPGTNDYRPVQDLREVNKRVQDIHPTVPNPYNLLCALPPQRSWYTVLDLKDAFFCLRLHPTSQPLFAFEWRDPGTGRTGQLTWTRLPQGFKNSPTIFNEALHRDLANFRIQHPQVTLLQYVDDLLLAGATKQDCLEGTKALLLELSDLGYRASAKKAQICRREVTYLGYSLRDGQRWLTEARKKTVVQIPAPTTAKQVREFLGTAGFCRLWIPGFATLAAPLYPLTKPKGEFSWAPEHQKAFDAIKKALLSAPALALPDVTKPFTLYVDERKGVARGVLTQTLGPWRRPVAYLSKKLDPVASGWPVCLKAIAAVAILVKDADKLTLGQNITVIAPHALENIVRQPPDRWMTNARMTHYQSLLLTERVTFAPPAALNPATLLPEETDEPVTHDCHQLLIEETGVRKDLTDIPLTGEVLTWFTDGSSYVVEGKRMAGAAVVDGTRTIWASSLPEGTSAQKAELMALTQALRLAEGKSINIYTDSRYAFATAHVHGAIYKQRGWLTSAGREIKNKEEILSLLEALHLPKRLAIIHCPGHQKAKDPISRGNQMADRVAKQAAQGVNLLAGKRTADGSEFEKRTADGSEFESPKKKAKVE

SEQ ID NO: 130 - protein, 2088 aa, synthetic construct
MPAAKRVKLDGGDKKYSIGLDIGTNSVGWAVITDEYKVPSKKFKVLGNTDRHSIKKNLIGALLFDSGETAEATRLKRTARRRYTRRKNRICYLQEIFSNEMAKVDDSFFHRLEESFLVEEDKKHERHPIFGNIVDEVAYHEKYPTIYHLRKKLVDSTDKADLRLIYLALAHMIKFRGHFLIEGDLNPDNSDVDKLFIQLVQTYNQLFEENPINASGVDAKAILSARLSKSRRLENLIAQLPGEKKNGLFGNLIALSLGLTPNFKSNFDLAEDAKLQLSKDTYDDDLDNLLAQIGDQYADLFLAAKNLSDAILLSDILRVNTEITKAPLSASMIKRYDEHHQDLTLLKALVRQQLPEKYKEIFFDQSKNGYAGYIDGGASQEEFYKFIKPILEKMDGTEELLVKLNREDLLRKQRTFDNGSIPHQIHLGELHAILRRQEDFYPFLKDNREKIEKILTFRIPYYVGPLARGNSRFAWMTRKSEETITPWNFEEVVDKGASAQSFIERMTNFDKNLPNEKVLPKHSLLYEYFTVYNELTKVKYVTEGMRKPAFLSGEQKKAIVDLLFKTNRKVTVKQLKEDYFKKIECFDSVEISGVEDRFNASLGTYHDLLKIIKDKDFLDNEENEDILEDIVLTLTLFEDREMIEERLKTYAHLFDDKVMKQLKRRRYTGWGRLSRKLINGIRDKQSGKTILDFLKSDGFANRNFMQLIHDDSLTFKEDIQKAQVSGQGDSLHEHIANLAGSPAIKKGILQTVKVVDELVKVMGRHKPENIVIEMARENQTTQKGQKNSRERMKRIEEGIKELGSQILKEHPVENTQLQNEKLYLYYLQNGRDMYVDQELDINRLSDYDVDHIVPQSFLKDDSIDNKVLTRSDKARGKSDNVPSEEVVKKMKNYWRQLLNAKLITQRKFDNLTKAERGGLSELDKAGFIKRQLVETRQITKHVAQILDSRMNTKYDENDKLIREVKVITLKSKLVSDFRKDFQFYKVREINNYHHAHDAYLNAVVGTALIKKYPKLESEFVYGDYKVYDVRKMIAKSEQEIGKATAKYFFYSNIMNFFKTEITLANGEIRKRPLIETNGETGEIVWDKGRDFATVRKVLSMPQVNIVKKTEVQTGGFSKESILPKRNSDKLIARKKDWDPKKYGGFDSPTVAYSVLVVAKVEKGKSKKLKSVKELLGITIMERSSFEKNPIDFLEAKGYKEVKKDLIIKLPKYSLFELENGRKRMLASAGELQKGNELALPSKYVNFLYLASHYEKLKGSPEDNEQKQLFVEQHKHYLDEIIEQISEFSKRVILADANLDKVLSAYNKHRDKPIREQAENIIHLFTLTNLGAPAAFKYFDTTIDRKRYTSTKEVLDATLIHQSITGLYETRIDLSQLGGDGGGGSGGSGGSGGTLQLDDEYRLYSPLVKPDQNIQFWLEQFPQAWAETAGMGLAKQVPPQVIQLKASATPVSVRQYPLSKEAQEGIRPHVQRLIQQGILVPVQSPWNTPLLPVRKPGTNDYRPVQDLREVNKRVQDIHPTVPNPYNLLCALPPQRSWYTVLDLKDAFFCLRLHPTSQPLFAFEWRDPGTGRTGQLTWTRLPQGFKNSPTIFNEALHRDLANFRIQHPQVTLLQYVDDLLLAGATKQDCLEGTKALLLELSDLGYRASAKKAQICRREVTYLGYSLRDGQRWLTEARKKTVVQIPAPTTAKQVREFLGTAGFCRLWIPGFATLAAPLYPLTKPKGEFSWAPEHQKAFDAIKKALLSAPALALPDVTKPFTLYVDERKGVARGVLTQTLGPWRRPVAYLSKKLDPVASGWPVCLKAIAAVAILVKDADKLTLGQNITVIAPHALENIVRQPPDRWMTNARMTHYQSLLLTERVTFAPPAALNPATLLPEETDEPVTHDCHQLLIEETGVRKDLTDIPLTGEVLTWFTDGSSYVVEGKRMAGAAVVDGTRTIWASSLPEGTSAQKAELMALTQALRLAEGKSINIYTDSRYAFATAHVHGAIYKQRGWLTSAGREIKNKEEILSLLEALHLPKRLAIIHCPGHQKAKDPISRGNQMADRVAKQAAQGVNLLAGKRTADGSEFEKRTADGSEFESPKKKAKVE

SEQ ID NO: 131 - protein, 2088 aa, synthetic construct
MPAAKRVKLDGGDKKYSIGLDIGTNSVGWAVITDEYKVPSKKFKVLGNTDRHSIKKNLIGALLFDSGETAEATRLKRTARRRYTRRKNRICYLQEIFSNEMAKVDDSFFHRLEESFLVEEDKKHERHPIFGNIVDEVAYHEKYPTIYHLRKKLVDSTDKADLRLIYLALAHMIKFRGHFLIEGDLNPDNSDVDKLFIQLVQTYNQLFEENPINASGVDAKAILSARLSKSRRLENLIAQLPGEKKNGLFGNLIALSLGLTPNFKSNFDLAEDAKLQLSKDTYDDDLDNLLAQIGDQYADLFLAAKNLSDAILLSDILRVNTEITKAPLSASMIKRYDEHHQDLTLLKALVRQQLPEKYKEIFFDQSKNGYAGYIDGGASQEEFYKFIKPILEKMDGTEELLVKLNREDLLRKQRTFDNGSIPHQIHLGELHAILRRQEDFYPFLKDNREKIEKILTFRIPYYVGPLARGNSRFAWMTRKSEETITPWNFEEVVDKGASAQSFIERMTNFDKNLPNEKVLPKHSLLYEYFTVYNELTKVKYVTEGMRKPAFLSGEQKKAIVDLLFKTNRKVTVKQLKEDYFKKIECFDSVEISGVEDRFNASLGTYHDLLKIIKDKDFLDNEENEDILEDIVLTLTLFEDREMIEERLKTYAHLFDDKVMKQLKRRRYTGWGRLSRKLINGIRDKQSGKTILDFLKSDGFANRNFMQLIHDDSLTFKEDIQKAQVSGQGDSLHEHIANLAGSPAIKKGILQTVKVVDELVKVMGRHKPENIVIEMARENQTTQKGQKNSRERMKRIEEGIKELGSQILKEHPVENTQLQNEKLYLYYLQNGRDMYVDQELDINRLSDYDVDHIVPQSFLKDDSIDNKVLTRSDKARGKSDNVPSEEVVKKMKNYWRQLLNAKLITQRKFDNLTKAERGGLSELDKAGFIKRQLVETRQITKHVAQILDSRMNTKYDENDKLIREVKVITLKSKLVSDFRKDFQFYKVREINNYHHAHDAYLNAVVGTALIKKYPKLESEFVYGDYKVYDVRKMIAKSEQEIGKATAKYFFYSNIMNFFKTEITLANGEIRKRPLIETNGETGEIVWDKGRDFATVRKVLSMPQVNIVKKTEVQTGGFSKESILPKRNSDKLIARKKDWDPKKYGGFDSPTVAYSVLVVAKVEKGKSKKLKSVKELLGITIMERSSFEKNPIDFLEAKGYKEVKKDLIIKLPKYSLFELENGRKRMLASAGELQKGNELALPSKYVNFLYLASHYEKLKGSPEDNEQKQLFVEQHKHYLDEIIEQISEFSKRVILADANLDKVLSAYNKHRDKPIREQAENIIHLFTLTNLGAPAAFKYFDTTIDRKRYTSTKEVLDATLIHQSITGLYETRIDLSQLGGDGGGGSPAPGGGGGTLQLDDEYRLYSPLVKPDQNIQFWLEQFPQAWAETAGMGLAKQVPPQVIQLKASATPVSVRQYPLSKEAQEGIRPHVQRLIQQGILVPVQSPWNTPLLPVRKPGTNDYRPVQDLREVNKRVQDIHPTVPNPYNLLCALPPQRSWYTVLDLKDAFFCLRLHPTSQPLFAFEWRDPGTGRTGQLTWTRLPQGFKNSPTIFNEALHRDLANFRIQHPQVTLLQYVDDLLLAGATKQDCLEGTKALLLELSDLGYRASAKKAQICRREVTYLGYSLRDGQRWLTEARKKTVVQIPAPTTAKQVREFLGTAGFCRLWIPGFATLAAPLYPLTKPKGEFSWAPEHQKAFDAIKKALLSAPALALPDVTKPFTLYVDERKGVARGVLTQTLGPWRRPVAYLSKKLDPVASGWPVCLKAIAAVAILVKDADKLTLGQNITVIAPHALENIVRQPPDRWMTNARMTHYQSLLLTERVTFAPPAALNPATLLPEETDEPVTHDCHQLLIEETGVRKDLTDIPLTGEVLTWFTDGSSYVVEGKRMAGAAVVDGTRTIWASSLPEGTSAQKAELMALTQALRLAEGKSINIYTDSRYAFATAHVHGAIYKQRGWLTSAGREIKNKEEILSLLEALHLPKRLAIIHCPGHQKAKDPISRGNQMADRVAKQAAQGVNLLAGKRTADGSEFEKRTADGSEFESPKKKAKVE

SEQ ID NO: 132 - protein, 2090 aa, synthetic construct
MPAAKRVKLDGGDKKYSIGLDIGTNSVGWAVITDEYKVPSKKFKVLGNTDRHSIKKNLIGALLFDSGETAEATRLKRTARRRYTRRKNRICYLQEIFSNEMAKVDDSFFHRLEESFLVEEDKKHERHPIFGNIVDEVAYHEKYPTIYHLRKKLVDSTDKADLRLIYLALAHMIKFRGHFLIEGDLNPDNSDVDKLFIQLVQTYNQLFEENPINASGVDAKAILSARLSKSRRLENLIAQLPGEKKNGLFGNLIALSLGLTPNFKSNFDLAEDAKLQLSKDTYDDDLDNLLAQIGDQYADLFLAAKNLSDAILLSDILRVNTEITKAPLSASMIKRYDEHHQDLTLLKALVRQQLPEKYKEIFFDQSKNGYAGYIDGGASQEEFYKFIKPILEKMDGTEELLVKLNREDLLRKQRTFDNGSIPHQIHLGELHAILRRQEDFYPFLKDNREKIEKILTFRIPYYVGPLARGNSRFAWMTRKSEETITPWNFEEVVDKGASAQSFIERMTNFDKNLPNEKVLPKHSLLYEYFTVYNELTKVKYVTEGMRKPAFLSGEQKKAIVDLLFKTNRKVTVKQLKEDYFKKIECFDSVEISGVEDRFNASLGTYHDLLKIIKDKDFLDNEENEDILEDIVLTLTLFEDREMIEERLKTYAHLFDDKVMKQLKRRRYTGWGRLSRKLINGIRDKQSGKTILDFLKSDGFANRNFMQLIHDDSLTFKEDIQKAQVSGQGDSLHEHIANLAGSPAIKKGILQTVKVVDELVKVMGRHKPENIVIEMARENQTTQKGQKNSRERMKRIEEGIKELGSQILKEHPVENTQLQNEKLYLYYLQNGRDMYVDQELDINRLSDYDVDHIVPQSFLKDDSIDNKVLTRSDKARGKSDNVPSEEVVKKMKNYWRQLLNAKLITQRKFDNLTKAERGGLSELDKAGFIKRQLVETRQITKHVAQILDSRMNTKYDENDKLIREVKVITLKSKLVSDFRKDFQFYKVREINNYHHAHDAYLNAVVGTALIKKYPKLESEFVYGDYKVYDVRKMIAKSEQEIGKATAKYFFYSNIMNFFKTEITLANGEIRKRPLIETNGETGEIVWDKGRDFATVRKVLSMPQVNIVKKTEVQTGGFSKESILPKRNSDKLIARKKDWDPKKYGGFDSPTVAYSVLVVAKVEKGKSKKLKSVKELLGITIMERSSFEKNPIDFLEAKGYKEVKKDLIIKLPKYSLFELENGRKRMLASAGELQKGNELALPSKYVNFLYLASHYEKLKGSPEDNEQKQLFVEQHKHYLDEIIEQISEFSKRVILADANLDKVLSAYNKHRDKPIREQAENIIHLFTLTNLGAPAAFKYFDTTIDRKRYTSTKEVLDATLIHQSITGLYETRIDLSQLGGDGGPAPEAAAKGSSGGTLQLDDEYRLYSPLVKPDQNIQFWLEQFPQAWAETAGMGLAKQVPPQVIQLKASATPVSVRQYPLSKEAQEGIRPHVQRLIQQGILVPVQSPWNTPLLPVRKPGTNDYRPVQDLREVNKRVQDIHPTVPNPYNLLCALPPQRSWYTVLDLKDAFFCLRLHPTSQPLFAFEWRDPGTGRTGQLTWTRLPQGFKNSPTIFNEALHRDLANFRIQHPQVTLLQYVDDLLLAGATKQDCLEGTKALLLELSDLGYRASAKKAQICRREVTYLGYSLRDGQRWLTEARKKTVVQIPAPTTAKQVREFLGTAGFCRLWIPGFATLAAPLYPLTKPKGEFSWAPEHQKAFDAIKKALLSAPALALPDVTKPFTLYVDERKGVARGVLTQTLGPWRRPVAYLSKKLDPVASGWPVCLKAIAAVAILVKDADKLTLGQNITVIAPHALENIVRQPPDRWMTNARMTHYQSLLLTERVTFAPPAALNPATLLPEETDEPVTHDCHQLLIEETGVRKDLTDIPLTGEVLTWFTDGSSYVVEGKRMAGAAVVDGTRTIWASSLPEGTSAQKAELMALTQALRLAEGKSINIYTDSRYAFATAHVHGAIYKQRGWLTSAGREIKNKEEILSLLEALHLPKRLAIIHCPGHQKAKDPISRGNQMADRVAKQAAQGVNLLAGKRTADGSEFEKRTADGSEFESPKKKAKVE

SEQ ID NO: 133 - protein, 2090 aa, synthetic construct
MPAAKRVKLDGGDKKYSIGLDIGTNSVGWAVITDEYKVPSKKFKVLGNTDRHSIKKNLIGALLFDSGETAEATRLKRTARRRYTRRKNRICYLQEIFSNEMAKVDDSFFHRLEESFLVEEDKKHERHPIFGNIVDEVAYHEKYPTIYHLRKKLVDSTDKADLRLIYLALAHMIKFRGHFLIEGDLNPDNSDVDKLFIQLVQTYNQLFEENPINASGVDAKAILSARLSKSRRLENLIAQLPGEKKNGLFGNLIALSLGLTPNFKSNFDLAEDAKLQLSKDTYDDDLDNLLAQIGDQYADLFLAAKNLSDAILLSDILRVNTEITKAPLSASMIKRYDEHHQDLTLLKALVRQQLPEKYKEIFFDQSKNGYAGYIDGGASQEEFYKFIKPILEKMDGTEELLVKLNREDLLRKQRTFDNGSIPHQIHLGELHAILRRQEDFYPFLKDNREKIEKILTFRIPYYVGPLARGNSRFAWMTRKSEETITPWNFEEVVDKGASAQSFIERMTNFDKNLPNEKVLPKHSLLYEYFTVYNELTKVKYVTEGMRKPAFLSGEQKKAIVDLLFKTNRKVTVKQLKEDYFKKIECFDSVEISGVEDRFNASLGTYHDLLKIIKDKDFLDNEENEDILEDIVLTLTLFEDREMIEERLKTYAHLFDDKVMKQLKRRRYTGWGRLSRKLINGIRDKQSGKTILDFLKSDGFANRNFMQLIHDDSLTFKEDIQKAQVSGQGDSLHEHIANLAGSPAIKKGILQTVKVVDELVKVMGRHKPENIVIEMARENQTTQKGQKNSRERMKRIEEGIKELGSQILKEHPVENTQLQNEKLYLYYLQNGRDMYVDQELDINRLSDYDVDHIVPQSFLKDDSIDNKVLTRSDKARGKSDNVPSEEVVKKMKNYWRQLLNAKLITQRKFDNLTKAERGGLSELDKAGFIKRQLVETRQITKHVAQILDSRMNTKYDENDKLIREVKVITLKSKLVSDFRKDFQFYKVREINNYHHAHDAYLNAVVGTALIKKYPKLESEFVYGDYKVYDVRKMIAKSEQEIGKATAKYFFYSNIMNFFKTEITLANGEIRKRPLIETNGETGEIVWDKGRDFATVRKVLSMPQVNIVKKTEVQTGGFSKESILPKRNSDKLIARKKDWDPKKYGGFDSPTVAYSVLVVAKVEKGKSKKLKSVKELLGITIMERSSFEKNPIDFLEAKGYKEVKKDLIIKLPKYSLFELENGRKRMLASAGELQKGNELALPSKYVNFLYLASHYEKLKGSPEDNEQKQLFVEQHKHYLDEIIEQISEFSKRVILADANLDKVLSAYNKHRDKPIREQAENIIHLFTLTNLGAPAAFKYFDTTIDRKRYTSTKEVLDATLIHQSITGLYETRIDLSQLGGDGGGSSEAAAKGGGGGTLQLDDEYRLYSPLVKPDQNIQFWLEQFPQAWAETAGMGLAKQVPPQVIQLKASATPVSVRQYPLSKEAQEGIRPHVQRLIQQGILVPVQSPWNTPLLPVRKPGTNDYRPVQDLREVNKRVQDIHPTVPNPYNLLCALPPQRSWYTVLDLKDAFFCLRLHPTSQPLFAFEWRDPGTGRTGQLTWTRLPQGFKNSPTIFNEALHRDLANFRIQHPQVTLLQYVDDLLLAGATKQDCLEGTKALLLELSDLGYRASAKKAQICRREVTYLGYSLRDGQRWLTEARKKTVVQIPAPTTAKQVREFLGTAGFCRLWIPGFATLAAPLYPLTKPKGEFSWAPEHQKAFDAIKKALLSAPALALPDVTKPFTLYVDERKGVARGVLTQTLGPWRRPVAYLSKKLDPVASGWPVCLKAIAAVAILVKDADKLTLGQNITVIAPHALENIVRQPPDRWMTNARMTHYQSLLLTERVTFAPPAALNPATLLPEETDEPVTHDCHQLLIEETGVRKDLTDIPLTGEVLTWFTDGSSYVVEGKRMAGAAVVDGTRTIWASSLPEGTSAQKAELMALTQALRLAEGKSINIYTDSRYAFATAHVHGAIYKQRGWLTSAGREIKNKEEILSLLEALHLPKRLAIIHCPGHQKAKDPISRGNQMADRVAKQAAQGVNLLAGKRTADGSEFEKRTADGSEFESPKKKAKVE

SEQ ID NO: 134 - protein, 2088 aa, synthetic construct
MPAAKRVKLDGGDKKYSIGLDIGTNSVGWAVITDEYKVPSKKFKVLGNTDRHSIKKNLIGALLFDSGETAEATRLKRTARRRYTRRKNRICYLQEIFSNEMAKVDDSFFHRLEESFLVEEDKKHERHPIFGNIVDEVAYHEKYPTIYHLRKKLVDSTDKADLRLIYLALAHMIKFRGHFLIEGDLNPDNSDVDKLFIQLVQTYNQLFEENPINASGVDAKAILSARLSKSRRLENLIAQLPGEKKNGLFGNLIALSLGLTPNFKSNFDLAEDAKLQLSKDTYDDDLDNLLAQIGDQYADLFLAAKNLSDAILLSDILRVNTEITKAPLSASMIKRYDEHHQDLTLLKALVRQQLPEKYKEIFFDQSKNGYAGYIDGGASQEEFYKFIKPILEKMDGTEELLVKLNREDLLRKQRTFDNGSIPHQIHLGELHAILRRQEDFYPFLKDNREKIEKILTFRIPYYVGPLARGNSRFAWMTRKSEETITPWNFEEVVDKGASAQSFIERMTNFDKNLPNEKVLPKHSLLYEYFTVYNELTKVKYVTEGMRKPAFLSGEQKKAIVDLLFKTNRKVTVKQLKEDYFKKIECFDSVEISGVEDRFNASLGTYHDLLKIIKDKDFLDNEENEDILEDIVLTLTLFEDREMIEERLKTYAHLFDDKVMKQLKRRRYTGWGRLSRKLINGIRDKQSGKTILDFLKSDGFANRNFMQLIHDDSLTFKEDIQKAQVSGQGDSLHEHIANLAGSPAIKKGILQTVKVVDELVKVMGRHKPENIVIEMARENQTTQKGQKNSRERMKRIEEGIKELGSQILKEHPVENTQLQNEKLYLYYLQNGRDMYVDQELDINRLSDYDVDHIVPQSFLKDDSIDNKVLTRSDKARGKSDNVPSEEVVKKMKNYWRQLLNAKLITQRKFDNLTKAERGGLSELDKAGFIKRQLVETRQITKHVAQILDSRMNTKYDENDKLIREVKVITLKSKLVSDFRKDFQFYKVREINNYHHAHDAYLNAVVGTALIKKYPKLESEFVYGDYKVYDVRKMIAKSEQEIGKATAKYFFYSNIMNFFKTEITLANGEIRKRPLIETNGETGEIVWDKGRDFATVRKVLSMPQVNIVKKTEVQTGGFSKESILPKRNSDKLIARKKDWDPKKYGGFDSPTVAYSVLVVAKVEKGKSKKLKSVKELLGITIMERSSFEKNPIDFLEAKGYKEVKKDLIIKLPKYSLFELENGRKRMLASAGELQKGNELALPSKYVNFLYLASHYEKLKGSPEDNEQKQLFVEQHKHYLDEIIEQISEFSKRVILADANLDKVLSAYNKHRDKPIREQAENIIHLFTLTNLGAPAAFKYFDTTIDRKRYTSTKEVLDATLIHQSITGLYETRIDLSQLGGDGGPAPGSSGGSGGTLQLDDEYRLYSPLVKPDQNIQFWLEQFPQAWAETAGMGLAKQVPPQVIQLKASATPVSVRQYPLSKEAQEGIRPHVQRLIQQGILVPVQSPWNTPLLPVRKPGTNDYRPVQDLREVNKRVQDIHPTVPNPYNLLCALPPQRSWYTVLDLKDAFFCLRLHPTSQPLFAFEWRDPGTGRTGQLTWTRLPQGFKNSPTIFNEALHRDLANFRIQHPQVTLLQYVDDLLLAGATKQDCLEGTKALLLELSDLGYRASAKKAQICRREVTYLGYSLRDGQRWLTEARKKTVVQIPAPTTAKQVREFLGTAGFCRLWIPGFATLAAPLYPLTKPKGEFSWAPEHQKAFDAIKKALLSAPALALPDVTKPFTLYVDERKGVARGVLTQTLGPWRRPVAYLSKKLDPVASGWPVCLKAIAAVAILVKDADKLTLGQNITVIAPHALENIVRQPPDRWMTNARMTHYQSLLLTERVTFAPPAALNPATLLPEETDEPVTHDCHQLLIEETGVRKDLTDIPLTGEVLTWFTDGSSYVVEGKRMAGAAVVDGTRTIWASSLPEGTSAQKAELMALTQALRLAEGKSINIYTDSRYAFATAHVHGAIYKQRGWLTSAGREIKNKEEILSLLEALHLPKRLAIIHCPGHQKAKDPISRGNQMADRVAKQAAQGVNLLAGKRTADGSEFEKRTADGSEFESPKKKAKVE

SEQ ID NO: 135 - protein, 2088 aa, synthetic construct
MPAAKRVKLDGGDKKYSIGLDIGTNSVGWAVITDEYKVPSKKFKVLGNTDRHSIKKNLIGALLFDSGETAEATRLKRTARRRYTRRKNRICYLQEIFSNEMAKVDDSFFHRLEESFLVEEDKKHERHPIFGNIVDEVAYHEKYPTIYHLRKKLVDSTDKADLRLIYLALAHMIKFRGHFLIEGDLNPDNSDVDKLFIQLVQTYNQLFEENPINASGVDAKAILSARLSKSRRLENLIAQLPGEKKNGLFGNLIALSLGLTPNFKSNFDLAEDAKLQLSKDTYDDDLDNLLAQIGDQYADLFLAAKNLSDAILLSDILRVNTEITKAPLSASMIKRYDEHHQDLTLLKALVRQQLPEKYKEIFFDQSKNGYAGYIDGGASQEEFYKFIKPILEKMDGTEELLVKLNREDLLRKQRTFDNGSIPHQIHLGELHAILRRQEDFYPFLKDNREKIEKILTFRIPYYVGPLARGNSRFAWMTRKSEETITPWNFEEVVDKGASAQSFIERMTNFDKNLPNEKVLPKHSLLYEYFTVYNELTKVKYVTEGMRKPAFLSGEQKKAIVDLLFKTNRKVTVKQLKEDYFKKIECFDSVEISGVEDRFNASLGTYHDLLKIIKDKDFLDNEENEDILEDIVLTLTLFEDREMIEERLKTYAHLFDDKVMKQLKRRRYTGWGRLSRKLINGIRDKQSGKTILDFLKSDGFANRNFMQLIHDDSLTFKEDIQKAQVSGQGDSLHEHIANLAGSPAIKKGILQTVKVVDELVKVMGRHKPENIVIEMARENQTTQKGQKNSRERMKRIEEGIKELGSQILKEHPVENTQLQNEKLYLYYLQNGRDMYVDQELDINRLSDYDVDHIVPQSFLKDDSIDNKVLTRSDKARGKSDNVPSEEVVKKMKNYWRQLLNAKLITQRKFDNLTKAERGGLSELDKAGFIKRQLVETRQITKHVAQILDSRMNTKYDENDKLIREVKVITLKSKLVSDFRKDFQFYKVREINNYHHAHDAYLNAVVGTALIKKYPKLESEFVYGDYKVYDVRKMIAKSEQEIGKATAKYFFYSNIMNFFKTEITLANGEIRKRPLIETNGETGEIVWDKGRDFATVRKVLSMPQVNIVKKTEVQTGGFSKESILPKRNSDKLIARKKDWDPKKYGGFDSPTVAYSVLVVAKVEKGKSKKLKSVKELLGITIMERSSFEKNPIDFLEAKGYKEVKKDLIIKLPKYSLFELENGRKRMLASAGELQKGNELALPSKYVNFLYLASHYEKLKGSPEDNEQKQLFVEQHKHYLDEIIEQISEFSKRVILADANLDKVLSAYNKHRDKPIREQAENIIHLFTLTNLGAPAAFKYFDTTIDRKRYTSTKEVLDATLIHQSITGLYETRIDLSQLGGDGGPAPGGSGSSGGTLQLDDEYRLYSPLVKPDQNIQFWLEQFPQAWAETAGMGLAKQVPPQVIQLKASATPVSVRQYPLSKEAQEGIRPHVQRLIQQGILVPVQSPWNTPLLPVRKPGTNDYRPVQDLREVNKRVQDIHPTVPNPYNLLCALPPQRSWYTVLDLKDAFFCLRLHPTSQPLFAFEWRDPGTGRTGQLTWTRLPQGFKNSPTIFNEALHRDLANFRIQHPQVTLLQYVDDLLLAGATKQDCLEGTKALLLELSDLGYRASAKKAQICRREVTYLGYSLRDGQRWLTEARKKTVVQIPAPTTAKQVREFLGTAGFCRLWIPGFATLAAPLYPLTKPKGEFSWAPEHQKAFDAIKKALLSAPALALPDVTKPFTLYVDERKGVARGVLTQTLGPWRRPVAYLSKKLDPVASGWPVCLKAIAAVAILVKDADKLTLGQNITVIAPHALENIVRQPPDRWMTNARMTHYQSLLLTERVTFAPPAALNPATLLPEETDEPVTHDCHQLLIEETGVRKDLTDIPLTGEVLTWFTDGSSYVVEGKRMAGAAVVDGTRTIWASSLPEGTSAQKAELMALTQALRLAEGKSINIYTDSRYAFATAHVHGAIYKQRGWLTSAGREIKNKEEILSLLEALHLPKRLAIIHCPGHQKAKDPISRGNQMADRVAKQAAQGVNLLAGKRTADGSEFEKRTADGSEFESPKKKAKVE

SEQ ID NO: 136 - protein, 2090 aa, synthetic construct
MPAAKRVKLDGGDKKYSIGLDIGTNSVGWAVITDEYKVPSKKFKVLGNTDRHSIKKNLIGALLFDSGETAEATRLKRTARRRYTRRKNRICYLQEIFSNEMAKVDDSFFHRLEESFLVEEDKKHERHPIFGNIVDEVAYHEKYPTIYHLRKKLVDSTDKADLRLIYLALAHMIKFRGHFLIEGDLNPDNSDVDKLFIQLVQTYNQLFEENPINASGVDAKAILSARLSKSRRLENLIAQLPGEKKNGLFGNLIALSLGLTPNFKSNFDLAEDAKLQLSKDTYDDDLDNLLAQIGDQYADLFLAAKNLSDAILLSDILRVNTEITKAPLSASMIKRYDEHHQDLTLLKALVRQQLPEKYKEIFFDQSKNGYAGYIDGGASQEEFYKFIKPILEKMDGTEELLVKLNREDLLRKQRTFDNGSIPHQIHLGELHAILRRQEDFYPFLKDNREKIEKILTFRIPYYVGPLARGNSRFAWMTRKSEETITPWNFEEVVDKGASAQSFIERMTNFDKNLPNEKVLPKHSLLYEYFTVYNELTKVKYVTEGMRKPAFLSGEQKKAIVDLLFKTNRKVTVKQLKEDYFKKIECFDSVEISGVEDRFNASLGTYHDLLKIIKDKDFLDNEENEDILEDIVLTLTLFEDREMIEERLKTYAHLFDDKVMKQLKRRRYTGWGRLSRKLINGIRDKQSGKTILDFLKSDGFANRNFMQLIHDDSLTFKEDIQKAQVSGQGDSLHEHIANLAGSPAIKKGILQTVKVVDELVKVMGRHKPENIVIEMARENQTTQKGQKNSRERMKRIEEGIKELGSQILKEHPVENTQLQNEKLYLYYLQNGRDMYVDQELDINRLSDYDVDHIVPQSFLKDDSIDNKVLTRSDKARGKSDNVPSEEVVKKMKNYWRQLLNAKLITQRKFDNLTKAERGGLSELDKAGFIKRQLVETRQITKHVAQILDSRMNTKYDENDKLIREVKVITLKSKLVSDFRKDFQFYKVREINNYHHAHDAYLNAVVGTALIKKYPKLESEFVYGDYKVYDVRKMIAKSEQEIGKATAKYFFYSNIMNFFKTEITLANGEIRKRPLIETNGETGEIVWDKGRDFATVRKVLSMPQVNIVKKTEVQTGGFSKESILPKRNSDKLIARKKDWDPKKYGGFDSPTVAYSVLVVAKVEKGKSKKLKSVKELLGITIMERSSFEKNPIDFLEAKGYKEVKKDLIIKLPKYSLFELENGRKRMLASAGELQKGNELALPSKYVNFLYLASHYEKLKGSPEDNEQKQLFVEQHKHYLDEIIEQISEFSKRVILADANLDKVLSAYNKHRDKPIREQAENIIHLFTLTNLGAPAAFKYFDTTIDRKRYTSTKEVLDATLIHQSITGLYETRIDLSQLGGDGGEAAAKGGSGSSGGTLQLDDEYRLYSPLVKPDQNIQFWLEQFPQAWAETAGMGLAKQVPPQVIQLKASATPVSVRQYPLSKEAQEGIRPHVQRLIQQGILVPVQSPWNTPLLPVRKPGTNDYRPVQDLREVNKRVQDIHPTVPNPYNLLCALPPQRSWYTVLDLKDAFFCLRLHPTSQPLFAFEWRDPGTGRTGQLTWTRLPQGFKNSPTIFNEALHRDLANFRIQHPQVTLLQYVDDLLLAGATKQDCLEGTKALLLELSDLGYRASAKKAQICRREVTYLGYSLRDGQRWLTEARKKTVVQIPAPTTAKQVREFLGTAGFCRLWIPGFATLAAPLYPLTKPKGEFSWAPEHQKAFDAIKKALLSAPALALPDVTKPFTLYVDERKGVARGVLTQTLGPWRRPVAYLSKKLDPVASGWPVCLKAIAAVAILVKDADKLTLGQNITVIAPHALENIVRQPPDRWMTNARMTHYQSLLLTERVTFAPPAALNPATLLPEETDEPVTHDCHQLLIEETGVRKDLTDIPLTGEVLTWFTDGSSYVVEGKRMAGAAVVDGTRTIWASSLPEGTSAQKAELMALTQALRLAEGKSINIYTDSRYAFATAHVHGAIYKQRGWLTSAGREIKNKEEILSLLEALHLPKRLAIIHCPGHQKAKDPISRGNQMADRVAKQAAQGVNLLAGKRTADGSEFEKRTADGSEFESPKKKAKVE

SEQ ID NO: 137 - protein, 2099 aa, synthetic construct
MPAAKRVKLDGGDKKYSIGLDIGTNSVGWAVITDEYKVPSKKFKVLGNTDRHSIKKNLIGALLFDSGETAEATRLKRTARRRYTRRKNRICYLQEIFSNEMAKVDDSFFHRLEESFLVEEDKKHERHPIFGNIVDEVAYHEKYPTIYHLRKKLVDSTDKADLRLIYLALAHMIKFRGHFLIEGDLNPDNSDVDKLFIQLVQTYNQLFEENPINASGVDAKAILSARLSKSRRLENLIAQLPGEKKNGLFGNLIALSLGLTPNFKSNFDLAEDAKLQLSKDTYDDDLDNLLAQIGDQYADLFLAAKNLSDAILLSDILRVNTEITKAPLSASMIKRYDEHHQDLTLLKALVRQQLPEKYKEIFFDQSKNGYAGYIDGGASQEEFYKFIKPILEKMDGTEELLVKLNREDLLRKQRTFDNGSIPHQIHLGELHAILRRQEDFYPFLKDNREKIEKILTFRIPYYVGPLARGNSRFAWMTRKSEETITPWNFEEVVDKGASAQSFIERMTNFDKNLPNEKVLPKHSLLYEYFTVYNELTKVKYVTEGMRKPAFLSGEQKKAIVDLLFKTNRKVTVKQLKEDYFKKIECFDSVEISGVEDRFNASLGTYHDLLKIIKDKDFLDNEENEDILEDIVLTLTLFEDREMIEERLKTYAHLFDDKVMKQLKRRRYTGWGRLSRKLINGIRDKQSGKTILDFLKSDGFANRNFMQLIHDDSLTFKEDIQKAQVSGQGDSLHEHIANLAGSPAIKKGILQTVKVVDELVKVMGRHKPENIVIEMARENQTTQKGQKNSRERMKRIEEGIKELGSQILKEHPVENTQLQNEKLYLYYLQNGRDMYVDQELDINRLSDYDVDHIVPQSFLKDDSIDNKVLTRSDKARGKSDNVPSEEVVKKMKNYWRQLLNAKLITQRKFDNLTKAERGGLSELDKAGFIKRQLVETRQITKHVAQILDSRMNTKYDENDKLIREVKVITLKSKLVSDFRKDFQFYKVREINNYHHAHDAYLNAVVGTALIKKYPKLESEFVYGDYKVYDVRKMIAKSEQEIGKATAKYFFYSNIMNFFKTEITLANGEIRKRPLIETNGETGEIVWDKGRDFATVRKVLSMPQVNIVKKTEVQTGGFSKESILPKRNSDKLIARKKDWDPKKYGGFDSPTVAYSVLVVAKVEKGKSKKLKSVKELLGITIMERSSFEKNPIDFLEAKGYKEVKKDLIIKLPKYSLFELENGRKRMLASAGELQKGNELALPSKYVNFLYLASHYEKLKGSPEDNEQKQLFVEQHKHYLDEIIEQISEFSKRVILADANLDKVLSAYNKHRDKPIREQAENIIHLFTLTNLGAPAAFKYFDTTIDRKRYTSTKEVLDATLIHQSITGLYETRIDLSQLGGDGGEAAAKEAAAKEAAAKEAAAKGGTLQLDDEYRLYSPLVKPDQNIQFWLEQFPQAWAETAGMGLAKQVPPQVIQLKASATPVSVRQYPLSKEAQEGIRPHVQRLIQQGILVPVQSPWNTPLLPVRKPGTNDYRPVQDLREVNKRVQDIHPTVPNPYNLLCALPPQRSWYTVLDLKDAFFCLRLHPTSQPLFAFEWRDPGTGRTGQLTWTRLPQGFKNSPTIFNEALHRDLANFRIQHPQVTLLQYVDDLLLAGATKQDCLEGTKALLLELSDLGYRASAKKAQICRREVTYLGYSLRDGQRWLTEARKKTVVQIPAPTTAKQVREFLGTAGFCRLWIPGFATLAAPLYPLTKPKGEFSWAPEHQKAFDAIKKALLSAPALALPDVTKPFTLYVDERKGVARGVLTQTLGPWRRPVAYLSKKLDPVASGWPVCLKAIAAVAILVKDADKLTLGQNITVIAPHALENIVRQPPDRWMTNARMTHYQSLLLTERVTFAPPAALNPATLLPEETDEPVTHDCHQLLIEETGVRKDLTDIPLTGEVLTWFTDGSSYVVEGKRMAGAAVVDGTRTIWASSLPEGTSAQKAELMALTQALRLAEGKSINIYTDSRYAFATAHVHGAIYKQRGWLTSAGREIKNKEEILSLLEALHLPKRLAIIHCPGHQKAKDPISRGNQMADRVAKQAAQGVNLLAGKRTADGSEFEKRTADGSEFESPKKKAKVE

SEQ ID NO: 138 - protein, 2090 aa, synthetic construct
MPAAKRVKLDGGDKKYSIGLDIGTNSVGWAVITDEYKVPSKKFKVLGNTDRHSIKKNLIGALLFDSGETAEATRLKRTARRRYTRRKNRICYLQEIFSNEMAKVDDSFFHRLEESFLVEEDKKHERHPIFGNIVDEVAYHEKYPTIYHLRKKLVDSTDKADLRLIYLALAHMIKFRGHFLIEGDLNPDNSDVDKLFIQLVQTYNQLFEENPINASGVDAKAILSARLSKSRRLENLIAQLPGEKKNGLFGNLIALSLGLTPNFKSNFDLAEDAKLQLSKDTYDDDLDNLLAQIGDQYADLFLAAKNLSDAILLSDILRVNTEITKAPLSASMIKRYDEHHQDLTLLKALVRQQLPEKYKEIFFDQSKNGYAGYIDGGASQEEFYKFIKPILEKMDGTEELLVKLNREDLLRKQRTFDNGSIPHQIHLGELHAILRRQEDFYPFLKDNREKIEKILTFRIPYYVGPLARGNSRFAWMTRKSEETITPWNFEEVVDKGASAQSFIERMTNFDKNLPNEKVLPKHSLLYEYFTVYNELTKVKYVTEGMRKPAFLSGEQKKAIVDLLFKTNRKVTVKQLKEDYFKKIECFDSVEISGVEDRFNASLGTYHDLLKIIKDKDFLDNEENEDILEDIVLTLTLFEDREMIEERLKTYAHLFDDKVMKQLKRRRYTGWGRLSRKLINGIRDKQSGKTILDFLKSDGFANRNFMQLIHDDSLTFKEDIQKAQVSGQGDSLHEHIANLAGSPAIKKGILQTVKVVDELVKVMGRHKPENIVIEMARENQTTQKGQKNSRERMKRIEEGIKELGSQILKEHPVENTQLQNEKLYLYYLQNGRDMYVDQELDINRLSDYDVDHIVPQSFLKDDSIDNKVLTRSDKARGKSDNVPSEEVVKKMKNYWRQLLNAKLITQRKFDNLTKAERGGLSELDKAGFIKRQLVETRQITKHVAQILDSRMNTKYDENDKLIREVKVITLKSKLVSDFRKDFQFYKVREINNYHHAHDAYLNAVVGTALIKKYPKLESEFVYGDYKVYDVRKMIAKSEQEIGKATAKYFFYSNIMNFFKTEITLANGEIRKRPLIETNGETGEIVWDKGRDFATVRKVLSMPQVNIVKKTEVQTGGFSKESILPKRNSDKLIARKKDWDPKKYGGFDSPTVAYSVLVVAKVEKGKSKKLKSVKELLGITIMERSSFEKNPIDFLEAKGYKEVKKDLIIKLPKYSLFELENGRKRMLASAGELQKGNELALPSKYVNFLYLASHYEKLKGSPEDNEQKQLFVEQHKHYLDEIIEQISEFSKRVILADANLDKVLSAYNKHRDKPIREQAENIIHLFTLTNLGAPAAFKYFDTTIDRKRYTSTKEVLDATLIHQSITGLYETRIDLSQLGGDGGPAPGGSEAAAKGGTLQLDDEYRLYSPLVKPDQNIQFWLEQFPQAWAETAGMGLAKQVPPQVIQLKASATPVSVRQYPLSKEAQEGIRPHVQRLIQQGILVPVQSPWNTPLLPVRKPGTNDYRPVQDLREVNKRVQDIHPTVPNPYNLLCALPPQRSWYTVLDLKDAFFCLRLHPTSQPLFAFEWRDPGTGRTGQLTWTRLPQGFKNSPTIFNEALHRDLANFRIQHPQVTLLQYVDDLLLAGATKQDCLEGTKALLLELSDLGYRASAKKAQICRREVTYLGYSLRDGQRWLTEARKKTVVQIPAPTTAKQVREFLGTAGFCRLWIPGFATLAAPLYPLTKPKGEFSWAPEHQKAFDAIKKALLSAPALALPDVTKPFTLYVDERKGVARGVLTQTLGPWRRPVAYLSKKLDPVASGWPVCLKAIAAVAILVKDADKLTLGQNITVIAPHALENIVRQPPDRWMTNARMTHYQSLLLTERVTFAPPAALNPATLLPEETDEPVTHDCHQLLIEETGVRKDLTDIPLTGEVLTWFTDGSSYVVEGKRMAGAAVVDGTRTIWASSLPEGTSAQKAELMALTQALRLAEGKSINIYTDSRYAFATAHVHGAIYKQRGWLTSAGREIKNKEEILSLLEALHLPKRLAIIHCPGHQKAKDPISRGNQMADRVAKQAAQGVNLLAGKRTADGSEFEKRTADGSEFESPKKKAKVE

SEQ ID NO: 139 - protein, 2090 aa, synthetic construct
MPAAKRVKLDGGDKKYSIGLDIGTNSVGWAVITDEYKVPSKKFKVLGNTDRHSIKKNLIGALLFDSGETAEATRLKRTARRRYTRRKNRICYLQEIFSNEMAKVDDSFFHRLEESFLVEEDKKHERHPIFGNIVDEVAYHEKYPTIYHLRKKLVDSTDKADLRLIYLALAHMIKFRGHFLIEGDLNPDNSDVDKLFIQLVQTYNQLFEENPINASGVDAKAILSARLSKSRRLENLIAQLPGEKKNGLFGNLIALSLGLTPNFKSNFDLAEDAKLQLSKDTYDDDLDNLLAQIGDQYADLFLAAKNLSDAILLSDILRVNTEITKAPLSASMIKRYDEHHQDLTLLKALVRQQLPEKYKEIFFDQSKNGYAGYIDGGASQEEFYKFIKPILEKMDGTEELLVKLNREDLLRKQRTFDNGSIPHQIHLGELHAILRRQEDFYPFLKDNREKIEKILTFRIPYYVGPLARGNSRFAWMTRKSEETITPWNFEEVVDKGASAQSFIERMTNFDKNLPNEKVLPKHSLLYEYFTVYNELTKVKYVTEGMRKPAFLSGEQKKAIVDLLFKTNRKVTVKQLKEDYFKKIECFDSVEISGVEDRFNASLGTYHDLLKIIKDKDFLDNEENEDILEDIVLTLTLFEDREMIEERLKTYAHLFDDKVMKQLKRRRYTGWGRLSRKLINGIRDKQSGKTILDFLKSDGFANRNFMQLIHDDSLTFKEDIQKAQVSGQGDSLHEHIANLAGSPAIKKGILQTVKVVDELVKVMGRHKPENIVIEMARENQTTQKGQKNSRERMKRIEEGIKELGSQILKEHPVENTQLQNEKLYLYYLQNGRDMYVDQELDINRLSDYDVDHIVPQSFLKDDSIDNKVLTRSDKARGKSDNVPSEEVVKKMKNYWRQLLNAKLITQRKFDNLTKAERGGLSELDKAGFIKRQLVETRQITKHVAQILDSRMNTKYDENDKLIREVKVITLKSKLVSDFRKDFQFYKVREINNYHHAHDAYLNAVVGTALIKKYPKLESEFVYGDYKVYDVRKMIAKSEQEIGKATAKYFFYSNIMNFFKTEITLANGEIRKRPLIETNGETGEIVWDKGRDFATVRKVLSMPQVNIVKKTEVQTGGFSKESILPKRNSDKLIARKKDWDPKKYGGFDSPTVAYSVLVVAKVEKGKSKKLKSVKELLGITIMERSSFEKNPIDFLEAKGYKEVKKDLIIKLPKYSLFELENGRKRMLASAGELQKGNELALPSKYVNFLYLASHYEKLKGSPEDNEQKQLFVEQHKHYLDEIIEQISEFSKRVILADANLDKVLSAYNKHRDKPIREQAENIIHLFTLTNLGAPAAFKYFDTTIDRKRYTSTKEVLDATLIHQSITGLYETRIDLSQLGGDGGGGSGSSEAAAKGGTLQLDDEYRLYSPLVKPDQNIQFWLEQFPQAWAETAGMGLAKQVPPQVIQLKASATPVSVRQYPLSKEAQEGIRPHVQRLIQQGILVPVQSPWNTPLLPVRKPGTNDYRPVQDLREVNKRVQDIHPTVPNPYNLLCALPPQRSWYTVLDLKDAFFCLRLHPTSQPLFAFEWRDPGTGRTGQLTWTRLPQGFKNSPTIFNEALHRDLANFRIQHPQVTLLQYVDDLLLAGATKQDCLEGTKALLLELSDLGYRASAKKAQICRREVTYLGYSLRDGQRWLTEARKKTVVQIPAPTTAKQVREFLGTAGFCRLWIPGFATLAAPLYPLTKPKGEFSWAPEHQKAFDAIKKALLSAPALALPDVTKPFTLYVDERKGVARGVLTQTLGPWRRPVAYLSKKLDPVASGWPVCLKAIAAVAILVKDADKLTLGQNITVIAPHALENIVRQPPDRWMTNARMTHYQSLLLTERVTFAPPAALNPATLLPEETDEPVTHDCHQLLIEETGVRKDLTDIPLTGEVLTWFTDGSSYVVEGKRMAGAAVVDGTRTIWASSLPEGTSAQKAELMALTQALRLAEGKSINIYTDSRYAFATAHVHGAIYKQRGWLTSAGREIKNKEEILSLLEALHLPKRLAIIHCPGHQKAKDPISRGNQMADRVAKQAAQGVNLLAGKRTADGSEFEKRTADGSEFESPKKKAKVE

SEQ ID NO: 140 - protein, 2112 aa, synthetic construct
MPAAKRVKLDGGDKKYSIGLDIGTNSVGWAVITDEYKVPSKKFKVLGNTDRHSIKKNLIGALLFDSGETAEATRLKRTARRRYTRRKNRICYLQEIFSNEMAKVDDSFFHRLEESFLVEEDKKHERHPIFGNIVDEVAYHEKYPTIYHLRKKLVDSTDKADLRLIYLALAHMIKFRGHFLIEGDLNPDNSDVDKLFIQLVQTYNQLFEENPINASGVDAKAILSARLSKSRRLENLIAQLPGEKKNGLFGNLIALSLGLTPNFKSNFDLAEDAKLQLSKDTYDDDLDNLLAQIGDQYADLFLAAKNLSDAILLSDILRVNTEITKAPLSASMIKRYDEHHQDLTLLKALVRQQLPEKYKEIFFDQSKNGYAGYIDGGASQEEFYKFIKPILEKMDGTEELLVKLNREDLLRKQRTFDNGSIPHQIHLGELHAILRRQEDFYPFLKDNREKIEKILTFRIPYYVGPLARGNSRFAWMTRKSEETITPWNFEEVVDKGASAQSFIERMTNFDKNLPNEKVLPKHSLLYEYFTVYNELTKVKYVTEGMRKPAFLSGEQKKAIVDLLFKTNRKVTVKQLKEDYFKKIECFDSVEISGVEDRFNASLGTYHDLLKIIKDKDFLDNEENEDILEDIVLTLTLFEDREMIEERLKTYAHLFDDKVMKQLKRRRYTGWGRLSRKLINGIRDKQSGKTILDFLKSDGFANRNFMQLIHDDSLTFKEDIQKAQVSGQGDSLHEHIANLAGSPAIKKGILQTVKVVDELVKVMGRHKPENIVIEMARENQTTQKGQKNSRERMKRIEEGIKELGSQILKEHPVENTQLQNEKLYLYYLQNGRDMYVDQELDINRLSDYDVDHIVPQSFLKDDSIDNKVLTRSDKARGKSDNVPSEEVVKKMKNYWRQLLNAKLITQRKFDNLTKAERGGLSELDKAGFIKRQLVETRQITKHVAQILDSRMNTKYDENDKLIREVKVITLKSKLVSDFRKDFQFYKVREINNYHHAHDAYLNAVVGTALIKKYPKLESEFVYGDYKVYDVRKMIAKSEQEIGKATAKYFFYSNIMNFFKTEITLANGEIRKRPLIETNGETGEIVWDKGRDFATVRKVLSMPQVNIVKKTEVQTGGFSKESILPKRNSDKLIARKKDWDPKKYGGFDSPTVAYSVLVVAKVEKGKSKKLKSVKELLGITIMERSSFEKNPIDFLEAKGYKEVKKDLIIKLPKYSLFELENGRKRMLASAGELQKGNELALPSKYVNFLYLASHYEKLKGSPEDNEQKQLFVEQHKHYLDEIIEQISEFSKRVILADANLDKVLSAYNKHRDKPIREQAENIIHLFTLTNLGAPAAFKYFDTTIDRKRYTSTKEVLDATLIHQSITGLYETRIDLSQLGGDGGSGGSSGGSSGSETPGTSESATPESSGGSSGGSSGGTLQLDDEYRLYSPLVKPDQNIQFWLEQFPQAWAETAGMGLAKQVPPQVIQLKASATPVSVRQYPLSKEAQEGIRPHVQRLIQQGILVPVQSPWNTPLLPVRKPGTNDYRPVQDLREVNKRVQDIHPTVPNPYNLLCALPPQRSWYTVLDLKDAFFCLRLHPTSQPLFAFEWRDPGTGRTGQLTWTRLPQGFKNSPTIFNEALHRDLANFRIQHPQVTLLQYVDDLLLAGATKQDCLEGTKALLLELSDLGYRASAKKAQICRREVTYLGYSLRDGQRWLTEARKKTVVQIPAPTTAKQVREFLGTAGFCRLWIPGFATLAAPLYPLTKPKGEFSWAPEHQKAFDAIKKALLSAPALALPDVTKPFTLYVDERKGVARGVLTQTLGPWRRPVAYLSKKLDPVASGWPVCLKAIAAVAILVKDADKLTLGQNITVIAPHALENIVRQPPDRWMTNARMTHYQSLLLTERVTFAPPAALNPATLLPEETDEPVTHDCHQLLIEETGVRKDLTDIPLTGEVLTWFTDGSSYVVEGKRMAGAAVVDGTRTIWASSLPEGTSAQKAELMALTQALRLAEGKSINIYTDSRYAFATAHVHGAIYKQRGWLTSAGREIKNKEEILSLLEALHLPKRLAIIHCPGHQKAKDPISRGNQMADRVAKQAAQGVNLLAGKRTADGSEFEKRTADGSEFESPKKKAKVE

SEQ ID NO: 141 - protein, 2090 aa, synthetic construct
MPAAKRVKLDGGDKKYSIGLDIGTNSVGWAVITDEYKVPSKKFKVLGNTDRHSIKKNLIGALLFDSGETAEATRLKRTARRRYTRRKNRICYLQEIFSNEMAKVDDSFFHRLEESFLVEEDKKHERHPIFGNIVDEVAYHEKYPTIYHLRKKLVDSTDKADLRLIYLALAHMIKFRGHFLIEGDLNPDNSDVDKLFIQLVQTYNQLFEENPINASGVDAKAILSARLSKSRRLENLIAQLPGEKKNGLFGNLIALSLGLTPNFKSNFDLAEDAKLQLSKDTYDDDLDNLLAQIGDQYADLFLAAKNLSDAILLSDILRVNTEITKAPLSASMIKRYDEHHQDLTLLKALVRQQLPEKYKEIFFDQSKNGYAGYIDGGASQEEFYKFIKPILEKMDGTEELLVKLNREDLLRKQRTFDNGSIPHQIHLGELHAILRRQEDFYPFLKDNREKIEKILTFRIPYYVGPLARGNSRFAWMTRKSEETITPWNFEEVVDKGASAQSFIERMTNFDKNLPNEKVLPKHSLLYEYFTVYNELTKVKYVTEGMRKPAFLSGEQKKAIVDLLFKTNRKVTVKQLKEDYFKKIECFDSVEISGVEDRFNASLGTYHDLLKIIKDKDFLDNEENEDILEDIVLTLTLFEDREMIEERLKTYAHLFDDKVMKQLKRRRYTGWGRLSRKLINGIRDKQSGKTILDFLKSDGFANRNFMQLIHDDSLTFKEDIQKAQVSGQGDSLHEHIANLAGSPAIKKGILQTVKVVDELVKVMGRHKPENIVIEMARENQTTQKGQKNSRERMKRIEEGIKELGSQILKEHPVENTQLQNEKLYLYYLQNGRDMYVDQELDINRLSDYDVDHIVPQSFLKDDSIDNKVLTRSDKARGKSDNVPSEEVVKKMKNYWRQLLNAKLITQRKFDNLTKAERGGLSELDKAGFIKRQLVETRQITKHVAQILDSRMNTKYDENDKLIREVKVITLKSKLVSDFRKDFQFYKVREINNYHHAHDAYLNAVVGTALIKKYPKLESEFVYGDYKVYDVRKMIAKSEQEIGKATAKYFFYSNIMNFFKTEITLANGEIRKRPLIETNGETGEIVWDKGRDFATVRKVLSMPQVNIVKKTEVQTGGFSKESILPKRNSDKLIARKKDWDPKKYGGFDSPTVAYSVLVVAKVEKGKSKKLKSVKELLGITIMERSSFEKNPIDFLEAKGYKEVKKDLIIKLPKYSLFELENGRKRMLASAGELQKGNELALPSKYVNFLYLASHYEKLKGSPEDNEQKQLFVEQHKHYLDEIIEQISEFSKRVILADANLDKVLSAYNKHRDKPIREQAENIIHLFTLTNLGAPAAFKYFDTTIDRKRYTSTKEVLDATLIHQSITGLYETRIDLSQLGGDGGEAAAKGGSPAPGGTLQLDDEYRLYSPLVKPDQNIQFWLEQFPQAWAETAGMGLAKQVPPQVIQLKASATPVSVRQYPLSKEAQEGIRPHVQRLIQQGILVPVQSPWNTPLLPVRKPGTNDYRPVQDLREVNKRVQDIHPTVPNPYNLLCALPPQRSWYTVLDLKDAFFCLRLHPTSQPLFAFEWRDPGTGRTGQLTWTRLPQGFKNSPTIFNEALHRDLANFRIQHPQVTLLQYVDDLLLAGATKQDCLEGTKALLLELSDLGYRASAKKAQICRREVTYLGYSLRDGQRWLTEARKKTVVQIPAPTTAKQVREFLGTAGFCRLWIPGFATLAAPLYPLTKPKGEFSWAPEHQKAFDAIKKALLSAPALALPDVTKPFTLYVDERKGVARGVLTQTLGPWRRPVAYLSKKLDPVASGWPVCLKAIAAVAILVKDADKLTLGQNITVIAPHALENIVRQPPDRWMTNARMTHYQSLLLTERVTFAPPAALNPATLLPEETDEPVTHDCHQLLIEETGVRKDLTDIPLTGEVLTWFTDGSSYVVEGKRMAGAAVVDGTRTIWASSLPEGTSAQKAELMALTQALRLAEGKSINIYTDSRYAFATAHVHGAIYKQRGWLTSAGREIKNKEEILSLLEALHLPKRLAIIHCPGHQKAKDPISRGNQMADRVAKQAAQGVNLLAGKRTADGSEFEKRTADGSEFESPKKKAKVE

SEQ ID NO: 142 - protein, 2097 aa, synthetic construct
MPAAKRVKLDGGDKKYSIGLDIGTNSVGWAVITDEYKVPSKKFKVLGNTDRHSIKKNLIGALLFDSGETAEATRLKRTARRRYTRRKNRICYLQEIFSNEMAKVDDSFFHRLEESFLVEEDKKHERHPIFGNIVDEVAYHEKYPTIYHLRKKLVDSTDKADLRLIYLALAHMIKFRGHFLIEGDLNPDNSDVDKLFIQLVQTYNQLFEENPINASGVDAKAILSARLSKSRRLENLIAQLPGEKKNGLFGNLIALSLGLTPNFKSNFDLAEDAKLQLSKDTYDDDLDNLLAQIGDQYADLFLAAKNLSDAILLSDILRVNTEITKAPLSASMIKRYDEHHQDLTLLKALVRQQLPEKYKEIFFDQSKNGYAGYIDGGASQEEFYKFIKPILEKMDGTEELLVKLNREDLLRKQRTFDNGSIPHQIHLGELHAILRRQEDFYPFLKDNREKIEKILTFRIPYYVGPLARGNSRFAWMTRKSEETITPWNFEEVVDKGASAQSFIERMTNFDKNLPNEKVLPKHSLLYEYFTVYNELTKVKYVTEGMRKPAFLSGEQKKAIVDLLFKTNRKVTVKQLKEDYFKKIECFDSVEISGVEDRFNASLGTYHDLLKIIKDKDFLDNEENEDILEDIVLTLTLFEDREMIEERLKTYAHLFDDKVMKQLKRRRYTGWGRLSRKLINGIRDKQSGKTILDFLKSDGFANRNFMQLIHDDSLTFKEDIQKAQVSGQGDSLHEHIANLAGSPAIKKGILQTVKVVDELVKVMGRHKPENIVIEMARENQTTQKGQKNSRERMKRIEEGIKELGSQILKEHPVENTQLQNEKLYLYYLQNGRDMYVDQELDINRLSDYDVDHIVPQSFLKDDSIDNKVLTRSDKARGKSDNVPSEEVVKKMKNYWRQLLNAKLITQRKFDNLTKAERGGLSELDKAGFIKRQLVETRQITKHVAQILDSRMNTKYDENDKLIREVKVITLKSKLVSDFRKDFQFYKVREINNYHHAHDAYLNAVVGTALIKKYPKLESEFVYGDYKVYDVRKMIAKSEQEIGKATAKYFFYSNIMNFFKTEITLANGEIRKRPLIETNGETGEIVWDKGRDFATVRKVLSMPQVNIVKKTEVQTGGFSKESILPKRNSDKLIARKKDWDPKKYGGFDSPTVAYSVLVVAKVEKGKSKKLKSVKELLGITIMERSSFEKNPIDFLEAKGYKEVKKDLIIKLPKYSLFELENGRKRMLASAGELQKGNELALPSKYVNFLYLASHYEKLKGSPEDNEQKQLFVEQHKHYLDEIIEQISEFSKRVILADANLDKVLSAYNKHRDKPIREQAENIIHLFTLTNLGAPAAFKYFDTTIDRKRYTSTKEVLDATLIHQSITGLYETRIDLSQLGGDGGGGSGGSGGSGGSGGSGGSGGTLQLDDEYRLYSPLVKPDQNIQFWLEQFPQAWAETAGMGLAKQVPPQVIQLKASATPVSVRQYPLSKEAQEGIRPHVQRLIQQGILVPVQSPWNTPLLPVRKPGTNDYRPVQDLREVNKRVQDIHPTVPNPYNLLCALPPQRSWYTVLDLKDAFFCLRLHPTSQPLFAFEWRDPGTGRTGQLTWTRLPQGFKNSPTIFNEALHRDLANFRIQHPQVTLLQYVDDLLLAGATKQDCLEGTKALLLELSDLGYRASAKKAQICRREVTYLGYSLRDGQRWLTEARKKTVVQIPAPTTAKQVREFLGTAGFCRLWIPGFATLAAPLYPLTKPKGEFSWAPEHQKAFDAIKKALLSAPALALPDVTKPFTLYVDERKGVARGVLTQTLGPWRRPVAYLSKKLDPVASGWPVCLKAIAAVAILVKDADKLTLGQNITVIAPHALENIVRQPPDRWMTNARMTHYQSLLLTERVTFAPPAALNPATLLPEETDEPVTHDCHQLLIEETGVRKDLTDIPLTGEVLTWFTDGSSYVVEGKRMAGAAVVDGTRTIWASSLPEGTSAQKAELMALTQALRLAEGKSINIYTDSRYAFATAHVHGAIYKQRGWLTSAGREIKNKEEILSLLEALHLPKRLAIIHCPGHQKAKDPISRGNQMADRVAKQAAQGVNLLAGKRTADGSEFEKRTADGSEFESPKKKAKVE

SEQ ID NO: 143 - protein, 2085 aa, synthetic construct
MPAAKRVKLDGGDKKYSIGLDIGTNSVGWAVITDEYKVPSKKFKVLGNTDRHSIKKNLIGALLFDSGETAEATRLKRTARRRYTRRKNRICYLQEIFSNEMAKVDDSFFHRLEESFLVEEDKKHERHPIFGNIVDEVAYHEKYPTIYHLRKKLVDSTDKADLRLIYLALAHMIKFRGHFLIEGDLNPDNSDVDKLFIQLVQTYNQLFEENPINASGVDAKAILSARLSKSRRLENLIAQLPGEKKNGLFGNLIALSLGLTPNFKSNFDLAEDAKLQLSKDTYDDDLDNLLAQIGDQYADLFLAAKNLSDAILLSDILRVNTEITKAPLSASMIKRYDEHHQDLTLLKALVRQQLPEKYKEIFFDQSKNGYAGYIDGGASQEEFYKFIKPILEKMDGTEELLVKLNREDLLRKQRTFDNGSIPHQIHLGELHAILRRQEDFYPFLKDNREKIEKILTFRIPYYVGPLARGNSRFAWMTRKSEETITPWNFEEVVDKGASAQSFIERMTNFDKNLPNEKVLPKHSLLYEYFTVYNELTKVKYVTEGMRKPAFLSGEQKKAIVDLLFKTNRKVTVKQLKEDYFKKIECFDSVEISGVEDRFNASLGTYHDLLKIIKDKDFLDNEENEDILEDIVLTLTLFEDREMIEERLKTYAHLFDDKVMKQLKRRRYTGWGRLSRKLINGIRDKQSGKTILDFLKSDGFANRNFMQLIHDDSLTFKEDIQKAQVSGQGDSLHEHIANLAGSPAIKKGILQTVKVVDELVKVMGRHKPENIVIEMARENQTTQKGQKNSRERMKRIEEGIKELGSQILKEHPVENTQLQNEKLYLYYLQNGRDMYVDQELDINRLSDYDVDHIVPQSFLKDDSIDNKVLTRSDKARGKSDNVPSEEVVKKMKNYWRQLLNAKLITQRKFDNLTKAERGGLSELDKAGFIKRQLVETRQITKHVAQILDSRMNTKYDENDKLIREVKVITLKSKLVSDFRKDFQFYKVREINNYHHAHDAYLNAVVGTALIKKYPKLESEFVYGDYKVYDVRKMIAKSEQEIGKATAKYFFYSNIMNFFKTEITLANGEIRKRPLIETNGETGEIVWDKGRDFATVRKVLSMPQVNIVKKTEVQTGGFSKESILPKRNSDKLIARKKDWDPKKYGGFDSPTVAYSVLVVAKVEKGKSKKLKSVKELLGITIMERSSFEKNPIDFLEAKGYKEVKKDLIIKLPKYSLFELENGRKRMLASAGELQKGNELALPSKYVNFLYLASHYEKLKGSPEDNEQKQLFVEQHKHYLDEIIEQISEFSKRVILADANLDKVLSAYNKHRDKPIREQAENIIHLFTLTNLGAPAAFKYFDTTIDRKRYTSTKEVLDATLIHQSITGLYETRIDLSQLGGDGGGGGPAPGGTLQLDDEYRLYSPLVKPDQNIQFWLEQFPQAWAETAGMGLAKQVPPQVIQLKASATPVSVRQYPLSKEAQEGIRPHVQRLIQQGILVPVQSPWNTPLLPVRKPGTNDYRPVQDLREVNKRVQDIHPTVPNPYNLLCALPPQRSWYTVLDLKDAFFCLRLHPTSQPLFAFEWRDPGTGRTGQLTWTRLPQGFKNSPTIFNEALHRDLANFRIQHPQVTLLQYVDDLLLAGATKQDCLEGTKALLLELSDLGYRASAKKAQICRREVTYLGYSLRDGQRWLTEARKKTVVQIPAPTTAKQVREFLGTAGFCRLWIPGFATLAAPLYPLTKPKGEFSWAPEHQKAFDAIKKALLSAPALALPDVTKPFTLYVDERKGVARGVLTQTLGPWRRPVAYLSKKLDPVASGWPVCLKAIAAVAILVKDADKLTLGQNITVIAPHALENIVRQPPDRWMTNARMTHYQSLLLTERVTFAPPAALNPATLLPEETDEPVTHDCHQLLIEETGVRKDLTDIPLTGEVLTWFTDGSSYVVEGKRMAGAAVVDGTRTIWASSLPEGTSAQKAELMALTQALRLAEGKSINIYTDSRYAFATAHVHGAIYKQRGWLTSAGREIKNKEEILSLLEALHLPKRLAIIHCPGHQKAKDPISRGNQMADRVAKQAAQGVNLLAGKRTADGSEFEKRTADGSEFESPKKKAKVE

SEQ ID NO: 144 - protein, 2088 aa, synthetic construct
MPAAKRVKLDGGDKKYSIGLDIGTNSVGWAVITDEYKVPSKKFKVLGNTDRHSIKKNLIGALLFDSGETAEATRLKRTARRRYTRRKNRICYLQEIFSNEMAKVDDSFFHRLEESFLVEEDKKHERHPIFGNIVDEVAYHEKYPTIYHLRKKLVDSTDKADLRLIYLALAHMIKFRGHFLIEGDLNPDNSDVDKLFIQLVQTYNQLFEENPINASGVDAKAILSARLSKSRRLENLIAQLPGEKKNGLFGNLIALSLGLTPNFKSNFDLAEDAKLQLSKDTYDDDLDNLLAQIGDQYADLFLAAKNLSDAILLSDILRVNTEITKAPLSASMIKRYDEHHQDLTLLKALVRQQLPEKYKEIFFDQSKNGYAGYIDGGASQEEFYKFIKPILEKMDGTEELLVKLNREDLLRKQRTFDNGSIPHQIHLGELHAILRRQEDFYPFLKDNREKIEKILTFRIPYYVGPLARGNSRFAWMTRKSEETITPWNFEEVVDKGASAQSFIERMTNFDKNLPNEKVLPKHSLLYEYFTVYNELTKVKYVTEGMRKPAFLSGEQKKAIVDLLFKTNRKVTVKQLKEDYFKKIECFDSVEISGVEDRFNASLGTYHDLLKIIKDKDFLDNEENEDILEDIVLTLTLFEDREMIEERLKTYAHLFDDKVMKQLKRRRYTGWGRLSRKLINGIRDKQSGKTILDFLKSDGFANRNFMQLIHDDSLTFKEDIQKAQVSGQGDSLHEHIANLAGSPAIKKGILQTVKVVDELVKVMGRHKPENIVIEMARENQTTQKGQKNSRERMKRIEEGIKELGSQILKEHPVENTQLQNEKLYLYYLQNGRDMYVDQELDINRLSDYDVDHIVPQSFLKDDSIDNKVLTRSDKARGKSDNVPSEEVVKKMKNYWRQLLNAKLITQRKFDNLTKAERGGLSELDKAGFIKRQLVETRQITKHVAQILDSRMNTKYDENDKLIREVKVITLKSKLVSDFRKDFQFYKVREINNYHHAHDAYLNAVVGTALIKKYPKLESEFVYGDYKVYDVRKMIAKSEQEIGKATAKYFFYSNIMNFFKTEITLANGEIRKRPLIETNGETGEIVWDKGRDFATVRKVLSMPQVNIVKKTEVQTGGFSKESILPKRNSDKLIARKKDWDPKKYGGFDSPTVAYSVLVVAKVEKGKSKKLKSVKELLGITIMERSSFEKNPIDFLEAKGYKEVKKDLIIKLPKYSLFELENGRKRMLASAGELQKGNELALPSKYVNFLYLASHYEKLKGSPEDNEQKQLFVEQHKHYLDEIIEQISEFSKRVILADANLDKVLSAYNKHRDKPIREQAENIIHLFTLTNLGAPAAFKYFDTTIDRKRYTSTKEVLDATLIHQSITGLYETRIDLSQLGGDGGGGSGSSGGGGGTLQLDDEYRLYSPLVKPDQNIQFWLEQFPQAWAETAGMGLAKQVPPQVIQLKASATPVSVRQYPLSKEAQEGIRPHVQRLIQQGILVPVQSPWNTPLLPVRKPGTNDYRPVQDLREVNKRVQDIHPTVPNPYNLLCALPPQRSWYTVLDLKDAFFCLRLHPTSQPLFAFEWRDPGTGRTGQLTWTRLPQGFKNSPTIFNEALHRDLANFRIQHPQVTLLQYVDDLLLAGATKQDCLEGTKALLLELSDLGYRASAKKAQICRREVTYLGYSLRDGQRWLTEARKKTVVQIPAPTTAKQVREFLGTAGFCRLWIPGFATLAAPLYPLTKPKGEFSWAPEHQKAFDAIKKALLSAPALALPDVTKPFTLYVDERKGVARGVLTQTLGPWRRPVAYLSKKLDPVASGWPVCLKAIAAVAILVKDADKLTLGQNITVIAPHALENIVRQPPDRWMTNARMTHYQSLLLTERVTFAPPAALNPATLLPEETDEPVTHDCHQLLIEETGVRKDLTDIPLTGEVLTWFTDGSSYVVEGKRMAGAAVVDGTRTIWASSLPEGTSAQKAELMALTQALRLAEGKSINIYTDSRYAFATAHVHGAIYKQRGWLTSAGREIKNKEEILSLLEALHLPKRLAIIHCPGHQKAKDPISRGNQMADRVAKQAAQGVNLLAGKRTADGSEFEKRTADGSEFESPKKKAKVE

SEQ ID NO: 145 - protein, 2091 aa, synthetic construct
MPAAKRVKLDGGDKKYSIGLDIGTNSVGWAVITDEYKVPSKKFKVLGNTDRHSIKKNLIGALLFDSGETAEATRLKRTARRRYTRRKNRICYLQEIFSNEMAKVDDSFFHRLEESFLVEEDKKHERHPIFGNIVDEVAYHEKYPTIYHLRKKLVDSTDKADLRLIYLALAHMIKFRGHFLIEGDLNPDNSDVDKLFIQLVQTYNQLFEENPINASGVDAKAILSARLSKSRRLENLIAQLPGEKKNGLFGNLIALSLGLTPNFKSNFDLAEDAKLQLSKDTYDDDLDNLLAQIGDQYADLFLAAKNLSDAILLSDILRVNTEITKAPLSASMIKRYDEHHQDLTLLKALVRQQLPEKYKEIFFDQSKNGYAGYIDGGASQEEFYKFIKPILEKMDGTEELLVKLNREDLLRKQRTFDNGSIPHQIHLGELHAILRRQEDFYPFLKDNREKIEKILTFRIPYYVGPLARGNSRFAWMTRKSEETITPWNFEEVVDKGASAQSFIERMTNFDKNLPNEKVLPKHSLLYEYFTVYNELTKVKYVTEGMRKPAFLSGEQKKAIVDLLFKTNRKVTVKQLKEDYFKKIECFDSVEISGVEDRFNASLGTYHDLLKIIKDKDFLDNEENEDILEDIVLTLTLFEDREMIEERLKTYAHLFDDKVMKQLKRRRYTGWGRLSRKLINGIRDKQSGKTILDFLKSDGFANRNFMQLIHDDSLTFKEDIQKAQVSGQGDSLHEHIANLAGSPAIKKGILQTVKVVDELVKVMGRHKPENIVIEMARENQTTQKGQKNSRERMKRIEEGIKELGSQILKEHPVENTQLQNEKLYLYYLQNGRDMYVDQELDINRLSDYDVDHIVPQSFLKDDSIDNKVLTRSDKARGKSDNVPSEEVVKKMKNYWRQLLNAKLITQRKFDNLTKAERGGLSELDKAGFIKRQLVETRQITKHVAQILDSRMNTKYDENDKLIREVKVITLKSKLVSDFRKDFQFYKVREINNYHHAHDAYLNAVVGTALIKKYPKLESEFVYGDYKVYDVRKMIAKSEQEIGKATAKYFFYSNIMNFFKTEITLANGEIRKRPLIETNGETGEIVWDKGRDFATVRKVLSMPQVNIVKKTEVQTGGFSKESILPKRNSDKLIARKKDWDPKKYGGFDSPTVAYSVLVVAKVEKGKSKKLKSVKELLGITIMERSSFEKNPIDFLEAKGYKEVKKDLIIKLPKYSLFELENGRKRMLASAGELQKGNELALPSKYVNFLYLASHYEKLKGSPEDNEQKQLFVEQHKHYLDEIIEQISEFSKRVILADANLDKVLSAYNKHRDKPIREQAENIIHLFTLTNLGAPAAFKYFDTTIDRKRYTSTKEVLDATLIHQSITGLYETRIDLSQLGGDGGGGSGGSGGSGGSGGTLQLDDEYRLYSPLVKPDQNIQFWLEQFPQAWAETAGMGLAKQVPPQVIQLKASATPVSVRQYPLSKEAQEGIRPHVQRLIQQGILVPVQSPWNTPLLPVRKPGTNDYRPVQDLREVNKRVQDIHPTVPNPYNLLCALPPQRSWYTVLDLKDAFFCLRLHPTSQPLFAFEWRDPGTGRTGQLTWTRLPQGFKNSPTIFNEALHRDLANFRIQHPQVTLLQYVDDLLLAGATKQDCLEGTKALLLELSDLGYRASAKKAQICRREVTYLGYSLRDGQRWLTEARKKTVVQIPAPTTAKQVREFLGTAGFCRLWIPGFATLAAPLYPLTKPKGEFSWAPEHQKAFDAIKKALLSAPALALPDVTKPFTLYVDERKGVARGVLTQTLGPWRRPVAYLSKKLDPVASGWPVCLKAIAAVAILVKDADKLTLGQNITVIAPHALENIVRQPPDRWMTNARMTHYQSLLLTERVTFAPPAALNPATLLPEETDEPVTHDCHQLLIEETGVRKDLTDIPLTGEVLTWFTDGSSYVVEGKRMAGAAVVDGTRTIWASSLPEGTSAQKAELMALTQALRLAEGKSINIYTDSRYAFATAHVHGAIYKQRGWLTSAGREIKNKEEILSLLEALHLPKRLAIIHCPGHQKAKDPISRGNQMADRVAKQAAQGVNLLAGKRTADGSEFEKRTADGSEFESPKKKAKVE

SEQ ID NO: 146 - protein, 2090 aa, synthetic construct
MPAAKRVKLDGGDKKYSIGLDIGTNSVGWAVITDEYKVPSKKFKVLGNTDRHSIKKNLIGALLFDSGETAEATRLKRTARRRYTRRKNRICYLQEIFSNEMAKVDDSFFHRLEESFLVEEDKKHERHPIFGNIVDEVAYHEKYPTIYHLRKKLVDSTDKADLRLIYLALAHMIKFRGHFLIEGDLNPDNSDVDKLFIQLVQTYNQLFEENPINASGVDAKAILSARLSKSRRLENLIAQLPGEKKNGLFGNLIALSLGLTPNFKSNFDLAEDAKLQLSKDTYDDDLDNLLAQIGDQYADLFLAAKNLSDAILLSDILRVNTEITKAPLSASMIKRYDEHHQDLTLLKALVRQQLPEKYKEIFFDQSKNGYAGYIDGGASQEEFYKFIKPILEKMDGTEELLVKLNREDLLRKQRTFDNGSIPHQIHLGELHAILRRQEDFYPFLKDNREKIEKILTFRIPYYVGPLARGNSRFAWMTRKSEETITPWNFEEVVDKGASAQSFIERMTNFDKNLPNEKVLPKHSLLYEYFTVYNELTKVKYVTEGMRKPAFLSGEQKKAIVDLLFKTNRKVTVKQLKEDYFKKIECFDSVEISGVEDRFNASLGTYHDLLKIIKDKDFLDNEENEDILEDIVLTLTLFEDREMIEERLKTYAHLFDDKVMKQLKRRRYTGWGRLSRKLINGIRDKQSGKTILDFLKSDGFANRNFMQLIHDDSLTFKEDIQKAQVSGQGDSLHEHIANLAGSPAIKKGILQTVKVVDELVKVMGRHKPENIVIEMARENQTTQKGQKNSRERMKRIEEGIKELGSQILKEHPVENTQLQNEKLYLYYLQNGRDMYVDQELDINRLSDYDVDHIVPQSFLKDDSIDNKVLTRSDKARGKSDNVPSEEVVKKMKNYWRQLLNAKLITQRKFDNLTKAERGGLSELDKAGFIKRQLVETRQITKHVAQILDSRMNTKYDENDKLIREVKVITLKSKLVSDFRKDFQFYKVREINNYHHAHDAYLNAVVGTALIKKYPKLESEFVYGDYKVYDVRKMIAKSEQEIGKATAKYFFYSNIMNFFKTEITLANGEIRKRPLIETNGETGEIVWDKGRDFATVRKVLSMPQVNIVKKTEVQTGGFSKESILPKRNSDKLIARKKDWDPKKYGGFDSPTVAYSVLVVAKVEKGKSKKLKSVKELLGITIMERSSFEKNPIDFLEAKGYKEVKKDLIIKLPKYSLFELENGRKRMLASAGELQKGNELALPSKYVNFLYLASHYEKLKGSPEDNEQKQLFVEQHKHYLDEIIEQISEFSKRVILADANLDKVLSAYNKHRDKPIREQAENIIHLFTLTNLGAPAAFKYFDTTIDRKRYTSTKEVLDATLIHQSITGLYETRIDLSQLGGDGGEAAAKGGGGSSGGTLQLDDEYRLYSPLVKPDQNIQFWLEQFPQAWAETAGMGLAKQVPPQVIQLKASATPVSVRQYPLSKEAQEGIRPHVQRLIQQGILVPVQSPWNTPLLPVRKPGTNDYRPVQDLREVNKRVQDIHPTVPNPYNLLCALPPQRSWYTVLDLKDAFFCLRLHPTSQPLFAFEWRDPGTGRTGQLTWTRLPQGFKNSPTIFNEALHRDLANFRIQHPQVTLLQYVDDLLLAGATKQDCLEGTKALLLELSDLGYRASAKKAQICRREVTYLGYSLRDGQRWLTEARKKTVVQIPAPTTAKQVREFLGTAGFCRLWIPGFATLAAPLYPLTKPKGEFSWAPEHQKAFDAIKKALLSAPALALPDVTKPFTLYVDERKGVARGVLTQTLGPWRRPVAYLSKKLDPVASGWPVCLKAIAAVAILVKDADKLTLGQNITVIAPHALENIVRQPPDRWMTNARMTHYQSLLLTERVTFAPPAALNPATLLPEETDEPVTHDCHQLLIEETGVRKDLTDIPLTGEVLTWFTDGSSYVVEGKRMAGAAVVDGTRTIWASSLPEGTSAQKAELMALTQALRLAEGKSINIYTDSRYAFATAHVHGAIYKQRGWLTSAGREIKNKEEILSLLEALHLPKRLAIIHCPGHQKAKDPISRGNQMADRVAKQAAQGVNLLAGKRTADGSEFEKRTADGSEFESPKKKAKVE

SEQ ID NO: 147 - protein, 2084 aa, synthetic construct
MPAAKRVKLDGGDKKYSIGLDIGTNSVGWAVITDEYKVPSKKFKVLGNTDRHSIKKNLIGALLFDSGETAEATRLKRTARRRYTRRKNRICYLQEIFSNEMAKVDDSFFHRLEESFLVEEDKKHERHPIFGNIVDEVAYHEKYPTIYHLRKKLVDSTDKADLRLIYLALAHMIKFRGHFLIEGDLNPDNSDVDKLFIQLVQTYNQLFEENPINASGVDAKAILSARLSKSRRLENLIAQLPGEKKNGLFGNLIALSLGLTPNFKSNFDLAEDAKLQLSKDTYDDDLDNLLAQIGDQYADLFLAAKNLSDAILLSDILRVNTEITKAPLSASMIKRYDEHHQDLTLLKALVRQQLPEKYKEIFFDQSKNGYAGYIDGGASQEEFYKFIKPILEKMDGTEELLVKLNREDLLRKQRTFDNGSIPHQIHLGELHAILRRQEDFYPFLKDNREKIEKILTFRIPYYVGPLARGNSRFAWMTRKSEETITPWNFEEVVDKGASAQSFIERMTNFDKNLPNEKVLPKHSLLYEYFTVYNELTKVKYVTEGMRKPAFLSGEQKKAIVDLLFKTNRKVTVKQLKEDYFKKIECFDSVEISGVEDRFNASLGTYHDLLKIIKDKDFLDNEENEDILEDIVLTLTLFEDREMIEERLKTYAHLFDDKVMKQLKRRRYTGWGRLSRKLINGIRDKQSGKTILDFLKSDGFANRNFMQLIHDDSLTFKEDIQKAQVSGQGDSLHEHIANLAGSPAIKKGILQTVKVVDELVKVMGRHKPENIVIEMARENQTTQKGQKNSRERMKRIEEGIKELGSQILKEHPVENTQLQNEKLYLYYLQNGRDMYVDQELDINRLSDYDVDHIVPQSFLKDDSIDNKVLTRSDKARGKSDNVPSEEVVKKMKNYWRQLLNAKLITQRKFDNLTKAERGGLSELDKAGFIKRQLVETRQITKHVAQILDSRMNTKYDENDKLIREVKVITLKSKLVSDFRKDFQFYKVREINNYHHAHDAYLNAVVGTALIKKYPKLESEFVYGDYKVYDVRKMIAKSEQEIGKATAKYFFYSNIMNFFKTEITLANGEIRKRPLIETNGETGEIVWDKGRDFATVRKVLSMPQVNIVKKTEVQTGGFSKESILPKRNSDKLIARKKDWDPKKYGGFDSPTVAYSVLVVAKVEKGKSKKLKSVKELLGITIMERSSFEKNPIDFLEAKGYKEVKKDLIIKLPKYSLFELENGRKRMLASAGELQKGNELALPSKYVNFLYLASHYEKLKGSPEDNEQKQLFVEQHKHYLDEIIEQISEFSKRVILADANLDKVLSAYNKHRDKPIREQAENIIHLFTLTNLGAPAAFKYFDTTIDRKRYTSTKEVLDATLIHQSITGLYETRIDLSQLGGDGGGGGGSGGTLQLDDEYRLYSPLVKPDQNIQFWLEQFPQAWAETAGMGLAKQVPPQVIQLKASATPVSVRQYPLSKEAQEGIRPHVQRLIQQGILVPVQSPWNTPLLPVRKPGTNDYRPVQDLREVNKRVQDIHPTVPNPYNLLCALPPQRSWYTVLDLKDAFFCLRLHPTSQPLFAFEWRDPGTGRTGQLTWTRLPQGFKNSPTIFNEALHRDLANFRIQHPQVTLLQYVDDLLLAGATKQDCLEGTKALLLELSDLGYRASAKKAQICRREVTYLGYSLRDGQRWLTEARKKTVVQIPAPTTAKQVREFLGTAGFCRLWIPGFATLAAPLYPLTKPKGEFSWAPEHQKAFDAIKKALLSAPALALPDVTKPFTLYVDERKGVARGVLTQTLGPWRRPVAYLSKKLDPVASGWPVCLKAIAAVAILVKDADKLTLGQNITVIAPHALENIVRQPPDRWMTNARMTHYQSLLLTERVTFAPPAALNPATLLPEETDEPVTHDCHQLLIEETGVRKDLTDIPLTGEVLTWFTDGSSYVVEGKRMAGAAVVDGTRTIWASSLPEGTSAQKAELMALTQALRLAEGKSINIYTDSRYAFATAHVHGAIYKQRGWLTSAGREIKNKEEILSLLEALHLPKRLAIIHCPGHQKAKDPISRGNQMADRVAKQAAQGVNLLAGKRTADGSEFEKRTADGSEFESPKKKAKVE

SEQ ID NO: 148 - protein, 2085 aa, synthetic construct
MPAAKRVKLDGGDKKYSIGLDIGTNSVGWAVITDEYKVPSKKFKVLGNTDRHSIKKNLIGALLFDSGETAEATRLKRTARRRYTRRKNRICYLQEIFSNEMAKVDDSFFHRLEESFLVEEDKKHERHPIFGNIVDEVAYHEKYPTIYHLRKKLVDSTDKADLRLIYLALAHMIKFRGHFLIEGDLNPDNSDVDKLFIQLVQTYNQLFEENPINASGVDAKAILSARLSKSRRLENLIAQLPGEKKNGLFGNLIALSLGLTPNFKSNFDLAEDAKLQLSKDTYDDDLDNLLAQIGDQYADLFLAAKNLSDAILLSDILRVNTEITKAPLSASMIKRYDEHHQDLTLLKALVRQQLPEKYKEIFFDQSKNGYAGYIDGGASQEEFYKFIKPILEKMDGTEELLVKLNREDLLRKQRTFDNGSIPHQIHLGELHAILRRQEDFYPFLKDNREKIEKILTFRIPYYVGPLARGNSRFAWMTRKSEETITPWNFEEVVDKGASAQSFIERMTNFDKNLPNEKVLPKHSLLYEYFTVYNELTKVKYVTEGMRKPAFLSGEQKKAIVDLLFKTNRKVTVKQLKEDYFKKIECFDSVEISGVEDRFNASLGTYHDLLKIIKDKDFLDNEENEDILEDIVLTLTLFEDREMIEERLKTYAHLFDDKVMKQLKRRRYTGWGRLSRKLINGIRDKQSGKTILDFLKSDGFANRNFMQLIHDDSLTFKEDIQKAQVSGQGDSLHEHIANLAGSPAIKKGILQTVKVVDELVKVMGRHKPENIVIEMARENQTTQKGQKNSRERMKRIEEGIKELGSQILKEHPVENTQLQNEKLYLYYLQNGRDMYVDQELDINRLSDYDVDHIVPQSFLKDDSIDNKVLTRSDKARGKSDNVPSEEVVKKMKNYWRQLLNAKLITQRKFDNLTKAERGGLSELDKAGFIKRQLVETRQITKHVAQILDSRMNTKYDENDKLIREVKVITLKSKLVSDFRKDFQFYKVREINNYHHAHDAYLNAVVGTALIKKYPKLESEFVYGDYKVYDVRKMIAKSEQEIGKATAKYFFYSNIMNFFKTEITLANGEIRKRPLIETNGETGEIVWDKGRDFATVRKVLSMPQVNIVKKTEVQTGGFSKESILPKRNSDKLIARKKDWDPKKYGGFDSPTVAYSVLVVAKVEKGKSKKLKSVKELLGITIMERSSFEKNPIDFLEAKGYKEVKKDLIIKLPKYSLFELENGRKRMLASAGELQKGNELALPSKYVNFLYLASHYEKLKGSPEDNEQKQLFVEQHKHYLDEIIEQISEFSKRVILADANLDKVLSAYNKHRDKPIREQAENIIHLFTLTNLGAPAAFKYFDTTIDRKRYTSTKEVLDATLIHQSITGLYETRIDLSQLGGDGGGSSPAPGGTLQLDDEYRLYSPLVKPDQNIQFWLEQFPQAWAETAGMGLAKQVPPQVIQLKASATPVSVRQYPLSKEAQEGIRPHVQRLIQQGILVPVQSPWNTPLLPVRKPGTNDYRPVQDLREVNKRVQDIHPTVPNPYNLLCALPPQRSWYTVLDLKDAFFCLRLHPTSQPLFAFEWRDPGTGRTGQLTWTRLPQGFKNSPTIFNEALHRDLANFRIQHPQVTLLQYVDDLLLAGATKQDCLEGTKALLLELSDLGYRASAKKAQICRREVTYLGYSLRDGQRWLTEARKKTVVQIPAPTTAKQVREFLGTAGFCRLWIPGFATLAAPLYPLTKPKGEFSWAPEHQKAFDAIKKALLSAPALALPDVTKPFTLYVDERKGVARGVLTQTLGPWRRPVAYLSKKLDPVASGWPVCLKAIAAVAILVKDADKLTLGQNITVIAPHALENIVRQPPDRWMTNARMTHYQSLLLTERVTFAPPAALNPATLLPEETDEPVTHDCHQLLIEETGVRKDLTDIPLTGEVLTWFTDGSSYVVEGKRMAGAAVVDGTRTIWASSLPEGTSAQKAELMALTQALRLAEGKSINIYTDSRYAFATAHVHGAIYKQRGWLTSAGREIKNKEEILSLLEALHLPKRLAIIHCPGHQKAKDPISRGNQMADRVAKQAAQGVNLLAGKRTADGSEFEKRTADGSEFESPKKKAKVE

SEQ ID NO: 149 - protein, 2083 aa, synthetic construct
MPAAKRVKLDGGDKKYSIGLDIGTNSVGWAVITDEYKVPSKKFKVLGNTDRHSIKKNLIGALLFDSGETAEATRLKRTARRRYTRRKNRICYLQEIFSNEMAKVDDSFFHRLEESFLVEEDKKHERHPIFGNIVDEVAYHEKYPTIYHLRKKLVDSTDKADLRLIYLALAHMIKFRGHFLIEGDLNPDNSDVDKLFIQLVQTYNQLFEENPINASGVDAKAILSARLSKSRRLENLIAQLPGEKKNGLFGNLIALSLGLTPNFKSNFDLAEDAKLQLSKDTYDDDLDNLLAQIGDQYADLFLAAKNLSDAILLSDILRVNTEITKAPLSASMIKRYDEHHQDLTLLKALVRQQLPEKYKEIFFDQSKNGYAGYIDGGASQEEFYKFIKPILEKMDGTEELLVKLNREDLLRKQRTFDNGSIPHQIHLGELHAILRRQEDFYPFLKDNREKIEKILTFRIPYYVGPLARGNSRFAWMTRKSEETITPWNFEEVVDKGASAQSFIERMTNFDKNLPNEKVLPKHSLLYEYFTVYNELTKVKYVTEGMRKPAFLSGEQKKAIVDLLFKTNRKVTVKQLKEDYFKKIECFDSVEISGVEDRFNASLGTYHDLLKIIKDKDFLDNEENEDILEDIVLTLTLFEDREMIEERLKTYAHLFDDKVMKQLKRRRYTGWGRLSRKLINGIRDKQSGKTILDFLKSDGFANRNFMQLIHDDSLTFKEDIQKAQVSGQGDSLHEHIANLAGSPAIKKGILQTVKVVDELVKVMGRHKPENIVIEMARENQTTQKGQKNSRERMKRIEEGIKELGSQILKEHPVENTQLQNEKLYLYYLQNGRDMYVDQELDINRLSDYDVDHIVPQSFLKDDSIDNKVLTRSDKARGKSDNVPSEEVVKKMKNYWRQLLNAKLITQRKFDNLTKAERGGLSELDKAGFIKRQLVETRQITKHVAQILDSRMNTKYDENDKLIREVKVITLKSKLVSDFRKDFQFYKVREINNYHHAHDAYLNAVVGTALIKKYPKLESEFVYGDYKVYDVRKMIAKSEQEIGKATAKYFFYSNIMNFFKTEITLANGEIRKRPLIETNGETGEIVWDKGRDFATVRKVLSMPQVNIVKKTEVQTGGFSKESILPKRNSDKLIARKKDWDPKKYGGFDSPTVAYSVLVVAKVEKGKSKKLKSVKELLGITIMERSSFEKNPIDFLEAKGYKEVKKDLIIKLPKYSLFELENGRKRMLASAGELQKGNELALPSKYVNFLYLASHYEKLKGSPEDNEQKQLFVEQHKHYLDEIIEQISEFSKRVILADANLDKVLSAYNKHRDKPIREQAENIIHLFTLTNLGAPAAFKYFDTTIDRKRYTSTKEVLDATLIHQSITGLYETRIDLSQLGGDGGGGGGGGTLQLDDEYRLYSPLVKPDQNIQFWLEQFPQAWAETAGMGLAKQVPPQVIQLKASATPVSVRQYPLSKEAQEGIRPHVQRLIQQGILVPVQSPWNTPLLPVRKPGTNDYRPVQDLREVNKRVQDIHPTVPNPYNLLCALPPQRSWYTVLDLKDAFFCLRLHPTSQPLFAFEWRDPGTGRTGQLTWTRLPQGFKNSPTIFNEALHRDLANFRIQHPQVTLLQYVDDLLLAGATKQDCLEGTKALLLELSDLGYRASAKKAQICRREVTYLGYSLRDGQRWLTEARKKTVVQIPAPTTAKQVREFLGTAGFCRLWIPGFATLAAPLYPLTKPKGEFSWAPEHQKAFDAIKKALLSAPALALPDVTKPFTLYVDERKGVARGVLTQTLGPWRRPVAYLSKKLDPVASGWPVCLKAIAAVAILVKDADKLTLGQNITVIAPHALENIVRQPPDRWMTNARMTHYQSLLLTERVTFAPPAALNPATLLPEETDEPVTHDCHQLLIEETGVRKDLTDIPLTGEVLTWFTDGSSYVVEGKRMAGAAVVDGTRTIWASSLPEGTSAQKAELMALTQALRLAEGKSINIYTDSRYAFATAHVHGAIYKQRGWLTSAGREIKNKEEILSLLEALHLPKRLAIIHCPGHQKAKDPISRGNQMADRVAKQAAQGVNLLAGKRTADGSEFEKRTADGSEFESPKKKAKVE

SEQ ID NO: 150 - protein, 2104 aa, synthetic construct
MPAAKRVKLDGGDKKYSIGLDIGTNSVGWAVITDEYKVPSKKFKVLGNTDRHSIKKNLIGALLFDSGETAEATRLKRTARRRYTRRKNRICYLQEIFSNEMAKVDDSFFHRLEESFLVEEDKKHERHPIFGNIVDEVAYHEKYPTIYHLRKKLVDSTDKADLRLIYLALAHMIKFRGHFLIEGDLNPDNSDVDKLFIQLVQTYNQLFEENPINASGVDAKAILSARLSKSRRLENLIAQLPGEKKNGLFGNLIALSLGLTPNFKSNFDLAEDAKLQLSKDTYDDDLDNLLAQIGDQYADLFLAAKNLSDAILLSDILRVNTEITKAPLSASMIKRYDEHHQDLTLLKALVRQQLPEKYKEIFFDQSKNGYAGYIDGGASQEEFYKFIKPILEKMDGTEELLVKLNREDLLRKQRTFDNGSIPHQIHLGELHAILRRQEDFYPFLKDNREKIEKILTFRIPYYVGPLARGNSRFAWMTRKSEETITPWNFEEVVDKGASAQSFIERMTNFDKNLPNEKVLPKHSLLYEYFTVYNELTKVKYVTEGMRKPAFLSGEQKKAIVDLLFKTNRKVTVKQLKEDYFKKIECFDSVEISGVEDRFNASLGTYHDLLKIIKDKDFLDNEENEDILEDIVLTLTLFEDREMIEERLKTYAHLFDDKVMKQLKRRRYTGWGRLSRKLINGIRDKQSGKTILDFLKSDGFANRNFMQLIHDDSLTFKEDIQKAQVSGQGDSLHEHIANLAGSPAIKKGILQTVKVVDELVKVMGRHKPENIVIEMARENQTTQKGQKNSRERMKRIEEGIKELGSQILKEHPVENTQLQNEKLYLYYLQNGRDMYVDQELDINRLSDYDVDHIVPQSFLKDDSIDNKVLTRSDKARGKSDNVPSEEVVKKMKNYWRQLLNAKLITQRKFDNLTKAERGGLSELDKAGFIKRQLVETRQITKHVAQILDSRMNTKYDENDKLIREVKVITLKSKLVSDFRKDFQFYKVREINNYHHAHDAYLNAVVGTALIKKYPKLESEFVYGDYKVYDVRKMIAKSEQEIGKATAKYFFYSNIMNFFKTEITLANGEIRKRPLIETNGETGEIVWDKGRDFATVRKVLSMPQVNIVKKTEVQTGGFSKESILPKRNSDKLIARKKDWDPKKYGGFDSPTVAYSVLVVAKVEKGKSKKLKSVKELLGITIMERSSFEKNPIDFLEAKGYKEVKKDLIIKLPKYSLFELENGRKRMLASAGELQKGNELALPSKYVNFLYLASHYEKLKGSPEDNEQKQLFVEQHKHYLDEIIEQISEFSKRVILADANLDKVLSAYNKHRDKPIREQAENIIHLFTLTNLGAPAAFKYFDTTIDRKRYTSTKEVLDATLIHQSITGLYETRIDLSQLGGDGGEAAAKEAAAKEAAAKEAAAKEAAAKGGTLQLDDEYRLYSPLVKPDQNIQFWLEQFPQAWAETAGMGLAKQVPPQVIQLKASATPVSVRQYPLSKEAQEGIRPHVQRLIQQGILVPVQSPWNTPLLPVRKPGTNDYRPVQDLREVNKRVQDIHPTVPNPYNLLCALPPQRSWYTVLDLKDAFFCLRLHPTSQPLFAFEWRDPGTGRTGQLTWTRLPQGFKNSPTIFNEALHRDLANFRIQHPQVTLLQYVDDLLLAGATKQDCLEGTKALLLELSDLGYRASAKKAQICRREVTYLGYSLRDGQRWLTEARKKTVVQIPAPTTAKQVREFLGTAGFCRLWIPGFATLAAPLYPLTKPKGEFSWAPEHQKAFDAIKKALLSAPALALPDVTKPFTLYVDERKGVARGVLTQTLGPWRRPVAYLSKKLDPVASGWPVCLKAIAAVAILVKDADKLTLGQNITVIAPHALENIVRQPPDRWMTNARMTHYQSLLLTERVTFAPPAALNPATLLPEETDEPVTHDCHQLLIEETGVRKDLTDIPLTGEVLTWFTDGSSYVVEGKRMAGAAVVDGTRTIWASSLPEGTSAQKAELMALTQALRLAEGKSINIYTDSRYAFATAHVHGAIYKQRGWLTSAGREIKNKEEILSLLEALHLPKRLAIIHCPGHQKAKDPISRGNQMADRVAKQAAQGVNLLAGKRTADGSEFEKRTADGSEFESPKKKAKVE

SEQ ID NO: 151 - protein, 2084 aa, synthetic construct
MPAAKRVKLDGGDKKYSIGLDIGTNSVGWAVITDEYKVPSKKFKVLGNTDRHSIKKNLIGALLFDSGETAEATRLKRTARRRYTRRKNRICYLQEIFSNEMAKVDDSFFHRLEESFLVEEDKKHERHPIFGNIVDEVAYHEKYPTIYHLRKKLVDSTDKADLRLIYLALAHMIKFRGHFLIEGDLNPDNSDVDKLFIQLVQTYNQLFEENPINASGVDAKAILSARLSKSRRLENLIAQLPGEKKNGLFGNLIALSLGLTPNFKSNFDLAEDAKLQLSKDTYDDDLDNLLAQIGDQYADLFLAAKNLSDAILLSDILRVNTEITKAPLSASMIKRYDEHHQDLTLLKALVRQQLPEKYKEIFFDQSKNGYAGYIDGGASQEEFYKFIKPILEKMDGTEELLVKLNREDLLRKQRTFDNGSIPHQIHLGELHAILRRQEDFYPFLKDNREKIEKILTFRIPYYVGPLARGNSRFAWMTRKSEETITPWNFEEVVDKGASAQSFIERMTNFDKNLPNEKVLPKHSLLYEYFTVYNELTKVKYVTEGMRKPAFLSGEQKKAIVDLLFKTNRKVTVKQLKEDYFKKIECFDSVEISGVEDRFNASLGTYHDLLKIIKDKDFLDNEENEDILEDIVLTLTLFEDREMIEERLKTYAHLFDDKVMKQLKRRRYTGWGRLSRKLINGIRDKQSGKTILDFLKSDGFANRNFMQLIHDDSLTFKEDIQKAQVSGQGDSLHEHIANLAGSPAIKKGILQTVKVVDELVKVMGRHKPENIVIEMARENQTTQKGQKNSRERMKRIEEGIKELGSQILKEHPVENTQLQNEKLYLYYLQNGRDMYVDQELDINRLSDYDVDHIVPQSFLKDDSIDNKVLTRSDKARGKSDNVPSEEVVKKMKNYWRQLLNAKLITQRKFDNLTKAERGGLSELDKAGFIKRQLVETRQITKHVAQILDSRMNTKYDENDKLIREVKVITLKSKLVSDFRKDFQFYKVREINNYHHAHDAYLNAVVGTALIKKYPKLESEFVYGDYKVYDVRKMIAKSEQEIGKATAKYFFYSNIMNFFKTEITLANGEIRKRPLIETNGETGEIVWDKGRDFATVRKVLSMPQVNIVKKTEVQTGGFSKESILPKRNSDKLIARKKDWDPKKYGGFDSPTVAYSVLVVAKVEKGKSKKLKSVKELLGITIMERSSFEKNPIDFLEAKGYKEVKKDLIIKLPKYSLFELENGRKRMLASAGELQKGNELALPSKYVNFLYLASHYEKLKGSPEDNEQKQLFVEQHKHYLDEIIEQISEFSKRVILADANLDKVLSAYNKHRDKPIREQAENIIHLFTLTNLGAPAAFKYFDTTIDRKRYTSTKEVLDATLIHQSITGLYETRIDLSQLGGDGGEAAAKGGTLQLDDEYRLYSPLVKPDQNIQFWLEQFPQAWAETAGMGLAKQVPPQVIQLKASATPVSVRQYPLSKEAQEGIRPHVQRLIQQGILVPVQSPWNTPLLPVRKPGTNDYRPVQDLREVNKRVQDIHPTVPNPYNLLCALPPQRSWYTVLDLKDAFFCLRLHPTSQPLFAFEWRDPGTGRTGQLTWTRLPQGFKNSPTIFNEALHRDLANFRIQHPQVTLLQYVDDLLLAGATKQDCLEGTKALLLELSDLGYRASAKKAQICRREVTYLGYSLRDGQRWLTEARKKTVVQIPAPTTAKQVREFLGTAGFCRLWIPGFATLAAPLYPLTKPKGEFSWAPEHQKAFDAIKKALLSAPALALPDVTKPFTLYVDERKGVARGVLTQTLGPWRRPVAYLSKKLDPVASGWPVCLKAIAAVAILVKDADKLTLGQNITVIAPHALENIVRQPPDRWMTNARMTHYQSLLLTERVTFAPPAALNPATLLPEETDEPVTHDCHQLLIEETGVRKDLTDIPLTGEVLTWFTDGSSYVVEGKRMAGAAVVDGTRTIWASSLPEGTSAQKAELMALTQALRLAEGKSINIYTDSRYAFATAHVHGAIYKQRGWLTSAGREIKNKEEILSLLEALHLPKRLAIIHCPGHQKAKDPISRGNQMADRVAKQAAQGVNLLAGKRTADGSEFEKRTADGSEFESPKKKAKVE

SEQ ID NO: 152 - protein, 2086 aa, synthetic construct
MPAAKRVKLDGGDKKYSIGLDIGTNSVGWAVITDEYKVPSKKFKVLGNTDRHSIKKNLIGALLFDSGETAEATRLKRTARRRYTRRKNRICYLQEIFSNEMAKVDDSFFHRLEESFLVEEDKKHERHPIFGNIVDEVAYHEKYPTIYHLRKKLVDSTDKADLRLIYLALAHMIKFRGHFLIEGDLNPDNSDVDKLFIQLVQTYNQLFEENPINASGVDAKAILSARLSKSRRLENLIAQLPGEKKNGLFGNLIALSLGLTPNFKSNFDLAEDAKLQLSKDTYDDDLDNLLAQIGDQYADLFLAAKNLSDAILLSDILRVNTEITKAPLSASMIKRYDEHHQDLTLLKALVRQQLPEKYKEIFFDQSKNGYAGYIDGGASQEEFYKFIKPILEKMDGTEELLVKLNREDLLRKQRTFDNGSIPHQIHLGELHAILRRQEDFYPFLKDNREKIEKILTFRIPYYVGPLARGNSRFAWMTRKSEETITPWNFEEVVDKGASAQSFIERMTNFDKNLPNEKVLPKHSLLYEYFTVYNELTKVKYVTEGMRKPAFLSGEQKKAIVDLLFKTNRKVTVKQLKEDYFKKIECFDSVEISGVEDRFNASLGTYHDLLKIIKDKDFLDNEENEDILEDIVLTLTLFEDREMIEERLKTYAHLFDDKVMKQLKRRRYTGWGRLSRKLINGIRDKQSGKTILDFLKSDGFANRNFMQLIHDDSLTFKEDIQKAQVSGQGDSLHEHIANLAGSPAIKKGILQTVKVVDELVKVMGRHKPENIVIEMARENQTTQKGQKNSRERMKRIEEGIKELGSQILKEHPVENTQLQNEKLYLYYLQNGRDMYVDQELDINRLSDYDVDHIVPQSFLKDDSIDNKVLTRSDKARGKSDNVPSEEVVKKMKNYWRQLLNAKLITQRKFDNLTKAERGGLSELDKAGFIKRQLVETRQITKHVAQILDSRMNTKYDENDKLIREVKVITLKSKLVSDFRKDFQFYKVREINNYHHAHDAYLNAVVGTALIKKYPKLESEFVYGDYKVYDVRKMIAKSEQEIGKATAKYFFYSNIMNFFKTEITLANGEIRKRPLIETNGETGEIVWDKGRDFATVRKVLSMPQVNIVKKTEVQTGGFSKESILPKRNSDKLIARKKDWDPKKYGGFDSPTVAYSVLVVAKVEKGKSKKLKSVKELLGITIMERSSFEKNPIDFLEAKGYKEVKKDLIIKLPKYSLFELENGRKRMLASAGELQKGNELALPSKYVNFLYLASHYEKLKGSPEDNEQKQLFVEQHKHYLDEIIEQISEFSKRVILADANLDKVLSAYNKHRDKPIREQAENIIHLFTLTNLGAPAAFKYFDTTIDRKRYTSTKEVLDATLIHQSITGLYETRIDLSQLGGDGGGGGGGGGGGTLQLDDEYRLYSPLVKPDQNIQFWLEQFPQAWAETAGMGLAKQVPPQVIQLKASATPVSVRQYPLSKEAQEGIRPHVQRLIQQGILVPVQSPWNTPLLPVRKPGTNDYRPVQDLREVNKRVQDIHPTVPNPYNLLCALPPQRSWYTVLDLKDAFFCLRLHPTSQPLFAFEWRDPGTGRTGQLTWTRLPQGFKNSPTIFNEALHRDLANFRIQHPQVTLLQYVDDLLLAGATKQDCLEGTKALLLELSDLGYRASAKKAQICRREVTYLGYSLRDGQRWLTEARKKTVVQIPAPTTAKQVREFLGTAGFCRLWIPGFATLAAPLYPLTKPKGEFSWAPEHQKAFDAIKKALLSAPALALPDVTKPFTLYVDERKGVARGVLTQTLGPWRRPVAYLSKKLDPVASGWPVCLKAIAAVAILVKDADKLTLGQNITVIAPHALENIVRQPPDRWMTNARMTHYQSLLLTERVTFAPPAALNPATLLPEETDEPVTHDCHQLLIEETGVRKDLTDIPLTGEVLTWFTDGSSYVVEGKRMAGAAVVDGTRTIWASSLPEGTSAQKAELMALTQALRLAEGKSINIYTDSRYAFATAHVHGAIYKQRGWLTSAGREIKNKEEILSLLEALHLPKRLAIIHCPGHQKAKDPISRGNQMADRVAKQAAQGVNLLAGKRTADGSEFEKRTADGSEFESPKKKAKVE

SEQ ID NO: 153 - protein, 2091 aa, synthetic construct
MPAAKRVKLDGGDKKYSIGLDIGTNSVGWAVITDEYKVPSKKFKVLGNTDRHSIKKNLIGALLFDSGETAEATRLKRTARRRYTRRKNRICYLQEIFSNEMAKVDDSFFHRLEESFLVEEDKKHERHPIFGNIVDEVAYHEKYPTIYHLRKKLVDSTDKADLRLIYLALAHMIKFRGHFLIEGDLNPDNSDVDKLFIQLVQTYNQLFEENPINASGVDAKAILSARLSKSRRLENLIAQLPGEKKNGLFGNLIALSLGLTPNFKSNFDLAEDAKLQLSKDTYDDDLDNLLAQIGDQYADLFLAAKNLSDAILLSDILRVNTEITKAPLSASMIKRYDEHHQDLTLLKALVRQQLPEKYKEIFFDQSKNGYAGYIDGGASQEEFYKFIKPILEKMDGTEELLVKLNREDLLRKQRTFDNGSIPHQIHLGELHAILRRQEDFYPFLKDNREKIEKILTFRIPYYVGPLARGNSRFAWMTRKSEETITPWNFEEVVDKGASAQSFIERMTNFDKNLPNEKVLPKHSLLYEYFTVYNELTKVKYVTEGMRKPAFLSGEQKKAIVDLLFKTNRKVTVKQLKEDYFKKIECFDSVEISGVEDRFNASLGTYHDLLKIIKDKDFLDNEENEDILEDIVLTLTLFEDREMIEERLKTYAHLFDDKVMKQLKRRRYTGWGRLSRKLINGIRDKQSGKTILDFLKSDGFANRNFMQLIHDDSLTFKEDIQKAQVSGQGDSLHEHIANLAGSPAIKKGILQTVKVVDELVKVMGRHKPENIVIEMARENQTTQKGQKNSRERMKRIEEGIKELGSQILKEHPVENTQLQNEKLYLYYLQNGRDMYVDQELDINRLSDYDVDHIVPQSFLKDDSIDNKVLTRSDKARGKSDNVPSEEVVKKMKNYWRQLLNAKLITQRKFDNLTKAERGGLSELDKAGFIKRQLVETRQITKHVAQILDSRMNTKYDENDKLIREVKVITLKSKLVSDFRKDFQFYKVREINNYHHAHDAYLNAVVGTALIKKYPKLESEFVYGDYKVYDVRKMIAKSEQEIGKATAKYFFYSNIMNFFKTEITLANGEIRKRPLIETNGETGEIVWDKGRDFATVRKVLSMPQVNIVKKTEVQTGGFSKESILPKRNSDKLIARKKDWDPKKYGGFDSPTVAYSVLVVAKVEKGKSKKLKSVKELLGITIMERSSFEKNPIDFLEAKGYKEVKKDLIIKLPKYSLFELENGRKRMLASAGELQKGNELALPSKYVNFLYLASHYEKLKGSPEDNEQKQLFVEQHKHYLDEIIEQISEFSKRVILADANLDKVLSAYNKHRDKPIREQAENIIHLFTLTNLGAPAAFKYFDTTIDRKRYTSTKEVLDATLIHQSITGLYETRIDLSQLGGDGGGSAGSAAGSGEFGGTLQLDDEYRLYSPLVKPDQNIQFWLEQFPQAWAETAGMGLAKQVPPQVIQLKASATPVSVRQYPLSKEAQEGIRPHVQRLIQQGILVPVQSPWNTPLLPVRKPGTNDYRPVQDLREVNKRVQDIHPTVPNPYNLLCALPPQRSWYTVLDLKDAFFCLRLHPTSQPLFAFEWRDPGTGRTGQLTWTRLPQGFKNSPTIFNEALHRDLANFRIQHPQVTLLQYVDDLLLAGATKQDCLEGTKALLLELSDLGYRASAKKAQICRREVTYLGYSLRDGQRWLTEARKKTVVQIPAPTTAKQVREFLGTAGFCRLWIPGFATLAAPLYPLTKPKGEFSWAPEHQKAFDAIKKALLSAPALALPDVTKPFTLYVDERKGVARGVLTQTLGPWRRPVAYLSKKLDPVASGWPVCLKAIAAVAILVKDADKLTLGQNITVIAPHALENIVRQPPDRWMTNARMTHYQSLLLTERVTFAPPAALNPATLLPEETDEPVTHDCHQLLIEETGVRKDLTDIPLTGEVLTWFTDGSSYVVEGKRMAGAAVVDGTRTIWASSLPEGTSAQKAELMALTQALRLAEGKSINIYTDSRYAFATAHVHGAIYKQRGWLTSAGREIKNKEEILSLLEALHLPKRLAIIHCPGHQKAKDPISRGNQMADRVAKQAAQGVNLLAGKRTADGSEFEKRTADGSEFESPKKKAKVE

SEQ ID NO: 154 - protein, 2090 aa, synthetic construct
MPAAKRVKLDGGDKKYSIGLDIGTNSVGWAVITDEYKVPSKKFKVLGNTDRHSIKKNLIGALLFDSGETAEATRLKRTARRRYTRRKNRICYLQEIFSNEMAKVDDSFFHRLEESFLVEEDKKHERHPIFGNIVDEVAYHEKYPTIYHLRKKLVDSTDKADLRLIYLALAHMIKFRGHFLIEGDLNPDNSDVDKLFIQLVQTYNQLFEENPINASGVDAKAILSARLSKSRRLENLIAQLPGEKKNGLFGNLIALSLGLTPNFKSNFDLAEDAKLQLSKDTYDDDLDNLLAQIGDQYADLFLAAKNLSDAILLSDILRVNTEITKAPLSASMIKRYDEHHQDLTLLKALVRQQLPEKYKEIFFDQSKNGYAGYIDGGASQEEFYKFIKPILEKMDGTEELLVKLNREDLLRKQRTFDNGSIPHQIHLGELHAILRRQEDFYPFLKDNREKIEKILTFRIPYYVGPLARGNSRFAWMTRKSEETITPWNFEEVVDKGASAQSFIERMTNFDKNLPNEKVLPKHSLLYEYFTVYNELTKVKYVTEGMRKPAFLSGEQKKAIVDLLFKTNRKVTVKQLKEDYFKKIECFDSVEISGVEDRFNASLGTYHDLLKIIKDKDFLDNEENEDILEDIVLTLTLFEDREMIEERLKTYAHLFDDKVMKQLKRRRYTGWGRLSRKLINGIRDKQSGKTILDFLKSDGFANRNFMQLIHDDSLTFKEDIQKAQVSGQGDSLHEHIANLAGSPAIKKGILQTVKVVDELVKVMGRHKPENIVIEMARENQTTQKGQKNSRERMKRIEEGIKELGSQILKEHPVENTQLQNEKLYLYYLQNGRDMYVDQELDINRLSDYDVDHIVPQSFLKDDSIDNKVLTRSDKARGKSDNVPSEEVVKKMKNYWRQLLNAKLITQRKFDNLTKAERGGLSELDKAGFIKRQLVETRQITKHVAQILDSRMNTKYDENDKLIREVKVITLKSKLVSDFRKDFQFYKVREINNYHHAHDAYLNAVVGTALIKKYPKLESEFVYGDYKVYDVRKMIAKSEQEIGKATAKYFFYSNIMNFFKTEITLANGEIRKRPLIETNGETGEIVWDKGRDFATVRKVLSMPQVNIVKKTEVQTGGFSKESILPKRNSDKLIARKKDWDPKKYGGFDSPTVAYSVLVVAKVEKGKSKKLKSVKELLGITIMERSSFEKNPIDFLEAKGYKEVKKDLIIKLPKYSLFELENGRKRMLASAGELQKGNELALPSKYVNFLYLASHYEKLKGSPEDNEQKQLFVEQHKHYLDEIIEQISEFSKRVILADANLDKVLSAYNKHRDKPIREQAENIIHLFTLTNLGAPAAFKYFDTTIDRKRYTSTKEVLDATLIHQSITGLYETRIDLSQLGGDGGGGSEAAAKPAPGGTLQLDDEYRLYSPLVKPDQNIQFWLEQFPQAWAETAGMGLAKQVPPQVIQLKASATPVSVRQYPLSKEAQEGIRPHVQRLIQQGILVPVQSPWNTPLLPVRKPGTNDYRPVQDLREVNKRVQDIHPTVPNPYNLLCALPPQRSWYTVLDLKDAFFCLRLHPTSQPLFAFEWRDPGTGRTGQLTWTRLPQGFKNSPTIFNEALHRDLANFRIQHPQVTLLQYVDDLLLAGATKQDCLEGTKALLLELSDLGYRASAKKAQICRREVTYLGYSLRDGQRWLTEARKKTVVQIPAPTTAKQVREFLGTAGFCRLWIPGFATLAAPLYPLTKPKGEFSWAPEHQKAFDAIKKALLSAPALALPDVTKPFTLYVDERKGVARGVLTQTLGPWRRPVAYLSKKLDPVASGWPVCLKAIAAVAILVKDADKLTLGQNITVIAPHALENIVRQPPDRWMTNARMTHYQSLLLTERVTFAPPAALNPATLLPEETDEPVTHDCHQLLIEETGVRKDLTDIPLTGEVLTWFTDGSSYVVEGKRMAGAAVVDGTRTIWASSLPEGTSAQKAELMALTQALRLAEGKSINIYTDSRYAFATAHVHGAIYKQRGWLTSAGREIKNKEEILSLLEALHLPKRLAIIHCPGHQKAKDPISRGNQMADRVAKQAAQGVNLLAGKRTADGSEFEKRTADGSEFESPKKKAKVE

SEQ ID NO: 155 - protein, 2088 aa, synthetic construct
MPAAKRVKLDGGDKKYSIGLDIGTNSVGWAVITDEYKVPSKKFKVLGNTDRHSIKKNLIGALLFDSGETAEATRLKRTARRRYTRRKNRICYLQEIFSNEMAKVDDSFFHRLEESFLVEEDKKHERHPIFGNIVDEVAYHEKYPTIYHLRKKLVDSTDKADLRLIYLALAHMIKFRGHFLIEGDLNPDNSDVDKLFIQLVQTYNQLFEENPINASGVDAKAILSARLSKSRRLENLIAQLPGEKKNGLFGNLIALSLGLTPNFKSNFDLAEDAKLQLSKDTYDDDLDNLLAQIGDQYADLFLAAKNLSDAILLSDILRVNTEITKAPLSASMIKRYDEHHQDLTLLKALVRQQLPEKYKEIFFDQSKNGYAGYIDGGASQEEFYKFIKPILEKMDGTEELLVKLNREDLLRKQRTFDNGSIPHQIHLGELHAILRRQEDFYPFLKDNREKIEKILTFRIPYYVGPLARGNSRFAWMTRKSEETITPWNFEEVVDKGASAQSFIERMTNFDKNLPNEKVLPKHSLLYEYFTVYNELTKVKYVTEGMRKPAFLSGEQKKAIVDLLFKTNRKVTVKQLKEDYFKKIECFDSVEISGVEDRFNASLGTYHDLLKIIKDKDFLDNEENEDILEDIVLTLTLFEDREMIEERLKTYAHLFDDKVMKQLKRRRYTGWGRLSRKLINGIRDKQSGKTILDFLKSDGFANRNFMQLIHDDSLTFKEDIQKAQVSGQGDSLHEHIANLAGSPAIKKGILQTVKVVDELVKVMGRHKPENIVIEMARENQTTQKGQKNSRERMKRIEEGIKELGSQILKEHPVENTQLQNEKLYLYYLQNGRDMYVDQELDINRLSDYDVDHIVPQSFLKDDSIDNKVLTRSDKARGKSDNVPSEEVVKKMKNYWRQLLNAKLITQRKFDNLTKAERGGLSELDKAGFIKRQLVETRQITKHVAQILDSRMNTKYDENDKLIREVKVITLKSKLVSDFRKDFQFYKVREINNYHHAHDAYLNAVVGTALIKKYPKLESEFVYGDYKVYDVRKMIAKSEQEIGKATAKYFFYSNIMNFFKTEITLANGEIRKRPLIETNGETGEIVWDKGRDFATVRKVLSMPQVNIVKKTEVQTGGFSKESILPKRNSDKLIARKKDWDPKKYGGFDSPTVAYSVLVVAKVEKGKSKKLKSVKELLGITIMERSSFEKNPIDFLEAKGYKEVKKDLIIKLPKYSLFELENGRKRMLASAGELQKGNELALPSKYVNFLYLASHYEKLKGSPEDNEQKQLFVEQHKHYLDEIIEQISEFSKRVILADANLDKVLSAYNKHRDKPIREQAENIIHLFTLTNLGAPAAFKYFDTTIDRKRYTSTKEVLDATLIHQSITGLYETRIDLSQLGGDGGGGSGSSPAPGGTLQLDDEYRLYSPLVKPDQNIQFWLEQFPQAWAETAGMGLAKQVPPQVIQLKASATPVSVRQYPLSKEAQEGIRPHVQRLIQQGILVPVQSPWNTPLLPVRKPGTNDYRPVQDLREVNKRVQDIHPTVPNPYNLLCALPPQRSWYTVLDLKDAFFCLRLHPTSQPLFAFEWRDPGTGRTGQLTWTRLPQGFKNSPTIFNEALHRDLANFRIQHPQVTLLQYVDDLLLAGATKQDCLEGTKALLLELSDLGYRASAKKAQICRREVTYLGYSLRDGQRWLTEARKKTVVQIPAPTTAKQVREFLGTAGFCRLWIPGFATLAAPLYPLTKPKGEFSWAPEHQKAFDAIKKALLSAPALALPDVTKPFTLYVDERKGVARGVLTQTLGPWRRPVAYLSKKLDPVASGWPVCLKAIAAVAILVKDADKLTLGQNITVIAPHALENIVRQPPDRWMTNARMTHYQSLLLTERVTFAPPAALNPATLLPEETDEPVTHDCHQLLIEETGVRKDLTDIPLTGEVLTWFTDGSSYVVEGKRMAGAAVVDGTRTIWASSLPEGTSAQKAELMALTQALRLAEGKSINIYTDSRYAFATAHVHGAIYKQRGWLTSAGREIKNKEEILSLLEALHLPKRLAIIHCPGHQKAKDPISRGNQMADRVAKQAAQGVNLLAGKRTADGSEFEKRTADGSEFESPKKKAKVE

SEQ ID NO: 156 - protein, 2125 aa, synthetic construct
MPAAKRVKLDGGDKKYSIGLDIGTNSVGWAVITDEYKVPSKKFKVLGNTDRHSIKKNLIGALLFDSGETAEATRLKRTARRRYTRRKNRICYLQEIFSNEMAKVDDSFFHRLEESFLVEEDKKHERHPIFGNIVDEVAYHEKYPTIYHLRKKLVDSTDKADLRLIYLALAHMIKFRGHFLIEGDLNPDNSDVDKLFIQLVQTYNQLFEENPINASGVDAKAILSARLSKSRRLENLIAQLPGEKKNGLFGNLIALSLGLTPNFKSNFDLAEDAKLQLSKDTYDDDLDNLLAQIGDQYADLFLAAKNLSDAILLSDILRVNTEITKAPLSASMIKRYDEHHQDLTLLKALVRQQLPEKYKEIFFDQSKNGYAGYIDGGASQEEFYKFIKPILEKMDGTEELLVKLNREDLLRKQRTFDNGSIPHQIHLGELHAILRRQEDFYPFLKDNREKIEKILTFRIPYYVGPLARGNSRFAWMTRKSEETITPWNFEEVVDKGASAQSFIERMTNFDKNLPNEKVLPKHSLLYEYFTVYNELTKVKYVTEGMRKPAFLSGEQKKAIVDLLFKTNRKVTVKQLKEDYFKKIECFDSVEISGVEDRFNASLGTYHDLLKIIKDKDFLDNEENEDILEDIVLTLTLFEDREMIEERLKTYAHLFDDKVMKQLKRRRYTGWGRLSRKLINGIRDKQSGKTILDFLKSDGFANRNFMQLIHDDSLTFKEDIQKAQVSGQGDSLHEHIANLAGSPAIKKGILQTVKVVDELVKVMGRHKPENIVIEMARENQTTQKGQKNSRERMKRIEEGIKELGSQILKEHPVENTQLQNEKLYLYYLQNGRDMYVDQELDINRLSDYDVDHIVPQSFLKDDSIDNKVLTRSDKARGKSDNVPSEEVVKKMKNYWRQLLNAKLITQRKFDNLTKAERGGLSELDKAGFIKRQLVETRQITKHVAQILDSRMNTKYDENDKLIREVKVITLKSKLVSDFRKDFQFYKVREINNYHHAHDAYLNAVVGTALIKKYPKLESEFVYGDYKVYDVRKMIAKSEQEIGKATAKYFFYSNIMNFFKTEITLANGEIRKRPLIETNGETGEIVWDKGRDFATVRKVLSMPQVNIVKKTEVQTGGFSKESILPKRNSDKLIARKKDWDPKKYGGFDSPTVAYSVLVVAKVEKGKSKKLKSVKELLGITIMERSSFEKNPIDFLEAKGYKEVKKDLIIKLPKYSLFELENGRKRMLASAGELQKGNELALPSKYVNFLYLASHYEKLKGSPEDNEQKQLFVEQHKHYLDEIIEQISEFSKRVILADANLDKVLSAYNKHRDKPIREQAENIIHLFTLTNLGAPAAFKYFDTTIDRKRYTSTKEVLDATLIHQSITGLYETRIDLSQLGGDGGAEAAAKEAAAKEAAAKEAAAKALEAEAAAKEAAAKEAAAKEAAAKAGGTLQLDDEYRLYSPLVKPDQNIQFWLEQFPQAWAETAGMGLAKQVPPQVIQLKASATPVSVRQYPLSKEAQEGIRPHVQRLIQQGILVPVQSPWNTPLLPVRKPGTNDYRPVQDLREVNKRVQDIHPTVPNPYNLLCALPPQRSWYTVLDLKDAFFCLRLHPTSQPLFAFEWRDPGTGRTGQLTWTRLPQGFKNSPTIFNEALHRDLANFRIQHPQVTLLQYVDDLLLAGATKQDCLEGTKALLLELSDLGYRASAKKAQICRREVTYLGYSLRDGQRWLTEARKKTVVQIPAPTTAKQVREFLGTAGFCRLWIPGFATLAAPLYPLTKPKGEFSWAPEHQKAFDAIKKALLSAPALALPDVTKPFTLYVDERKGVARGVLTQTLGPWRRPVAYLSKKLDPVASGWPVCLKAIAAVAILVKDADKLTLGQNITVIAPHALENIVRQPPDRWMTNARMTHYQSLLLTERVTFAPPAALNPATLLPEETDEPVTHDCHQLLIEETGVRKDLTDIPLTGEVLTWFTDGSSYVVEGKRMAGAAVVDGTRTIWASSLPEGTSAQKAELMALTQALRLAEGKSINIYTDSRYAFATAHVHGAIYKQRGWLTSAGREIKNKEEILSLLEALHLPKRLAIIHCPGHQKAKDPISRGNQMADRVAKQAAQGVNLLAGKRTADGSEFEKRTADGSEFESPKKKAKVE

SEQ ID NO: 157 - protein, 2092 aa, synthetic construct
MPAAKRVKLDGGDKKYSIGLDIGTNSVGWAVITDEYKVPSKKFKVLGNTDRHSIKKNLIGALLFDSGETAEATRLKRTARRRYTRRKNRICYLQEIFSNEMAKVDDSFFHRLEESFLVEEDKKHERHPIFGNIVDEVAYHEKYPTIYHLRKKLVDSTDKADLRLIYLALAHMIKFRGHFLIEGDLNPDNSDVDKLFIQLVQTYNQLFEENPINASGVDAKAILSARLSKSRRLENLIAQLPGEKKNGLFGNLIALSLGLTPNFKSNFDLAEDAKLQLSKDTYDDDLDNLLAQIGDQYADLFLAAKNLSDAILLSDILRVNTEITKAPLSASMIKRYDEHHQDLTLLKALVRQQLPEKYKEIFFDQSKNGYAGYIDGGASQEEFYKFIKPILEKMDGTEELLVKLNREDLLRKQRTFDNGSIPHQIHLGELHAILRRQEDFYPFLKDNREKIEKILTFRIPYYVGPLARGNSRFAWMTRKSEETITPWNFEEVVDKGASAQSFIERMTNFDKNLPNEKVLPKHSLLYEYFTVYNELTKVKYVTEGMRKPAFLSGEQKKAIVDLLFKTNRKVTVKQLKEDYFKKIECFDSVEISGVEDRFNASLGTYHDLLKIIKDKDFLDNEENEDILEDIVLTLTLFEDREMIEERLKTYAHLFDDKVMKQLKRRRYTGWGRLSRKLINGIRDKQSGKTILDFLKSDGFANRNFMQLIHDDSLTFKEDIQKAQVSGQGDSLHEHIANLAGSPAIKKGILQTVKVVDELVKVMGRHKPENIVIEMARENQTTQKGQKNSRERMKRIEEGIKELGSQILKEHPVENTQLQNEKLYLYYLQNGRDMYVDQELDINRLSDYDVDHIVPQSFLKDDSIDNKVLTRSDKARGKSDNVPSEEVVKKMKNYWRQLLNAKLITQRKFDNLTKAERGGLSELDKAGFIKRQLVETRQITKHVAQILDSRMNTKYDENDKLIREVKVITLKSKLVSDFRKDFQFYKVREINNYHHAHDAYLNAVVGTALIKKYPKLESEFVYGDYKVYDVRKMIAKSEQEIGKATAKYFFYSNIMNFFKTEITLANGEIRKRPLIETNGETGEIVWDKGRDFATVRKVLSMPQVNIVKKTEVQTGGFSKESILPKRNSDKLIARKKDWDPKKYGGFDSPTVAYSVLVVAKVEKGKSKKLKSVKELLGITIMERSSFEKNPIDFLEAKGYKEVKKDLIIKLPKYSLFELENGRKRMLASAGELQKGNELALPSKYVNFLYLASHYEKLKGSPEDNEQKQLFVEQHKHYLDEIIEQISEFSKRVILADANLDKVLSAYNKHRDKPIREQAENIIHLFTLTNLGAPAAFKYFDTTIDRKRYTSTKEVLDATLIHQSITGLYETRIDLSQLGGDGGPAPAPAPAPAPAPGGTLQLDDEYRLYSPLVKPDQNIQFWLEQFPQAWAETAGMGLAKQVPPQVIQLKASATPVSVRQYPLSKEAQEGIRPHVQRLIQQGILVPVQSPWNTPLLPVRKPGTNDYRPVQDLREVNKRVQDIHPTVPNPYNLLCALPPQRSWYTVLDLKDAFFCLRLHPTSQPLFAFEWRDPGTGRTGQLTWTRLPQGFKNSPTIFNEALHRDLANFRIQHPQVTLLQYVDDLLLAGATKQDCLEGTKALLLELSDLGYRASAKKAQICRREVTYLGYSLRDGQRWLTEARKKTVVQIPAPTTAKQVREFLGTAGFCRLWIPGFATLAAPLYPLTKPKGEFSWAPEHQKAFDAIKKALLSAPALALPDVTKPFTLYVDERKGVARGVLTQTLGPWRRPVAYLSKKLDPVASGWPVCLKAIAAVAILVKDADKLTLGQNITVIAPHALENIVRQPPDRWMTNARMTHYQSLLLTERVTFAPPAALNPATLLPEETDEPVTHDCHQLLIEETGVRKDLTDIPLTGEVLTWFTDGSSYVVEGKRMAGAAVVDGTRTIWASSLPEGTSAQKAELMALTQALRLAEGKSINIYTDSRYAFATAHVHGAIYKQRGWLTSAGREIKNKEEILSLLEALHLPKRLAIIHCPGHQKAKDPISRGNQMADRVAKQAAQGVNLLAGKRTADGSEFEKRTADGSEFESPKKKAKVE

SEQ ID NO: 158 - protein, 2087 aa, synthetic construct
MPAAKRVKLDGGDKKYSIGLDIGTNSVGWAVITDEYKVPSKKFKVLGNTDRHSIKKNLIGALLFDSGETAEATRLKRTARRRYTRRKNRICYLQEIFSNEMAKVDDSFFHRLEESFLVEEDKKHERHPIFGNIVDEVAYHEKYPTIYHLRKKLVDSTDKADLRLIYLALAHMIKFRGHFLIEGDLNPDNSDVDKLFIQLVQTYNQLFEENPINASGVDAKAILSARLSKSRRLENLIAQLPGEKKNGLFGNLIALSLGLTPNFKSNFDLAEDAKLQLSKDTYDDDLDNLLAQIGDQYADLFLAAKNLSDAILLSDILRVNTEITKAPLSASMIKRYDEHHQDLTLLKALVRQQLPEKYKEIFFDQSKNGYAGYIDGGASQEEFYKFIKPILEKMDGTEELLVKLNREDLLRKQRTFDNGSIPHQIHLGELHAILRRQEDFYPFLKDNREKIEKILTFRIPYYVGPLARGNSRFAWMTRKSEETITPWNFEEVVDKGASAQSFIERMTNFDKNLPNEKVLPKHSLLYEYFTVYNELTKVKYVTEGMRKPAFLSGEQKKAIVDLLFKTNRKVTVKQLKEDYFKKIECFDSVEISGVEDRFNASLGTYHDLLKIIKDKDFLDNEENEDILEDIVLTLTLFEDREMIEERLKTYAHLFDDKVMKQLKRRRYTGWGRLSRKLINGIRDKQSGKTILDFLKSDGFANRNFMQLIHDDSLTFKEDIQKAQVSGQGDSLHEHIANLAGSPAIKKGILQTVKVVDELVKVMGRHKPENIVIEMARENQTTQKGQKNSRERMKRIEEGIKELGSQILKEHPVENTQLQNEKLYLYYLQNGRDMYVDQELDINRLSDYDVDHIVPQSFLKDDSIDNKVLTRSDKARGKSDNVPSEEVVKKMKNYWRQLLNAKLITQRKFDNLTKAERGGLSELDKAGFIKRQLVETRQITKHVAQILDSRMNTKYDENDKLIREVKVITLKSKLVSDFRKDFQFYKVREINNYHHAHDAYLNAVVGTALIKKYPKLESEFVYGDYKVYDVRKMIAKSEQEIGKATAKYFFYSNIMNFFKTEITLANGEIRKRPLIETNGETGEIVWDKGRDFATVRKVLSMPQVNIVKKTEVQTGGFSKESILPKRNSDKLIARKKDWDPKKYGGFDSPTVAYSVLVVAKVEKGKSKKLKSVKELLGITIMERSSFEKNPIDFLEAKGYKEVKKDLIIKLPKYSLFELENGRKRMLASAGELQKGNELALPSKYVNFLYLASHYEKLKGSPEDNEQKQLFVEQHKHYLDEIIEQISEFSKRVILADANLDKVLSAYNKHRDKPIREQAENIIHLFTLTNLGAPAAFKYFDTTIDRKRYTSTKEVLDATLIHQSITGLYETRIDLSQLGGDGGEAAAKGGSGGTLQLDDEYRLYSPLVKPDQNIQFWLEQFPQAWAETAGMGLAKQVPPQVIQLKASATPVSVRQYPLSKEAQEGIRPHVQRLIQQGILVPVQSPWNTPLLPVRKPGTNDYRPVQDLREVNKRVQDIHPTVPNPYNLLCALPPQRSWYTVLDLKDAFFCLRLHPTSQPLFAFEWRDPGTGRTGQLTWTRLPQGFKNSPTIFNEALHRDLANFRIQHPQVTLLQYVDDLLLAGATKQDCLEGTKALLLELSDLGYRASAKKAQICRREVTYLGYSLRDGQRWLTEARKKTVVQIPAPTTAKQVREFLGTAGFCRLWIPGFATLAAPLYPLTKPKGEFSWAPEHQKAFDAIKKALLSAPALALPDVTKPFTLYVDERKGVARGVLTQTLGPWRRPVAYLSKKLDPVASGWPVCLKAIAAVAILVKDADKLTLGQNITVIAPHALENIVRQPPDRWMTNARMTHYQSLLLTERVTFAPPAALNPATLLPEETDEPVTHDCHQLLIEETGVRKDLTDIPLTGEVLTWFTDGSSYVVEGKRMAGAAVVDGTRTIWASSLPEGTSAQKAELMALTQALRLAEGKSINIYTDSRYAFATAHVHGAIYKQRGWLTSAGREIKNKEEILSLLEALHLPKRLAIIHCPGHQKAKDPISRGNQMADRVAKQAAQGVNLLAGKRTADGSEFEKRTADGSEFESPKKKAKVE

SEQ ID NO: 159 - protein, 2094 aa, synthetic construct
MPAAKRVKLDGGDKKYSIGLDIGTNSVGWAVITDEYKVPSKKFKVLGNTDRHSIKKNLIGALLFDSGETAEATRLKRTARRRYTRRKNRICYLQEIFSNEMAKVDDSFFHRLEESFLVEEDKKHERHPIFGNIVDEVAYHEKYPTIYHLRKKLVDSTDKADLRLIYLALAHMIKFRGHFLIEGDLNPDNSDVDKLFIQLVQTYNQLFEENPINASGVDAKAILSARLSKSRRLENLIAQLPGEKKNGLFGNLIALSLGLTPNFKSNFDLAEDAKLQLSKDTYDDDLDNLLAQIGDQYADLFLAAKNLSDAILLSDILRVNTEITKAPLSASMIKRYDEHHQDLTLLKALVRQQLPEKYKEIFFDQSKNGYAGYIDGGASQEEFYKFIKPILEKMDGTEELLVKLNREDLLRKQRTFDNGSIPHQIHLGELHAILRRQEDFYPFLKDNREKIEKILTFRIPYYVGPLARGNSRFAWMTRKSEETITPWNFEEVVDKGASAQSFIERMTNFDKNLPNEKVLPKHSLLYEYFTVYNELTKVKYVTEGMRKPAFLSGEQKKAIVDLLFKTNRKVTVKQLKEDYFKKIECFDSVEISGVEDRFNASLGTYHDLLKIIKDKDFLDNEENEDILEDIVLTLTLFEDREMIEERLKTYAHLFDDKVMKQLKRRRYTGWGRLSRKLINGIRDKQSGKTILDFLKSDGFANRNFMQLIHDDSLTFKEDIQKAQVSGQGDSLHEHIANLAGSPAIKKGILQTVKVVDELVKVMGRHKPENIVIEMARENQTTQKGQKNSRERMKRIEEGIKELGSQILKEHPVENTQLQNEKLYLYYLQNGRDMYVDQELDINRLSDYDVDHIVPQSFLKDDSIDNKVLTRSDKARGKSDNVPSEEVVKKMKNYWRQLLNAKLITQRKFDNLTKAERGGLSELDKAGFIKRQLVETRQITKHVAQILDSRMNTKYDENDKLIREVKVITLKSKLVSDFRKDFQFYKVREINNYHHAHDAYLNAVVGTALIKKYPKLESEFVYGDYKVYDVRKMIAKSEQEIGKATAKYFFYSNIMNFFKTEITLANGEIRKRPLIETNGETGEIVWDKGRDFATVRKVLSMPQVNIVKKTEVQTGGFSKESILPKRNSDKLIARKKDWDPKKYGGFDSPTVAYSVLVVAKVEKGKSKKLKSVKELLGITIMERSSFEKNPIDFLEAKGYKEVKKDLIIKLPKYSLFELENGRKRMLASAGELQKGNELALPSKYVNFLYLASHYEKLKGSPEDNEQKQLFVEQHKHYLDEIIEQISEFSKRVILADANLDKVLSAYNKHRDKPIREQAENIIHLFTLTNLGAPAAFKYFDTTIDRKRYTSTKEVLDATLIHQSITGLYETRIDLSQLGGDGGGGGGSGGGGSGGGGSGGTLQLDDEYRLYSPLVKPDQNIQFWLEQFPQAWAETAGMGLAKQVPPQVIQLKASATPVSVRQYPLSKEAQEGIRPHVQRLIQQGILVPVQSPWNTPLLPVRKPGTNDYRPVQDLREVNKRVQDIHPTVPNPYNLLCALPPQRSWYTVLDLKDAFFCLRLHPTSQPLFAFEWRDPGTGRTGQLTWTRLPQGFKNSPTIFNEALHRDLANFRIQHPQVTLLQYVDDLLLAGATKQDCLEGTKALLLELSDLGYRASAKKAQICRREVTYLGYSLRDGQRWLTEARKKTVVQIPAPTTAKQVREFLGTAGFCRLWIPGFATLAAPLYPLTKPKGEFSWAPEHQKAFDAIKKALLSAPALALPDVTKPFTLYVDERKGVARGVLTQTLGPWRRPVAYLSKKLDPVASGWPVCLKAIAAVAILVKDADKLTLGQNITVIAPHALENIVRQPPDRWMTNARMTHYQSLLLTERVTFAPPAALNPATLLPEETDEPVTHDCHQLLIEETGVRKDLTDIPLTGEVLTWFTDGSSYVVEGKRMAGAAVVDGTRTIWASSLPEGTSAQKAELMALTQALRLAEGKSINIYTDSRYAFATAHVHGAIYKQRGWLTSAGREIKNKEEILSLLEALHLPKRLAIIHCPGHQKAKDPISRGNQMADRVAKQAAQGVNLLAGKRTADGSEFEKRTADGSEFESPKKKAKVE

SEQ ID NO: 160 - protein, 2090 aa, synthetic construct
MPAAKRVKLDGGDKKYSIGLDIGTNSVGWAVITDEYKVPSKKFKVLGNTDRHSIKKNLIGALLFDSGETAEATRLKRTARRRYTRRKNRICYLQEIFSNEMAKVDDSFFHRLEESFLVEEDKKHERHPIFGNIVDEVAYHEKYPTIYHLRKKLVDSTDKADLRLIYLALAHMIKFRGHFLIEGDLNPDNSDVDKLFIQLVQTYNQLFEENPINASGVDAKAILSARLSKSRRLENLIAQLPGEKKNGLFGNLIALSLGLTPNFKSNFDLAEDAKLQLSKDTYDDDLDNLLAQIGDQYADLFLAAKNLSDAILLSDILRVNTEITKAPLSASMIKRYDEHHQDLTLLKALVRQQLPEKYKEIFFDQSKNGYAGYIDGGASQEEFYKFIKPILEKMDGTEELLVKLNREDLLRKQRTFDNGSIPHQIHLGELHAILRRQEDFYPFLKDNREKIEKILTFRIPYYVGPLARGNSRFAWMTRKSEETITPWNFEEVVDKGASAQSFIERMTNFDKNLPNEKVLPKHSLLYEYFTVYNELTKVKYVTEGMRKPAFLSGEQKKAIVDLLFKTNRKVTVKQLKEDYFKKIECFDSVEISGVEDRFNASLGTYHDLLKIIKDKDFLDNEENEDILEDIVLTLTLFEDREMIEERLKTYAHLFDDKVMKQLKRRRYTGWGRLSRKLINGIRDKQSGKTILDFLKSDGFANRNFMQLIHDDSLTFKEDIQKAQVSGQGDSLHEHIANLAGSPAIKKGILQTVKVVDELVKVMGRHKPENIVIEMARENQTTQKGQKNSRERMKRIEEGIKELGSQILKEHPVENTQLQNEKLYLYYLQNGRDMYVDQELDINRLSDYDVDHIVPQSFLKDDSIDNKVLTRSDKARGKSDNVPSEEVVKKMKNYWRQLLNAKLITQRKFDNLTKAERGGLSELDKAGFIKRQLVETRQITKHVAQILDSRMNTKYDENDKLIREVKVITLKSKLVSDFRKDFQFYKVREINNYHHAHDAYLNAVVGTALIKKYPKLESEFVYGDYKVYDVRKMIAKSEQEIGKATAKYFFYSNIMNFFKTEITLANGEIRKRPLIETNGETGEIVWDKGRDFATVRKVLSMPQVNIVKKTEVQTGGFSKESILPKRNSDKLIARKKDWDPKKYGGFDSPTVAYSVLVVAKVEKGKSKKLKSVKELLGITIMERSSFEKNPIDFLEAKGYKEVKKDLIIKLPKYSLFELENGRKRMLASAGELQKGNELALPSKYVNFLYLASHYEKLKGSPEDNEQKQLFVEQHKHYLDEIIEQISEFSKRVILADANLDKVLSAYNKHRDKPIREQAENIIHLFTLTNLGAPAAFKYFDTTIDRKRYTSTKEVLDATLIHQSITGLYETRIDLSQLGGDGGEAAAKGSSGGGGGTLQLDDEYRLYSPLVKPDQNIQFWLEQFPQAWAETAGMGLAKQVPPQVIQLKASATPVSVRQYPLSKEAQEGIRPHVQRLIQQGILVPVQSPWNTPLLPVRKPGTNDYRPVQDLREVNKRVQDIHPTVPNPYNLLCALPPQRSWYTVLDLKDAFFCLRLHPTSQPLFAFEWRDPGTGRTGQLTWTRLPQGFKNSPTIFNEALHRDLANFRIQHPQVTLLQYVDDLLLAGATKQDCLEGTKALLLELSDLGYRASAKKAQICRREVTYLGYSLRDGQRWLTEARKKTVVQIPAPTTAKQVREFLGTAGFCRLWIPGFATLAAPLYPLTKPKGEFSWAPEHQKAFDAIKKALLSAPALALPDVTKPFTLYVDERKGVARGVLTQTLGPWRRPVAYLSKKLDPVASGWPVCLKAIAAVAILVKDADKLTLGQNITVIAPHALENIVRQPPDRWMTNARMTHYQSLLLTERVTFAPPAALNPATLLPEETDEPVTHDCHQLLIEETGVRKDLTDIPLTGEVLTWFTDGSSYVVEGKRMAGAAVVDGTRTIWASSLPEGTSAQKAELMALTQALRLAEGKSINIYTDSRYAFATAHVHGAIYKQRGWLTSAGREIKNKEEILSLLEALHLPKRLAIIHCPGHQKAKDPISRGNQMADRVAKQAAQGVNLLAGKRTADGSEFEKRTADGSEFESPKKKAKVE

SEQ ID NO: 161 - protein, 2094 aa, synthetic construct
MPAAKRVKLDGGDKKYSIGLDIGTNSVGWAVITDEYKVPSKKFKVLGNTDRHSIKKNLIGALLFDSGETAEATRLKRTARRRYTRRKNRICYLQEIFSNEMAKVDDSFFHRLEESFLVEEDKKHERHPIFGNIVDEVAYHEKYPTIYHLRKKLVDSTDKADLRLIYLALAHMIKFRGHFLIEGDLNPDNSDVDKLFIQLVQTYNQLFEENPINASGVDAKAILSARLSKSRRLENLIAQLPGEKKNGLFGNLIALSLGLTPNFKSNFDLAEDAKLQLSKDTYDDDLDNLLAQIGDQYADLFLAAKNLSDAILLSDILRVNTEITKAPLSASMIKRYDEHHQDLTLLKALVRQQLPEKYKEIFFDQSKNGYAGYIDGGASQEEFYKFIKPILEKMDGTEELLVKLNREDLLRKQRTFDNGSIPHQIHLGELHAILRRQEDFYPFLKDNREKIEKILTFRIPYYVGPLARGNSRFAWMTRKSEETITPWNFEEVVDKGASAQSFIERMTNFDKNLPNEKVLPKHSLLYEYFTVYNELTKVKYVTEGMRKPAFLSGEQKKAIVDLLFKTNRKVTVKQLKEDYFKKIECFDSVEISGVEDRFNASLGTYHDLLKIIKDKDFLDNEENEDILEDIVLTLTLFEDREMIEERLKTYAHLFDDKVMKQLKRRRYTGWGRLSRKLINGIRDKQSGKTILDFLKSDGFANRNFMQLIHDDSLTFKEDIQKAQVSGQGDSLHEHIANLAGSPAIKKGILQTVKVVDELVKVMGRHKPENIVIEMARENQTTQKGQKNSRERMKRIEEGIKELGSQILKEHPVENTQLQNEKLYLYYLQNGRDMYVDQELDINRLSDYDVDHIVPQSFLKDDSIDNKVLTRSDKARGKSDNVPSEEVVKKMKNYWRQLLNAKLITQRKFDNLTKAERGGLSELDKAGFIKRQLVETRQITKHVAQILDSRMNTKYDENDKLIREVKVITLKSKLVSDFRKDFQFYKVREINNYHHAHDAYLNAVVGTALIKKYPKLESEFVYGDYKVYDVRKMIAKSEQEIGKATAKYFFYSNIMNFFKTEITLANGEIRKRPLIETNGETGEIVWDKGRDFATVRKVLSMPQVNIVKKTEVQTGGFSKESILPKRNSDKLIARKKDWDPKKYGGFDSPTVAYSVLVVAKVEKGKSKKLKSVKELLGITIMERSSFEKNPIDFLEAKGYKEVKKDLIIKLPKYSLFELENGRKRMLASAGELQKGNELALPSKYVNFLYLASHYEKLKGSPEDNEQKQLFVEQHKHYLDEIIEQISEFSKRVILADANLDKVLSAYNKHRDKPIREQAENIIHLFTLTNLGAPAAFKYFDTTIDRKRYTSTKEVLDATLIHQSITGLYETRIDLSQLGGDGGGGGGSEAAAKGGGGSGGTLQLDDEYRLYSPLVKPDQNIQFWLEQFPQAWAETAGMGLAKQVPPQVIQLKASATPVSVRQYPLSKEAQEGIRPHVQRLIQQGILVPVQSPWNTPLLPVRKPGTNDYRPVQDLREVNKRVQDIHPTVPNPYNLLCALPPQRSWYTVLDLKDAFFCLRLHPTSQPLFAFEWRDPGTGRTGQLTWTRLPQGFKNSPTIFNEALHRDLANFRIQHPQVTLLQYVDDLLLAGATKQDCLEGTKALLLELSDLGYRASAKKAQICRREVTYLGYSLRDGQRWLTEARKKTVVQIPAPTTAKQVREFLGTAGFCRLWIPGFATLAAPLYPLTKPKGEFSWAPEHQKAFDAIKKALLSAPALALPDVTKPFTLYVDERKGVARGVLTQTLGPWRRPVAYLSKKLDPVASGWPVCLKAIAAVAILVKDADKLTLGQNITVIAPHALENIVRQPPDRWMTNARMTHYQSLLLTERVTFAPPAALNPATLLPEETDEPVTHDCHQLLIEETGVRKDLTDIPLTGEVLTWFTDGSSYVVEGKRMAGAAVVDGTRTIWASSLPEGTSAQKAELMALTQALRLAEGKSINIYTDSRYAFATAHVHGAIYKQRGWLTSAGREIKNKEEILSLLEALHLPKRLAIIHCPGHQKAKDPISRGNQMADRVAKQAAQGVNLLAGKRTADGSEFEKRTADGSEFESPKKKAKVE

SEQ ID NO: 162 - protein, 2088 aa, synthetic construct
MPAAKRVKLDGGDKKYSIGLDIGTNSVGWAVITDEYKVPSKKFKVLGNTDRHSIKKNLIGALLFDSGETAEATRLKRTARRRYTRRKNRICYLQEIFSNEMAKVDDSFFHRLEESFLVEEDKKHERHPIFGNIVDEVAYHEKYPTIYHLRKKLVDSTDKADLRLIYLALAHMIKFRGHFLIEGDLNPDNSDVDKLFIQLVQTYNQLFEENPINASGVDAKAILSARLSKSRRLENLIAQLPGEKKNGLFGNLIALSLGLTPNFKSNFDLAEDAKLQLSKDTYDDDLDNLLAQIGDQYADLFLAAKNLSDAILLSDILRVNTEITKAPLSASMIKRYDEHHQDLTLLKALVRQQLPEKYKEIFFDQSKNGYAGYIDGGASQEEFYKFIKPILEKMDGTEELLVKLNREDLLRKQRTFDNGSIPHQIHLGELHAILRRQEDFYPFLKDNREKIEKILTFRIPYYVGPLARGNSRFAWMTRKSEETITPWNFEEVVDKGASAQSFIERMTNFDKNLPNEKVLPKHSLLYEYFTVYNELTKVKYVTEGMRKPAFLSGEQKKAIVDLLFKTNRKVTVKQLKEDYFKKIECFDSVEISGVEDRFNASLGTYHDLLKIIKDKDFLDNEENEDILEDIVLTLTLFEDREMIEERLKTYAHLFDDKVMKQLKRRRYTGWGRLSRKLINGIRDKQSGKTILDFLKSDGFANRNFMQLIHDDSLTFKEDIQKAQVSGQGDSLHEHIANLAGSPAIKKGILQTVKVVDELVKVMGRHKPENIVIEMARENQTTQKGQKNSRERMKRIEEGIKELGSQILKEHPVENTQLQNEKLYLYYLQNGRDMYVDQELDINRLSDYDVDHIVPQSFLKDDSIDNKVLTRSDKARGKSDNVPSEEVVKKMKNYWRQLLNAKLITQRKFDNLTKAERGGLSELDKAGFIKRQLVETRQITKHVAQILDSRMNTKYDENDKLIREVKVITLKSKLVSDFRKDFQFYKVREINNYHHAHDAYLNAVVGTALIKKYPKLESEFVYGDYKVYDVRKMIAKSEQEIGKATAKYFFYSNIMNFFKTEITLANGEIRKRPLIETNGETGEIVWDKGRDFATVRKVLSMPQVNIVKKTEVQTGGFSKESILPKRNSDKLIARKKDWDPKKYGGFDSPTVAYSVLVVAKVEKGKSKKLKSVKELLGITIMERSSFEKNPIDFLEAKGYKEVKKDLIIKLPKYSLFELENGRKRMLASAGELQKGNELALPSKYVNFLYLASHYEKLKGSPEDNEQKQLFVEQHKHYLDEIIEQISEFSKRVILADANLDKVLSAYNKHRDKPIREQAENIIHLFTLTNLGAPAAFKYFDTTIDRKRYTSTKEVLDATLIHQSITGLYETRIDLSQLGGDGGGSSGGGGGSGGTLQLDDEYRLYSPLVKPDQNIQFWLEQFPQAWAETAGMGLAKQVPPQVIQLKASATPVSVRQYPLSKEAQEGIRPHVQRLIQQGILVPVQSPWNTPLLPVRKPGTNDYRPVQDLREVNKRVQDIHPTVPNPYNLLCALPPQRSWYTVLDLKDAFFCLRLHPTSQPLFAFEWRDPGTGRTGQLTWTRLPQGFKNSPTIFNEALHRDLANFRIQHPQVTLLQYVDDLLLAGATKQDCLEGTKALLLELSDLGYRASAKKAQICRREVTYLGYSLRDGQRWLTEARKKTVVQIPAPTTAKQVREFLGTAGFCRLWIPGFATLAAPLYPLTKPKGEFSWAPEHQKAFDAIKKALLSAPALALPDVTKPFTLYVDERKGVARGVLTQTLGPWRRPVAYLSKKLDPVASGWPVCLKAIAAVAILVKDADKLTLGQNITVIAPHALENIVRQPPDRWMTNARMTHYQSLLLTERVTFAPPAALNPATLLPEETDEPVTHDCHQLLIEETGVRKDLTDIPLTGEVLTWFTDGSSYVVEGKRMAGAAVVDGTRTIWASSLPEGTSAQKAELMALTQALRLAEGKSINIYTDSRYAFATAHVHGAIYKQRGWLTSAGREIKNKEEILSLLEALHLPKRLAIIHCPGHQKAKDPISRGNQMADRVAKQAAQGVNLLAGKRTADGSEFEKRTADGSEFESPKKKAKVE

SEQ ID NO: 163 - protein, 2084 aa, synthetic construct
MPAAKRVKLDGGDKKYSIGLDIGTNSVGWAVITDEYKVPSKKFKVLGNTDRHSIKKNLIGALLFDSGETAEATRLKRTARRRYTRRKNRICYLQEIFSNEMAKVDDSFFHRLEESFLVEEDKKHERHPIFGNIVDEVAYHEKYPTIYHLRKKLVDSTDKADLRLIYLALAHMIKFRGHFLIEGDLNPDNSDVDKLFIQLVQTYNQLFEENPINASGVDAKAILSARLSKSRRLENLIAQLPGEKKNGLFGNLIALSLGLTPNFKSNFDLAEDAKLQLSKDTYDDDLDNLLAQIGDQYADLFLAAKNLSDAILLSDILRVNTEITKAPLSASMIKRYDEHHQDLTLLKALVRQQLPEKYKEIFFDQSKNGYAGYIDGGASQEEFYKFIKPILEKMDGTEELLVKLNREDLLRKQRTFDNGSIPHQIHLGELHAILRRQEDFYPFLKDNREKIEKILTFRIPYYVGPLARGNSRFAWMTRKSEETITPWNFEEVVDKGASAQSFIERMTNFDKNLPNEKVLPKHSLLYEYFTVYNELTKVKYVTEGMRKPAFLSGEQKKAIVDLLFKTNRKVTVKQLKEDYFKKIECFDSVEISGVEDRFNASLGTYHDLLKIIKDKDFLDNEENEDILEDIVLTLTLFEDREMIEERLKTYAHLFDDKVMKQLKRRRYTGWGRLSRKLINGIRDKQSGKTILDFLKSDGFANRNFMQLIHDDSLTFKEDIQKAQVSGQGDSLHEHIANLAGSPAIKKGILQTVKVVDELVKVMGRHKPENIVIEMARENQTTQKGQKNSRERMKRIEEGIKELGSQILKEHPVENTQLQNEKLYLYYLQNGRDMYVDQELDINRLSDYDVDHIVPQSFLKDDSIDNKVLTRSDKARGKSDNVPSEEVVKKMKNYWRQLLNAKLITQRKFDNLTKAERGGLSELDKAGFIKRQLVETRQITKHVAQILDSRMNTKYDENDKLIREVKVITLKSKLVSDFRKDFQFYKVREINNYHHAHDAYLNAVVGTALIKKYPKLESEFVYGDYKVYDVRKMIAKSEQEIGKATAKYFFYSNIMNFFKTEITLANGEIRKRPLIETNGETGEIVWDKGRDFATVRKVLSMPQVNIVKKTEVQTGGFSKESILPKRNSDKLIARKKDWDPKKYGGFDSPTVAYSVLVVAKVEKGKSKKLKSVKELLGITIMERSSFEKNPIDFLEAKGYKEVKKDLIIKLPKYSLFELENGRKRMLASAGELQKGNELALPSKYVNFLYLASHYEKLKGSPEDNEQKQLFVEQHKHYLDEIIEQISEFSKRVILADANLDKVLSAYNKHRDKPIREQAENIIHLFTLTNLGAPAAFKYFDTTIDRKRYTSTKEVLDATLIHQSITGLYETRIDLSQLGGDGGPAPAPGGTLQLDDEYRLYSPLVKPDQNIQFWLEQFPQAWAETAGMGLAKQVPPQVIQLKASATPVSVRQYPLSKEAQEGIRPHVQRLIQQGILVPVQSPWNTPLLPVRKPGTNDYRPVQDLREVNKRVQDIHPTVPNPYNLLCALPPQRSWYTVLDLKDAFFCLRLHPTSQPLFAFEWRDPGTGRTGQLTWTRLPQGFKNSPTIFNEALHRDLANFRIQHPQVTLLQYVDDLLLAGATKQDCLEGTKALLLELSDLGYRASAKKAQICRREVTYLGYSLRDGQRWLTEARKKTVVQIPAPTTAKQVREFLGTAGFCRLWIPGFATLAAPLYPLTKPKGEFSWAPEHQKAFDAIKKALLSAPALALPDVTKPFTLYVDERKGVARGVLTQTLGPWRRPVAYLSKKLDPVASGWPVCLKAIAAVAILVKDADKLTLGQNITVIAPHALENIVRQPPDRWMTNARMTHYQSLLLTERVTFAPPAALNPATLLPEETDEPVTHDCHQLLIEETGVRKDLTDIPLTGEVLTWFTDGSSYVVEGKRMAGAAVVDGTRTIWASSLPEGTSAQKAELMALTQALRLAEGKSINIYTDSRYAFATAHVHGAIYKQRGWLTSAGREIKNKEEILSLLEALHLPKRLAIIHCPGHQKAKDPISRGNQMADRVAKQAAQGVNLLAGKRTADGSEFEKRTADGSEFESPKKKAKVE

SEQ ID NO: 164 - protein, 2090 aa, synthetic construct
MPAAKRVKLDGGDKKYSIGLDIGTNSVGWAVITDEYKVPSKKFKVLGNTDRHSIKKNLIGALLFDSGETAEATRLKRTARRRYTRRKNRICYLQEIFSNEMAKVDDSFFHRLEESFLVEEDKKHERHPIFGNIVDEVAYHEKYPTIYHLRKKLVDSTDKADLRLIYLALAHMIKFRGHFLIEGDLNPDNSDVDKLFIQLVQTYNQLFEENPINASGVDAKAILSARLSKSRRLENLIAQLPGEKKNGLFGNLIALSLGLTPNFKSNFDLAEDAKLQLSKDTYDDDLDNLLAQIGDQYADLFLAAKNLSDAILLSDILRVNTEITKAPLSASMIKRYDEHHQDLTLLKALVRQQLPEKYKEIFFDQSKNGYAGYIDGGASQEEFYKFIKPILEKMDGTEELLVKLNREDLLRKQRTFDNGSIPHQIHLGELHAILRRQEDFYPFLKDNREKIEKILTFRIPYYVGPLARGNSRFAWMTRKSEETITPWNFEEVVDKGASAQSFIERMTNFDKNLPNEKVLPKHSLLYEYFTVYNELTKVKYVTEGMRKPAFLSGEQKKAIVDLLFKTNRKVTVKQLKEDYFKKIECFDSVEISGVEDRFNASLGTYHDLLKIIKDKDFLDNEENEDILEDIVLTLTLFEDREMIEERLKTYAHLFDDKVMKQLKRRRYTGWGRLSRKLINGIRDKQSGKTILDFLKSDGFANRNFMQLIHDDSLTFKEDIQKAQVSGQGDSLHEHIANLAGSPAIKKGILQTVKVVDELVKVMGRHKPENIVIEMARENQTTQKGQKNSRERMKRIEEGIKELGSQILKEHPVENTQLQNEKLYLYYLQNGRDMYVDQELDINRLSDYDVDHIVPQSFLKDDSIDNKVLTRSDKARGKSDNVPSEEVVKKMKNYWRQLLNAKLITQRKFDNLTKAERGGLSELDKAGFIKRQLVETRQITKHVAQILDSRMNTKYDENDKLIREVKVITLKSKLVSDFRKDFQFYKVREINNYHHAHDAYLNAVVGTALIKKYPKLESEFVYGDYKVYDVRKMIAKSEQEIGKATAKYFFYSNIMNFFKTEITLANGEIRKRPLIETNGETGEIVWDKGRDFATVRKVLSMPQVNIVKKTEVQTGGFSKESILPKRNSDKLIARKKDWDPKKYGGFDSPTVAYSVLVVAKVEKGKSKKLKSVKELLGITIMERSSFEKNPIDFLEAKGYKEVKKDLIIKLPKYSLFELENGRKRMLASAGELQKGNELALPSKYVNFLYLASHYEKLKGSPEDNEQKQLFVEQHKHYLDEIIEQISEFSKRVILADANLDKVLSAYNKHRDKPIREQAENIIHLFTLTNLGAPAAFKYFDTTIDRKRYTSTKEVLDATLIHQSITGLYETRIDLSQLGGDGGGGSPAPEAAAKGGTLQLDDEYRLYSPLVKPDQNIQFWLEQFPQAWAETAGMGLAKQVPPQVIQLKASATPVSVRQYPLSKEAQEGIRPHVQRLIQQGILVPVQSPWNTPLLPVRKPGTNDYRPVQDLREVNKRVQDIHPTVPNPYNLLCALPPQRSWYTVLDLKDAFFCLRLHPTSQPLFAFEWRDPGTGRTGQLTWTRLPQGFKNSPTIFNEALHRDLANFRIQHPQVTLLQYVDDLLLAGATKQDCLEGTKALLLELSDLGYRASAKKAQICRREVTYLGYSLRDGQRWLTEARKKTVVQIPAPTTAKQVREFLGTAGFCRLWIPGFATLAAPLYPLTKPKGEFSWAPEHQKAFDAIKKALLSAPALALPDVTKPFTLYVDERKGVARGVLTQTLGPWRRPVAYLSKKLDPVASGWPVCLKAIAAVAILVKDADKLTLGQNITVIAPHALENIVRQPPDRWMTNARMTHYQSLLLTERVTFAPPAALNPATLLPEETDEPVTHDCHQLLIEETGVRKDLTDIPLTGEVLTWFTDGSSYVVEGKRMAGAAVVDGTRTIWASSLPEGTSAQKAELMALTQALRLAEGKSINIYTDSRYAFATAHVHGAIYKQRGWLTSAGREIKNKEEILSLLEALHLPKRLAIIHCPGHQKAKDPISRGNQMADRVAKQAAQGVNLLAGKRTADGSEFEKRTADGSEFESPKKKAKVE

SEQ ID NO: 165 - protein, 2085 aa, synthetic construct
MPAAKRVKLDGGDKKYSIGLDIGTNSVGWAVITDEYKVPSKKFKVLGNTDRHSIKKNLIGALLFDSGETAEATRLKRTARRRYTRRKNRICYLQEIFSNEMAKVDDSFFHRLEESFLVEEDKKHERHPIFGNIVDEVAYHEKYPTIYHLRKKLVDSTDKADLRLIYLALAHMIKFRGHFLIEGDLNPDNSDVDKLFIQLVQTYNQLFEENPINASGVDAKAILSARLSKSRRLENLIAQLPGEKKNGLFGNLIALSLGLTPNFKSNFDLAEDAKLQLSKDTYDDDLDNLLAQIGDQYADLFLAAKNLSDAILLSDILRVNTEITKAPLSASMIKRYDEHHQDLTLLKALVRQQLPEKYKEIFFDQSKNGYAGYIDGGASQEEFYKFIKPILEKMDGTEELLVKLNREDLLRKQRTFDNGSIPHQIHLGELHAILRRQEDFYPFLKDNREKIEKILTFRIPYYVGPLARGNSRFAWMTRKSEETITPWNFEEVVDKGASAQSFIERMTNFDKNLPNEKVLPKHSLLYEYFTVYNELTKVKYVTEGMRKPAFLSGEQKKAIVDLLFKTNRKVTVKQLKEDYFKKIECFDSVEISGVEDRFNASLGTYHDLLKIIKDKDFLDNEENEDILEDIVLTLTLFEDREMIEERLKTYAHLFDDKVMKQLKRRRYTGWGRLSRKLINGIRDKQSGKTILDFLKSDGFANRNFMQLIHDDSLTFKEDIQKAQVSGQGDSLHEHIANLAGSPAIKKGILQTVKVVDELVKVMGRHKPENIVIEMARENQTTQKGQKNSRERMKRIEEGIKELGSQILKEHPVENTQLQNEKLYLYYLQNGRDMYVDQELDINRLSDYDVDHIVPQSFLKDDSIDNKVLTRSDKARGKSDNVPSEEVVKKMKNYWRQLLNAKLITQRKFDNLTKAERGGLSELDKAGFIKRQLVETRQITKHVAQILDSRMNTKYDENDKLIREVKVITLKSKLVSDFRKDFQFYKVREINNYHHAHDAYLNAVVGTALIKKYPKLESEFVYGDYKVYDVRKMIAKSEQEIGKATAKYFFYSNIMNFFKTEITLANGEIRKRPLIETNGETGEIVWDKGRDFATVRKVLSMPQVNIVKKTEVQTGGFSKESILPKRNSDKLIARKKDWDPKKYGGFDSPTVAYSVLVVAKVEKGKSKKLKSVKELLGITIMERSSFEKNPIDFLEAKGYKEVKKDLIIKLPKYSLFELENGRKRMLASAGELQKGNELALPSKYVNFLYLASHYEKLKGSPEDNEQKQLFVEQHKHYLDEIIEQISEFSKRVILADANLDKVLSAYNKHRDKPIREQAENIIHLFTLTNLGAPAAFKYFDTTIDRKRYTSTKEVLDATLIHQSITGLYETRIDLSQLGGDGGGSSGGSGGTLQLDDEYRLYSPLVKPDQNIQFWLEQFPQAWAETAGMGLAKQVPPQVIQLKASATPVSVRQYPLSKEAQEGIRPHVQRLIQQGILVPVQSPWNTPLLPVRKPGTNDYRPVQDLREVNKRVQDIHPTVPNPYNLLCALPPQRSWYTVLDLKDAFFCLRLHPTSQPLFAFEWRDPGTGRTGQLTWTRLPQGFKNSPTIFNEALHRDLANFRIQHPQVTLLQYVDDLLLAGATKQDCLEGTKALLLELSDLGYRASAKKAQICRREVTYLGYSLRDGQRWLTEARKKTVVQIPAPTTAKQVREFLGTAGFCRLWIPGFATLAAPLYPLTKPKGEFSWAPEHQKAFDAIKKALLSAPALALPDVTKPFTLYVDERKGVARGVLTQTLGPWRRPVAYLSKKLDPVASGWPVCLKAIAAVAILVKDADKLTLGQNITVIAPHALENIVRQPPDRWMTNARMTHYQSLLLTERVTFAPPAALNPATLLPEETDEPVTHDCHQLLIEETGVRKDLTDIPLTGEVLTWFTDGSSYVVEGKRMAGAAVVDGTRTIWASSLPEGTSAQKAELMALTQALRLAEGKSINIYTDSRYAFATAHVHGAIYKQRGWLTSAGREIKNKEEILSLLEALHLPKRLAIIHCPGHQKAKDPISRGNQMADRVAKQAAQGVNLLAGKRTADGSEFEKRTADGSEFESPKKKAKVE

SEQ ID NO: 166 - protein, 2084 aa, synthetic construct
MPAAKRVKLDGGDKKYSIGLDIGTNSVGWAVITDEYKVPSKKFKVLGNTDRHSIKKNLIGALLFDSGETAEATRLKRTARRRYTRRKNRICYLQEIFSNEMAKVDDSFFHRLEESFLVEEDKKHERHPIFGNIVDEVAYHEKYPTIYHLRKKLVDSTDKADLRLIYLALAHMIKFRGHFLIEGDLNPDNSDVDKLFIQLVQTYNQLFEENPINASGVDAKAILSARLSKSRRLENLIAQLPGEKKNGLFGNLIALSLGLTPNFKSNFDLAEDAKLQLSKDTYDDDLDNLLAQIGDQYADLFLAAKNLSDAILLSDILRVNTEITKAPLSASMIKRYDEHHQDLTLLKALVRQQLPEKYKEIFFDQSKNGYAGYIDGGASQEEFYKFIKPILEKMDGTEELLVKLNREDLLRKQRTFDNGSIPHQIHLGELHAILRRQEDFYPFLKDNREKIEKILTFRIPYYVGPLARGNSRFAWMTRKSEETITPWNFEEVVDKGASAQSFIERMTNFDKNLPNEKVLPKHSLLYEYFTVYNELTKVKYVTEGMRKPAFLSGEQKKAIVDLLFKTNRKVTVKQLKEDYFKKIECFDSVEISGVEDRFNASLGTYHDLLKIIKDKDFLDNEENEDILEDIVLTLTLFEDREMIEERLKTYAHLFDDKVMKQLKRRRYTGWGRLSRKLINGIRDKQSGKTILDFLKSDGFANRNFMQLIHDDSLTFKEDIQKAQVSGQGDSLHEHIANLAGSPAIKKGILQTVKVVDELVKVMGRHKPENIVIEMARENQTTQKGQKNSRERMKRIEEGIKELGSQILKEHPVENTQLQNEKLYLYYLQNGRDMYVDQELDINRLSDYDVDHIVPQSFLKDDSIDNKVLTRSDKARGKSDNVPSEEVVKKMKNYWRQLLNAKLITQRKFDNLTKAERGGLSELDKAGFIKRQLVETRQITKHVAQILDSRMNTKYDENDKLIREVKVITLKSKLVSDFRKDFQFYKVREINNYHHAHDAYLNAVVGTALIKKYPKLESEFVYGDYKVYDVRKMIAKSEQEIGKATAKYFFYSNIMNFFKTEITLANGEIRKRPLIETNGETGEIVWDKGRDFATVRKVLSMPQVNIVKKTEVQTGGFSKESILPKRNSDKLIARKKDWDPKKYGGFDSPTVAYSVLVVAKVEKGKSKKLKSVKELLGITIMERSSFEKNPIDFLEAKGYKEVKKDLIIKLPKYSLFELENGRKRMLASAGELQKGNELALPSKYVNFLYLASHYEKLKGSPEDNEQKQLFVEQHKHYLDEIIEQISEFSKRVILADANLDKVLSAYNKHRDKPIREQAENIIHLFTLTNLGAPAAFKYFDTTIDRKRYTSTKEVLDATLIHQSITGLYETRIDLSQLGGDGGGGGGGGGTLQLDDEYRLYSPLVKPDQNIQFWLEQFPQAWAETAGMGLAKQVPPQVIQLKASATPVSVRQYPLSKEAQEGIRPHVQRLIQQGILVPVQSPWNTPLLPVRKPGTNDYRPVQDLREVNKRVQDIHPTVPNPYNLLCALPPQRSWYTVLDLKDAFFCLRLHPTSQPLFAFEWRDPGTGRTGQLTWTRLPQGFKNSPTIFNEALHRDLANFRIQHPQVTLLQYVDDLLLAGATKQDCLEGTKALLLELSDLGYRASAKKAQICRREVTYLGYSLRDGQRWLTEARKKTVVQIPAPTTAKQVREFLGTAGFCRLWIPGFATLAAPLYPLTKPKGEFSWAPEHQKAFDAIKKALLSAPALALPDVTKPFTLYVDERKGVARGVLTQTLGPWRRPVAYLSKKLDPVASGWPVCLKAIAAVAILVKDADKLTLGQNITVIAPHALENIVRQPPDRWMTNARMTHYQSLLLTERVTFAPPAALNPATLLPEETDEPVTHDCHQLLIEETGVRKDLTDIPLTGEVLTWFTDGSSYVVEGKRMAGAAVVDGTRTIWASSLPEGTSAQKAELMALTQALRLAEGKSINIYTDSRYAFATAHVHGAIYKQRGWLTSAGREIKNKEEILSLLEALHLPKRLAIIHCPGHQKAKDPISRGNQMADRVAKQAAQGVNLLAGKRTADGSEFEKRTADGSEFESPKKKAKVE

SEQ ID NO: 167 - protein, 2088 aa, synthetic construct
MPAAKRVKLDGGDKKYSIGLDIGTNSVGWAVITDEYKVPSKKFKVLGNTDRHSIKKNLIGALLFDSGETAEATRLKRTARRRYTRRKNRICYLQEIFSNEMAKVDDSFFHRLEESFLVEEDKKHERHPIFGNIVDEVAYHEKYPTIYHLRKKLVDSTDKADLRLIYLALAHMIKFRGHFLIEGDLNPDNSDVDKLFIQLVQTYNQLFEENPINASGVDAKAILSARLSKSRRLENLIAQLPGEKKNGLFGNLIALSLGLTPNFKSNFDLAEDAKLQLSKDTYDDDLDNLLAQIGDQYADLFLAAKNLSDAILLSDILRVNTEITKAPLSASMIKRYDEHHQDLTLLKALVRQQLPEKYKEIFFDQSKNGYAGYIDGGASQEEFYKFIKPILEKMDGTEELLVKLNREDLLRKQRTFDNGSIPHQIHLGELHAILRRQEDFYPFLKDNREKIEKILTFRIPYYVGPLARGNSRFAWMTRKSEETITPWNFEEVVDKGASAQSFIERMTNFDKNLPNEKVLPKHSLLYEYFTVYNELTKVKYVTEGMRKPAFLSGEQKKAIVDLLFKTNRKVTVKQLKEDYFKKIECFDSVEISGVEDRFNASLGTYHDLLKIIKDKDFLDNEENEDILEDIVLTLTLFEDREMIEERLKTYAHLFDDKVMKQLKRRRYTGWGRLSRKLINGIRDKQSGKTILDFLKSDGFANRNFMQLIHDDSLTFKEDIQKAQVSGQGDSLHEHIANLAGSPAIKKGILQTVKVVDELVKVMGRHKPENIVIEMARENQTTQKGQKNSRERMKRIEEGIKELGSQILKEHPVENTQLQNEKLYLYYLQNGRDMYVDQELDINRLSDYDVDHIVPQSFLKDDSIDNKVLTRSDKARGKSDNVPSEEVVKKMKNYWRQLLNAKLITQRKFDNLTKAERGGLSELDKAGFIKRQLVETRQITKHVAQILDSRMNTKYDENDKLIREVKVITLKSKLVSDFRKDFQFYKVREINNYHHAHDAYLNAVVGTALIKKYPKLESEFVYGDYKVYDVRKMIAKSEQEIGKATAKYFFYSNIMNFFKTEITLANGEIRKRPLIETNGETGEIVWDKGRDFATVRKVLSMPQVNIVKKTEVQTGGFSKESILPKRNSDKLIARKKDWDPKKYGGFDSPTVAYSVLVVAKVEKGKSKKLKSVKELLGITIMERSSFEKNPIDFLEAKGYKEVKKDLIIKLPKYSLFELENGRKRMLASAGELQKGNELALPSKYVNFLYLASHYEKLKGSPEDNEQKQLFVEQHKHYLDEIIEQISEFSKRVILADANLDKVLSAYNKHRDKPIREQAENIIHLFTLTNLGAPAAFKYFDTTIDRKRYTSTKEVLDATLIHQSITGLYETRIDLSQLGGDGGPAPGGSGGGGGTLQLDDEYRLYSPLVKPDQNIQFWLEQFPQAWAETAGMGLAKQVPPQVIQLKASATPVSVRQYPLSKEAQEGIRPHVQRLIQQGILVPVQSPWNTPLLPVRKPGTNDYRPVQDLREVNKRVQDIHPTVPNPYNLLCALPPQRSWYTVLDLKDAFFCLRLHPTSQPLFAFEWRDPGTGRTGQLTWTRLPQGFKNSPTIFNEALHRDLANFRIQHPQVTLLQYVDDLLLAGATKQDCLEGTKALLLELSDLGYRASAKKAQICRREVTYLGYSLRDGQRWLTEARKKTVVQIPAPTTAKQVREFLGTAGFCRLWIPGFATLAAPLYPLTKPKGEFSWAPEHQKAFDAIKKALLSAPALALPDVTKPFTLYVDERKGVARGVLTQTLGPWRRPVAYLSKKLDPVASGWPVCLKAIAAVAILVKDADKLTLGQNITVIAPHALENIVRQPPDRWMTNARMTHYQSLLLTERVTFAPPAALNPATLLPEETDEPVTHDCHQLLIEETGVRKDLTDIPLTGEVLTWFTDGSSYVVEGKRMAGAAVVDGTRTIWASSLPEGTSAQKAELMALTQALRLAEGKSINIYTDSRYAFATAHVHGAIYKQRGWLTSAGREIKNKEEILSLLEALHLPKRLAIIHCPGHQKAKDPISRGNQMADRVAKQAAQGVNLLAGKRTADGSEFEKRTADGSEFESPKKKAKVE

SEQ ID NO: 168 - protein, 2090 aa, synthetic construct
MPAAKRVKLDGGDKKYSIGLDIGTNSVGWAVITDEYKVPSKKFKVLGNTDRHSIKKNLIGALLFDSGETAEATRLKRTARRRYTRRKNRICYLQEIFSNEMAKVDDSFFHRLEESFLVEEDKKHERHPIFGNIVDEVAYHEKYPTIYHLRKKLVDSTDKADLRLIYLALAHMIKFRGHFLIEGDLNPDNSDVDKLFIQLVQTYNQLFEENPINASGVDAKAILSARLSKSRRLENLIAQLPGEKKNGLFGNLIALSLGLTPNFKSNFDLAEDAKLQLSKDTYDDDLDNLLAQIGDQYADLFLAAKNLSDAILLSDILRVNTEITKAPLSASMIKRYDEHHQDLTLLKALVRQQLPEKYKEIFFDQSKNGYAGYIDGGASQEEFYKFIKPILEKMDGTEELLVKLNREDLLRKQRTFDNGSIPHQIHLGELHAILRRQEDFYPFLKDNREKIEKILTFRIPYYVGPLARGNSRFAWMTRKSEETITPWNFEEVVDKGASAQSFIERMTNFDKNLPNEKVLPKHSLLYEYFTVYNELTKVKYVTEGMRKPAFLSGEQKKAIVDLLFKTNRKVTVKQLKEDYFKKIECFDSVEISGVEDRFNASLGTYHDLLKIIKDKDFLDNEENEDILEDIVLTLTLFEDREMIEERLKTYAHLFDDKVMKQLKRRRYTGWGRLSRKLINGIRDKQSGKTILDFLKSDGFANRNFMQLIHDDSLTFKEDIQKAQVSGQGDSLHEHIANLAGSPAIKKGILQTVKVVDELVKVMGRHKPENIVIEMARENQTTQKGQKNSRERMKRIEEGIKELGSQILKEHPVENTQLQNEKLYLYYLQNGRDMYVDQELDINRLSDYDVDHIVPQSFLKDDSIDNKVLTRSDKARGKSDNVPSEEVVKKMKNYWRQLLNAKLITQRKFDNLTKAERGGLSELDKAGFIKRQLVETRQITKHVAQILDSRMNTKYDENDKLIREVKVITLKSKLVSDFRKDFQFYKVREINNYHHAHDAYLNAVVGTALIKKYPKLESEFVYGDYKVYDVRKMIAKSEQEIGKATAKYFFYSNIMNFFKTEITLANGEIRKRPLIETNGETGEIVWDKGRDFATVRKVLSMPQVNIVKKTEVQTGGFSKESILPKRNSDKLIARKKDWDPKKYGGFDSPTVAYSVLVVAKVEKGKSKKLKSVKELLGITIMERSSFEKNPIDFLEAKGYKEVKKDLIIKLPKYSLFELENGRKRMLASAGELQKGNELALPSKYVNFLYLASHYEKLKGSPEDNEQKQLFVEQHKHYLDEIIEQISEFSKRVILADANLDKVLSAYNKHRDKPIREQAENIIHLFTLTNLGAPAAFKYFDTTIDRKRYTSTKEVLDATLIHQSITGLYETRIDLSQLGGDGGEAAAKPAPGGSGGTLQLDDEYRLYSPLVKPDQNIQFWLEQFPQAWAETAGMGLAKQVPPQVIQLKASATPVSVRQYPLSKEAQEGIRPHVQRLIQQGILVPVQSPWNTPLLPVRKPGTNDYRPVQDLREVNKRVQDIHPTVPNPYNLLCALPPQRSWYTVLDLKDAFFCLRLHPTSQPLFAFEWRDPGTGRTGQLTWTRLPQGFKNSPTIFNEALHRDLANFRIQHPQVTLLQYVDDLLLAGATKQDCLEGTKALLLELSDLGYRASAKKAQICRREVTYLGYSLRDGQRWLTEARKKTVVQIPAPTTAKQVREFLGTAGFCRLWIPGFATLAAPLYPLTKPKGEFSWAPEHQKAFDAIKKALLSAPALALPDVTKPFTLYVDERKGVARGVLTQTLGPWRRPVAYLSKKLDPVASGWPVCLKAIAAVAILVKDADKLTLGQNITVIAPHALENIVRQPPDRWMTNARMTHYQSLLLTERVTFAPPAALNPATLLPEETDEPVTHDCHQLLIEETGVRKDLTDIPLTGEVLTWFTDGSSYVVEGKRMAGAAVVDGTRTIWASSLPEGTSAQKAELMALTQALRLAEGKSINIYTDSRYAFATAHVHGAIYKQRGWLTSAGREIKNKEEILSLLEALHLPKRLAIIHCPGHQKAKDPISRGNQMADRVAKQAAQGVNLLAGKRTADGSEFEKRTADGSEFESPKKKAKVE

SEQ ID NO: 169 - protein, 2088 aa, synthetic construct
MPAAKRVKLDGGDKKYSIGLDIGTNSVGWAVITDEYKVPSKKFKVLGNTDRHSIKKNLIGALLFDSGETAEATRLKRTARRRYTRRKNRICYLQEIFSNEMAKVDDSFFHRLEESFLVEEDKKHERHPIFGNIVDEVAYHEKYPTIYHLRKKLVDSTDKADLRLIYLALAHMIKFRGHFLIEGDLNPDNSDVDKLFIQLVQTYNQLFEENPINASGVDAKAILSARLSKSRRLENLIAQLPGEKKNGLFGNLIALSLGLTPNFKSNFDLAEDAKLQLSKDTYDDDLDNLLAQIGDQYADLFLAAKNLSDAILLSDILRVNTEITKAPLSASMIKRYDEHHQDLTLLKALVRQQLPEKYKEIFFDQSKNGYAGYIDGGASQEEFYKFIKPILEKMDGTEELLVKLNREDLLRKQRTFDNGSIPHQIHLGELHAILRRQEDFYPFLKDNREKIEKILTFRIPYYVGPLARGNSRFAWMTRKSEETITPWNFEEVVDKGASAQSFIERMTNFDKNLPNEKVLPKHSLLYEYFTVYNELTKVKYVTEGMRKPAFLSGEQKKAIVDLLFKTNRKVTVKQLKEDYFKKIECFDSVEISGVEDRFNASLGTYHDLLKIIKDKDFLDNEENEDILEDIVLTLTLFEDREMIEERLKTYAHLFDDKVMKQLKRRRYTGWGRLSRKLINGIRDKQSGKTILDFLKSDGFANRNFMQLIHDDSLTFKEDIQKAQVSGQGDSLHEHIANLAGSPAIKKGILQTVKVVDELVKVMGRHKPENIVIEMARENQTTQKGQKNSRERMKRIEEGIKELGSQILKEHPVENTQLQNEKLYLYYLQNGRDMYVDQELDINRLSDYDVDHIVPQSFLKDDSIDNKVLTRSDKARGKSDNVPSEEVVKKMKNYWRQLLNAKLITQRKFDNLTKAERGGLSELDKAGFIKRQLVETRQITKHVAQILDSRMNTKYDENDKLIREVKVITLKSKLVSDFRKDFQFYKVREINNYHHAHDAYLNAVVGTALIKKYPKLESEFVYGDYKVYDVRKMIAKSEQEIGKATAKYFFYSNIMNFFKTEITLANGEIRKRPLIETNGETGEIVWDKGRDFATVRKVLSMPQVNIVKKTEVQTGGFSKESILPKRNSDKLIARKKDWDPKKYGGFDSPTVAYSVLVVAKVEKGKSKKLKSVKELLGITIMERSSFEKNPIDFLEAKGYKEVKKDLIIKLPKYSLFELENGRKRMLASAGELQKGNELALPSKYVNFLYLASHYEKLKGSPEDNEQKQLFVEQHKHYLDEIIEQISEFSKRVILADANLDKVLSAYNKHRDKPIREQAENIIHLFTLTNLGAPAAFKYFDTTIDRKRYTSTKEVLDATLIHQSITGLYETRIDLSQLGGDGGGGGPAPGGSGGTLQLDDEYRLYSPLVKPDQNIQFWLEQFPQAWAETAGMGLAKQVPPQVIQLKASATPVSVRQYPLSKEAQEGIRPHVQRLIQQGILVPVQSPWNTPLLPVRKPGTNDYRPVQDLREVNKRVQDIHPTVPNPYNLLCALPPQRSWYTVLDLKDAFFCLRLHPTSQPLFAFEWRDPGTGRTGQLTWTRLPQGFKNSPTIFNEALHRDLANFRIQHPQVTLLQYVDDLLLAGATKQDCLEGTKALLLELSDLGYRASAKKAQICRREVTYLGYSLRDGQRWLTEARKKTVVQIPAPTTAKQVREFLGTAGFCRLWIPGFATLAAPLYPLTKPKGEFSWAPEHQKAFDAIKKALLSAPALALPDVTKPFTLYVDERKGVARGVLTQTLGPWRRPVAYLSKKLDPVASGWPVCLKAIAAVAILVKDADKLTLGQNITVIAPHALENIVRQPPDRWMTNARMTHYQSLLLTERVTFAPPAALNPATLLPEETDEPVTHDCHQLLIEETGVRKDLTDIPLTGEVLTWFTDGSSYVVEGKRMAGAAVVDGTRTIWASSLPEGTSAQKAELMALTQALRLAEGKSINIYTDSRYAFATAHVHGAIYKQRGWLTSAGREIKNKEEILSLLEALHLPKRLAIIHCPGHQKAKDPISRGNQMADRVAKQAAQGVNLLAGKRTADGSEFEKRTADGSEFESPKKKAKVE

SEQ ID NO: 170 - protein, 2090 aa, synthetic construct
MPAAKRVKLDGGDKKYSIGLDIGTNSVGWAVITDEYKVPSKKFKVLGNTDRHSIKKNLIGALLFDSGETAEATRLKRTARRRYTRRKNRICYLQEIFSNEMAKVDDSFFHRLEESFLVEEDKKHERHPIFGNIVDEVAYHEKYPTIYHLRKKLVDSTDKADLRLIYLALAHMIKFRGHFLIEGDLNPDNSDVDKLFIQLVQTYNQLFEENPINASGVDAKAILSARLSKSRRLENLIAQLPGEKKNGLFGNLIALSLGLTPNFKSNFDLAEDAKLQLSKDTYDDDLDNLLAQIGDQYADLFLAAKNLSDAILLSDILRVNTEITKAPLSASMIKRYDEHHQDLTLLKALVRQQLPEKYKEIFFDQSKNGYAGYIDGGASQEEFYKFIKPILEKMDGTEELLVKLNREDLLRKQRTFDNGSIPHQIHLGELHAILRRQEDFYPFLKDNREKIEKILTFRIPYYVGPLARGNSRFAWMTRKSEETITPWNFEEVVDKGASAQSFIERMTNFDKNLPNEKVLPKHSLLYEYFTVYNELTKVKYVTEGMRKPAFLSGEQKKAIVDLLFKTNRKVTVKQLKEDYFKKIECFDSVEISGVEDRFNASLGTYHDLLKIIKDKDFLDNEENEDILEDIVLTLTLFEDREMIEERLKTYAHLFDDKVMKQLKRRRYTGWGRLSRKLINGIRDKQSGKTILDFLKSDGFANRNFMQLIHDDSLTFKEDIQKAQVSGQGDSLHEHIANLAGSPAIKKGILQTVKVVDELVKVMGRHKPENIVIEMARENQTTQKGQKNSRERMKRIEEGIKELGSQILKEHPVENTQLQNEKLYLYYLQNGRDMYVDQELDINRLSDYDVDHIVPQSFLKDDSIDNKVLTRSDKARGKSDNVPSEEVVKKMKNYWRQLLNAKLITQRKFDNLTKAERGGLSELDKAGFIKRQLVETRQITKHVAQILDSRMNTKYDENDKLIREVKVITLKSKLVSDFRKDFQFYKVREINNYHHAHDAYLNAVVGTALIKKYPKLESEFVYGDYKVYDVRKMIAKSEQEIGKATAKYFFYSNIMNFFKTEITLANGEIRKRPLIETNGETGEIVWDKGRDFATVRKVLSMPQVNIVKKTEVQTGGFSKESILPKRNSDKLIARKKDWDPKKYGGFDSPTVAYSVLVVAKVEKGKSKKLKSVKELLGITIMERSSFEKNPIDFLEAKGYKEVKKDLIIKLPKYSLFELENGRKRMLASAGELQKGNELALPSKYVNFLYLASHYEKLKGSPEDNEQKQLFVEQHKHYLDEIIEQISEFSKRVILADANLDKVLSAYNKHRDKPIREQAENIIHLFTLTNLGAPAAFKYFDTTIDRKRYTSTKEVLDATLIHQSITGLYETRIDLSQLGGDGGGSSGGSEAAAKGGTLQLDDEYRLYSPLVKPDQNIQFWLEQFPQAWAETAGMGLAKQVPPQVIQLKASATPVSVRQYPLSKEAQEGIRPHVQRLIQQGILVPVQSPWNTPLLPVRKPGTNDYRPVQDLREVNKRVQDIHPTVPNPYNLLCALPPQRSWYTVLDLKDAFFCLRLHPTSQPLFAFEWRDPGTGRTGQLTWTRLPQGFKNSPTIFNEALHRDLANFRIQHPQVTLLQYVDDLLLAGATKQDCLEGTKALLLELSDLGYRASAKKAQICRREVTYLGYSLRDGQRWLTEARKKTVVQIPAPTTAKQVREFLGTAGFCRLWIPGFATLAAPLYPLTKPKGEFSWAPEHQKAFDAIKKALLSAPALALPDVTKPFTLYVDERKGVARGVLTQTLGPWRRPVAYLSKKLDPVASGWPVCLKAIAAVAILVKDADKLTLGQNITVIAPHALENIVRQPPDRWMTNARMTHYQSLLLTERVTFAPPAALNPATLLPEETDEPVTHDCHQLLIEETGVRKDLTDIPLTGEVLTWFTDGSSYVVEGKRMAGAAVVDGTRTIWASSLPEGTSAQKAELMALTQALRLAEGKSINIYTDSRYAFATAHVHGAIYKQRGWLTSAGREIKNKEEILSLLEALHLPKRLAIIHCPGHQKAKDPISRGNQMADRVAKQAAQGVNLLAGKRTADGSEFEKRTADGSEFESPKKKAKVE

SEQ ID NO: 171 - protein, 2088 aa, synthetic construct
MPAAKRVKLDGGDKKYSIGLDIGTNSVGWAVITDEYKVPSKKFKVLGNTDRHSIKKNLIGALLFDSGETAEATRLKRTARRRYTRRKNRICYLQEIFSNEMAKVDDSFFHRLEESFLVEEDKKHERHPIFGNIVDEVAYHEKYPTIYHLRKKLVDSTDKADLRLIYLALAHMIKFRGHFLIEGDLNPDNSDVDKLFIQLVQTYNQLFEENPINASGVDAKAILSARLSKSRRLENLIAQLPGEKKNGLFGNLIALSLGLTPNFKSNFDLAEDAKLQLSKDTYDDDLDNLLAQIGDQYADLFLAAKNLSDAILLSDILRVNTEITKAPLSASMIKRYDEHHQDLTLLKALVRQQLPEKYKEIFFDQSKNGYAGYIDGGASQEEFYKFIKPILEKMDGTEELLVKLNREDLLRKQRTFDNGSIPHQIHLGELHAILRRQEDFYPFLKDNREKIEKILTFRIPYYVGPLARGNSRFAWMTRKSEETITPWNFEEVVDKGASAQSFIERMTNFDKNLPNEKVLPKHSLLYEYFTVYNELTKVKYVTEGMRKPAFLSGEQKKAIVDLLFKTNRKVTVKQLKEDYFKKIECFDSVEISGVEDRFNASLGTYHDLLKIIKDKDFLDNEENEDILEDIVLTLTLFEDREMIEERLKTYAHLFDDKVMKQLKRRRYTGWGRLSRKLINGIRDKQSGKTILDFLKSDGFANRNFMQLIHDDSLTFKEDIQKAQVSGQGDSLHEHIANLAGSPAIKKGILQTVKVVDELVKVMGRHKPENIVIEMARENQTTQKGQKNSRERMKRIEEGIKELGSQILKEHPVENTQLQNEKLYLYYLQNGRDMYVDQELDINRLSDYDVDHIVPQSFLKDDSIDNKVLTRSDKARGKSDNVPSEEVVKKMKNYWRQLLNAKLITQRKFDNLTKAERGGLSELDKAGFIKRQLVETRQITKHVAQILDSRMNTKYDENDKLIREVKVITLKSKLVSDFRKDFQFYKVREINNYHHAHDAYLNAVVGTALIKKYPKLESEFVYGDYKVYDVRKMIAKSEQEIGKATAKYFFYSNIMNFFKTEITLANGEIRKRPLIETNGETGEIVWDKGRDFATVRKVLSMPQVNIVKKTEVQTGGFSKESILPKRNSDKLIARKKDWDPKKYGGFDSPTVAYSVLVVAKVEKGKSKKLKSVKELLGITIMERSSFEKNPIDFLEAKGYKEVKKDLIIKLPKYSLFELENGRKRMLASAGELQKGNELALPSKYVNFLYLASHYEKLKGSPEDNEQKQLFVEQHKHYLDEIIEQISEFSKRVILADANLDKVLSAYNKHRDKPIREQAENIIHLFTLTNLGAPAAFKYFDTTIDRKRYTSTKEVLDATLIHQSITGLYETRIDLSQLGGDGGGSSPAPGGSGGTLQLDDEYRLYSPLVKPDQNIQFWLEQFPQAWAETAGMGLAKQVPPQVIQLKASATPVSVRQYPLSKEAQEGIRPHVQRLIQQGILVPVQSPWNTPLLPVRKPGTNDYRPVQDLREVNKRVQDIHPTVPNPYNLLCALPPQRSWYTVLDLKDAFFCLRLHPTSQPLFAFEWRDPGTGRTGQLTWTRLPQGFKNSPTIFNEALHRDLANFRIQHPQVTLLQYVDDLLLAGATKQDCLEGTKALLLELSDLGYRASAKKAQICRREVTYLGYSLRDGQRWLTEARKKTVVQIPAPTTAKQVREFLGTAGFCRLWIPGFATLAAPLYPLTKPKGEFSWAPEHQKAFDAIKKALLSAPALALPDVTKPFTLYVDERKGVARGVLTQTLGPWRRPVAYLSKKLDPVASGWPVCLKAIAAVAILVKDADKLTLGQNITVIAPHALENIVRQPPDRWMTNARMTHYQSLLLTERVTFAPPAALNPATLLPEETDEPVTHDCHQLLIEETGVRKDLTDIPLTGEVLTWFTDGSSYVVEGKRMAGAAVVDGTRTIWASSLPEGTSAQKAELMALTQALRLAEGKSINIYTDSRYAFATAHVHGAIYKQRGWLTSAGREIKNKEEILSLLEALHLPKRLAIIHCPGHQKAKDPISRGNQMADRVAKQAAQGVNLLAGKRTADGSEFEKRTADGSEFESPKKKAKVE

SEQ ID NO: 172 - protein, 2090 aa, synthetic construct
MPAAKRVKLDGGDKKYSIGLDIGTNSVGWAVITDEYKVPSKKFKVLGNTDRHSIKKNLIGALLFDSGETAEATRLKRTARRRYTRRKNRICYLQEIFSNEMAKVDDSFFHRLEESFLVEEDKKHERHPIFGNIVDEVAYHEKYPTIYHLRKKLVDSTDKADLRLIYLALAHMIKFRGHFLIEGDLNPDNSDVDKLFIQLVQTYNQLFEENPINASGVDAKAILSARLSKSRRLENLIAQLPGEKKNGLFGNLIALSLGLTPNFKSNFDLAEDAKLQLSKDTYDDDLDNLLAQIGDQYADLFLAAKNLSDAILLSDILRVNTEITKAPLSASMIKRYDEHHQDLTLLKALVRQQLPEKYKEIFFDQSKNGYAGYIDGGASQEEFYKFIKPILEKMDGTEELLVKLNREDLLRKQRTFDNGSIPHQIHLGELHAILRRQEDFYPFLKDNREKIEKILTFRIPYYVGPLARGNSRFAWMTRKSEETITPWNFEEVVDKGASAQSFIERMTNFDKNLPNEKVLPKHSLLYEYFTVYNELTKVKYVTEGMRKPAFLSGEQKKAIVDLLFKTNRKVTVKQLKEDYFKKIECFDSVEISGVEDRFNASLGTYHDLLKIIKDKDFLDNEENEDILEDIVLTLTLFEDREMIEERLKTYAHLFDDKVMKQLKRRRYTGWGRLSRKLINGIRDKQSGKTILDFLKSDGFANRNFMQLIHDDSLTFKEDIQKAQVSGQGDSLHEHIANLAGSPAIKKGILQTVKVVDELVKVMGRHKPENIVIEMARENQTTQKGQKNSRERMKRIEEGIKELGSQILKEHPVENTQLQNEKLYLYYLQNGRDMYVDQELDINRLSDYDVDHIVPQSFLKDDSIDNKVLTRSDKARGKSDNVPSEEVVKKMKNYWRQLLNAKLITQRKFDNLTKAERGGLSELDKAGFIKRQLVETRQITKHVAQILDSRMNTKYDENDKLIREVKVITLKSKLVSDFRKDFQFYKVREINNYHHAHDAYLNAVVGTALIKKYPKLESEFVYGDYKVYDVRKMIAKSEQEIGKATAKYFFYSNIMNFFKTEITLANGEIRKRPLIETNGETGEIVWDKGRDFATVRKVLSMPQVNIVKKTEVQTGGFSKESILPKRNSDKLIARKKDWDPKKYGGFDSPTVAYSVLVVAKVEKGKSKKLKSVKELLGITIMERSSFEKNPIDFLEAKGYKEVKKDLIIKLPKYSLFELENGRKRMLASAGELQKGNELALPSKYVNFLYLASHYEKLKGSPEDNEQKQLFVEQHKHYLDEIIEQISEFSKRVILADANLDKVLSAYNKHRDKPIREQAENIIHLFTLTNLGAPAAFKYFDTTIDRKRYTSTKEVLDATLIHQSITGLYETRIDLSQLGGDGGGGSGGGEAAAKGGTLQLDDEYRLYSPLVKPDQNIQFWLEQFPQAWAETAGMGLAKQVPPQVIQLKASATPVSVRQYPLSKEAQEGIRPHVQRLIQQGILVPVQSPWNTPLLPVRKPGTNDYRPVQDLREVNKRVQDIHPTVPNPYNLLCALPPQRSWYTVLDLKDAFFCLRLHPTSQPLFAFEWRDPGTGRTGQLTWTRLPQGFKNSPTIFNEALHRDLANFRIQHPQVTLLQYVDDLLLAGATKQDCLEGTKALLLELSDLGYRASAKKAQICRREVTYLGYSLRDGQRWLTEARKKTVVQIPAPTTAKQVREFLGTAGFCRLWIPGFATLAAPLYPLTKPKGEFSWAPEHQKAFDAIKKALLSAPALALPDVTKPFTLYVDERKGVARGVLTQTLGPWRRPVAYLSKKLDPVASGWPVCLKAIAAVAILVKDADKLTLGQNITVIAPHALENIVRQPPDRWMTNARMTHYQSLLLTERVTFAPPAALNPATLLPEETDEPVTHDCHQLLIEETGVRKDLTDIPLTGEVLTWFTDGSSYVVEGKRMAGAAVVDGTRTIWASSLPEGTSAQKAELMALTQALRLAEGKSINIYTDSRYAFATAHVHGAIYKQRGWLTSAGREIKNKEEILSLLEALHLPKRLAIIHCPGHQKAKDPISRGNQMADRVAKQAAQGVNLLAGKRTADGSEFEKRTADGSEFESPKKKAKVE

SEQ ID NO: 173 - protein, 2088 aa, synthetic construct
MPAAKRVKLDGGDKKYSIGLDIGTNSVGWAVITDEYKVPSKKFKVLGNTDRHSIKKNLIGALLFDSGETAEATRLKRTARRRYTRRKNRICYLQEIFSNEMAKVDDSFFHRLEESFLVEEDKKHERHPIFGNIVDEVAYHEKYPTIYHLRKKLVDSTDKADLRLIYLALAHMIKFRGHFLIEGDLNPDNSDVDKLFIQLVQTYNQLFEENPINASGVDAKAILSARLSKSRRLENLIAQLPGEKKNGLFGNLIALSLGLTPNFKSNFDLAEDAKLQLSKDTYDDDLDNLLAQIGDQYADLFLAAKNLSDAILLSDILRVNTEITKAPLSASMIKRYDEHHQDLTLLKALVRQQLPEKYKEIFFDQSKNGYAGYIDGGASQEEFYKFIKPILEKMDGTEELLVKLNREDLLRKQRTFDNGSIPHQIHLGELHAILRRQEDFYPFLKDNREKIEKILTFRIPYYVGPLARGNSRFAWMTRKSEETITPWNFEEVVDKGASAQSFIERMTNFDKNLPNEKVLPKHSLLYEYFTVYNELTKVKYVTEGMRKPAFLSGEQKKAIVDLLFKTNRKVTVKQLKEDYFKKIECFDSVEISGVEDRFNASLGTYHDLLKIIKDKDFLDNEENEDILEDIVLTLTLFEDREMIEERLKTYAHLFDDKVMKQLKRRRYTGWGRLSRKLINGIRDKQSGKTILDFLKSDGFANRNFMQLIHDDSLTFKEDIQKAQVSGQGDSLHEHIANLAGSPAIKKGILQTVKVVDELVKVMGRHKPENIVIEMARENQTTQKGQKNSRERMKRIEEGIKELGSQILKEHPVENTQLQNEKLYLYYLQNGRDMYVDQELDINRLSDYDVDHIVPQSFLKDDSIDNKVLTRSDKARGKSDNVPSEEVVKKMKNYWRQLLNAKLITQRKFDNLTKAERGGLSELDKAGFIKRQLVETRQITKHVAQILDSRMNTKYDENDKLIREVKVITLKSKLVSDFRKDFQFYKVREINNYHHAHDAYLNAVVGTALIKKYPKLESEFVYGDYKVYDVRKMIAKSEQEIGKATAKYFFYSNIMNFFKTEITLANGEIRKRPLIETNGETGEIVWDKGRDFATVRKVLSMPQVNIVKKTEVQTGGFSKESILPKRNSDKLIARKKDWDPKKYGGFDSPTVAYSVLVVAKVEKGKSKKLKSVKELLGITIMERSSFEKNPIDFLEAKGYKEVKKDLIIKLPKYSLFELENGRKRMLASAGELQKGNELALPSKYVNFLYLASHYEKLKGSPEDNEQKQLFVEQHKHYLDEIIEQISEFSKRVILADANLDKVLSAYNKHRDKPIREQAENIIHLFTLTNLGAPAAFKYFDTTIDRKRYTSTKEVLDATLIHQSITGLYETRIDLSQLGGDGGPAPGGGGGSGGTLQLDDEYRLYSPLVKPDQNIQFWLEQFPQAWAETAGMGLAKQVPPQVIQLKASATPVSVRQYPLSKEAQEGIRPHVQRLIQQGILVPVQSPWNTPLLPVRKPGTNDYRPVQDLREVNKRVQDIHPTVPNPYNLLCALPPQRSWYTVLDLKDAFFCLRLHPTSQPLFAFEWRDPGTGRTGQLTWTRLPQGFKNSPTIFNEALHRDLANFRIQHPQVTLLQYVDDLLLAGATKQDCLEGTKALLLELSDLGYRASAKKAQICRREVTYLGYSLRDGQRWLTEARKKTVVQIPAPTTAKQVREFLGTAGFCRLWIPGFATLAAPLYPLTKPKGEFSWAPEHQKAFDAIKKALLSAPALALPDVTKPFTLYVDERKGVARGVLTQTLGPWRRPVAYLSKKLDPVASGWPVCLKAIAAVAILVKDADKLTLGQNITVIAPHALENIVRQPPDRWMTNARMTHYQSLLLTERVTFAPPAALNPATLLPEETDEPVTHDCHQLLIEETGVRKDLTDIPLTGEVLTWFTDGSSYVVEGKRMAGAAVVDGTRTIWASSLPEGTSAQKAELMALTQALRLAEGKSINIYTDSRYAFATAHVHGAIYKQRGWLTSAGREIKNKEEILSLLEALHLPKRLAIIHCPGHQKAKDPISRGNQMADRVAKQAAQGVNLLAGKRTADGSEFEKRTADGSEFESPKKKAKVE

SEQ ID NO: 174 - protein, 2085 aa, synthetic construct
MPAAKRVKLDGGDKKYSIGLDIGTNSVGWAVITDEYKVPSKKFKVLGNTDRHSIKKNLIGALLFDSGETAEATRLKRTARRRYTRRKNRICYLQEIFSNEMAKVDDSFFHRLEESFLVEEDKKHERHPIFGNIVDEVAYHEKYPTIYHLRKKLVDSTDKADLRLIYLALAHMIKFRGHFLIEGDLNPDNSDVDKLFIQLVQTYNQLFEENPINASGVDAKAILSARLSKSRRLENLIAQLPGEKKNGLFGNLIALSLGLTPNFKSNFDLAEDAKLQLSKDTYDDDLDNLLAQIGDQYADLFLAAKNLSDAILLSDILRVNTEITKAPLSASMIKRYDEHHQDLTLLKALVRQQLPEKYKEIFFDQSKNGYAGYIDGGASQEEFYKFIKPILEKMDGTEELLVKLNREDLLRKQRTFDNGSIPHQIHLGELHAILRRQEDFYPFLKDNREKIEKILTFRIPYYVGPLARGNSRFAWMTRKSEETITPWNFEEVVDKGASAQSFIERMTNFDKNLPNEKVLPKHSLLYEYFTVYNELTKVKYVTEGMRKPAFLSGEQKKAIVDLLFKTNRKVTVKQLKEDYFKKIECFDSVEISGVEDRFNASLGTYHDLLKIIKDKDFLDNEENEDILEDIVLTLTLFEDREMIEERLKTYAHLFDDKVMKQLKRRRYTGWGRLSRKLINGIRDKQSGKTILDFLKSDGFANRNFMQLIHDDSLTFKEDIQKAQVSGQGDSLHEHIANLAGSPAIKKGILQTVKVVDELVKVMGRHKPENIVIEMARENQTTQKGQKNSRERMKRIEEGIKELGSQILKEHPVENTQLQNEKLYLYYLQNGRDMYVDQELDINRLSDYDVDHIVPQSFLKDDSIDNKVLTRSDKARGKSDNVPSEEVVKKMKNYWRQLLNAKLITQRKFDNLTKAERGGLSELDKAGFIKRQLVETRQITKHVAQILDSRMNTKYDENDKLIREVKVITLKSKLVSDFRKDFQFYKVREINNYHHAHDAYLNAVVGTALIKKYPKLESEFVYGDYKVYDVRKMIAKSEQEIGKATAKYFFYSNIMNFFKTEITLANGEIRKRPLIETNGETGEIVWDKGRDFATVRKVLSMPQVNIVKKTEVQTGGFSKESILPKRNSDKLIARKKDWDPKKYGGFDSPTVAYSVLVVAKVEKGKSKKLKSVKELLGITIMERSSFEKNPIDFLEAKGYKEVKKDLIIKLPKYSLFELENGRKRMLASAGELQKGNELALPSKYVNFLYLASHYEKLKGSPEDNEQKQLFVEQHKHYLDEIIEQISEFSKRVILADANLDKVLSAYNKHRDKPIREQAENIIHLFTLTNLGAPAAFKYFDTTIDRKRYTSTKEVLDATLIHQSITGLYETRIDLSQLGGDGGGSSGGGGGTLQLDDEYRLYSPLVKPDQNIQFWLEQFPQAWAETAGMGLAKQVPPQVIQLKASATPVSVRQYPLSKEAQEGIRPHVQRLIQQGILVPVQSPWNTPLLPVRKPGTNDYRPVQDLREVNKRVQDIHPTVPNPYNLLCALPPQRSWYTVLDLKDAFFCLRLHPTSQPLFAFEWRDPGTGRTGQLTWTRLPQGFKNSPTIFNEALHRDLANFRIQHPQVTLLQYVDDLLLAGATKQDCLEGTKALLLELSDLGYRASAKKAQICRREVTYLGYSLRDGQRWLTEARKKTVVQIPAPTTAKQVREFLGTAGFCRLWIPGFATLAAPLYPLTKPKGEFSWAPEHQKAFDAIKKALLSAPALALPDVTKPFTLYVDERKGVARGVLTQTLGPWRRPVAYLSKKLDPVASGWPVCLKAIAAVAILVKDADKLTLGQNITVIAPHALENIVRQPPDRWMTNARMTHYQSLLLTERVTFAPPAALNPATLLPEETDEPVTHDCHQLLIEETGVRKDLTDIPLTGEVLTWFTDGSSYVVEGKRMAGAAVVDGTRTIWASSLPEGTSAQKAELMALTQALRLAEGKSINIYTDSRYAFATAHVHGAIYKQRGWLTSAGREIKNKEEILSLLEALHLPKRLAIIHCPGHQKAKDPISRGNQMADRVAKQAAQGVNLLAGKRTADGSEFEKRTADGSEFESPKKKAKVE

SEQ ID NO: 175 - protein, 2088 aa, synthetic construct
MPAAKRVKLDGGDKKYSIGLDIGTNSVGWAVITDEYKVPSKKFKVLGNTDRHSIKKNLIGALLFDSGETAEATRLKRTARRRYTRRKNRICYLQEIFSNEMAKVDDSFFHRLEESFLVEEDKKHERHPIFGNIVDEVAYHEKYPTIYHLRKKLVDSTDKADLRLIYLALAHMIKFRGHFLIEGDLNPDNSDVDKLFIQLVQTYNQLFEENPINASGVDAKAILSARLSKSRRLENLIAQLPGEKKNGLFGNLIALSLGLTPNFKSNFDLAEDAKLQLSKDTYDDDLDNLLAQIGDQYADLFLAAKNLSDAILLSDILRVNTEITKAPLSASMIKRYDEHHQDLTLLKALVRQQLPEKYKEIFFDQSKNGYAGYIDGGASQEEFYKFIKPILEKMDGTEELLVKLNREDLLRKQRTFDNGSIPHQIHLGELHAILRRQEDFYPFLKDNREKIEKILTFRIPYYVGPLARGNSRFAWMTRKSEETITPWNFEEVVDKGASAQSFIERMTNFDKNLPNEKVLPKHSLLYEYFTVYNELTKVKYVTEGMRKPAFLSGEQKKAIVDLLFKTNRKVTVKQLKEDYFKKIECFDSVEISGVEDRFNASLGTYHDLLKIIKDKDFLDNEENEDILEDIVLTLTLFEDREMIEERLKTYAHLFDDKVMKQLKRRRYTGWGRLSRKLINGIRDKQSGKTILDFLKSDGFANRNFMQLIHDDSLTFKEDIQKAQVSGQGDSLHEHIANLAGSPAIKKGILQTVKVVDELVKVMGRHKPENIVIEMARENQTTQKGQKNSRERMKRIEEGIKELGSQILKEHPVENTQLQNEKLYLYYLQNGRDMYVDQELDINRLSDYDVDHIVPQSFLKDDSIDNKVLTRSDKARGKSDNVPSEEVVKKMKNYWRQLLNAKLITQRKFDNLTKAERGGLSELDKAGFIKRQLVETRQITKHVAQILDSRMNTKYDENDKLIREVKVITLKSKLVSDFRKDFQFYKVREINNYHHAHDAYLNAVVGTALIKKYPKLESEFVYGDYKVYDVRKMIAKSEQEIGKATAKYFFYSNIMNFFKTEITLANGEIRKRPLIETNGETGEIVWDKGRDFATVRKVLSMPQVNIVKKTEVQTGGFSKESILPKRNSDKLIARKKDWDPKKYGGFDSPTVAYSVLVVAKVEKGKSKKLKSVKELLGITIMERSSFEKNPIDFLEAKGYKEVKKDLIIKLPKYSLFELENGRKRMLASAGELQKGNELALPSKYVNFLYLASHYEKLKGSPEDNEQKQLFVEQHKHYLDEIIEQISEFSKRVILADANLDKVLSAYNKHRDKPIREQAENIIHLFTLTNLGAPAAFKYFDTTIDRKRYTSTKEVLDATLIHQSITGLYETRIDLSQLGGDGGGGSPAPGSSGGTLQLDDEYRLYSPLVKPDQNIQFWLEQFPQAWAETAGMGLAKQVPPQVIQLKASATPVSVRQYPLSKEAQEGIRPHVQRLIQQGILVPVQSPWNTPLLPVRKPGTNDYRPVQDLREVNKRVQDIHPTVPNPYNLLCALPPQRSWYTVLDLKDAFFCLRLHPTSQPLFAFEWRDPGTGRTGQLTWTRLPQGFKNSPTIFNEALHRDLANFRIQHPQVTLLQYVDDLLLAGATKQDCLEGTKALLLELSDLGYRASAKKAQICRREVTYLGYSLRDGQRWLTEARKKTVVQIPAPTTAKQVREFLGTAGFCRLWIPGFATLAAPLYPLTKPKGEFSWAPEHQKAFDAIKKALLSAPALALPDVTKPFTLYVDERKGVARGVLTQTLGPWRRPVAYLSKKLDPVASGWPVCLKAIAAVAILVKDADKLTLGQNITVIAPHALENIVRQPPDRWMTNARMTHYQSLLLTERVTFAPPAALNPATLLPEETDEPVTHDCHQLLIEETGVRKDLTDIPLTGEVLTWFTDGSSYVVEGKRMAGAAVVDGTRTIWASSLPEGTSAQKAELMALTQALRLAEGKSINIYTDSRYAFATAHVHGAIYKQRGWLTSAGREIKNKEEILSLLEALHLPKRLAIIHCPGHQKAKDPISRGNQMADRVAKQAAQGVNLLAGKRTADGSEFEKRTADGSEFESPKKKAKVE

SEQ ID NO: 176 - protein, 2085 aa, synthetic construct
MPAAKRVKLDGGDKKYSIGLDIGTNSVGWAVITDEYKVPSKKFKVLGNTDRHSIKKNLIGALLFDSGETAEATRLKRTARRRYTRRKNRICYLQEIFSNEMAKVDDSFFHRLEESFLVEEDKKHERHPIFGNIVDEVAYHEKYPTIYHLRKKLVDSTDKADLRLIYLALAHMIKFRGHFLIEGDLNPDNSDVDKLFIQLVQTYNQLFEENPINASGVDAKAILSARLSKSRRLENLIAQLPGEKKNGLFGNLIALSLGLTPNFKSNFDLAEDAKLQLSKDTYDDDLDNLLAQIGDQYADLFLAAKNLSDAILLSDILRVNTEITKAPLSASMIKRYDEHHQDLTLLKALVRQQLPEKYKEIFFDQSKNGYAGYIDGGASQEEFYKFIKPILEKMDGTEELLVKLNREDLLRKQRTFDNGSIPHQIHLGELHAILRRQEDFYPFLKDNREKIEKILTFRIPYYVGPLARGNSRFAWMTRKSEETITPWNFEEVVDKGASAQSFIERMTNFDKNLPNEKVLPKHSLLYEYFTVYNELTKVKYVTEGMRKPAFLSGEQKKAIVDLLFKTNRKVTVKQLKEDYFKKIECFDSVEISGVEDRFNASLGTYHDLLKIIKDKDFLDNEENEDILEDIVLTLTLFEDREMIEERLKTYAHLFDDKVMKQLKRRRYTGWGRLSRKLINGIRDKQSGKTILDFLKSDGFANRNFMQLIHDDSLTFKEDIQKAQVSGQGDSLHEHIANLAGSPAIKKGILQTVKVVDELVKVMGRHKPENIVIEMARENQTTQKGQKNSRERMKRIEEGIKELGSQILKEHPVENTQLQNEKLYLYYLQNGRDMYVDQELDINRLSDYDVDHIVPQSFLKDDSIDNKVLTRSDKARGKSDNVPSEEVVKKMKNYWRQLLNAKLITQRKFDNLTKAERGGLSELDKAGFIKRQLVETRQITKHVAQILDSRMNTKYDENDKLIREVKVITLKSKLVSDFRKDFQFYKVREINNYHHAHDAYLNAVVGTALIKKYPKLESEFVYGDYKVYDVRKMIAKSEQEIGKATAKYFFYSNIMNFFKTEITLANGEIRKRPLIETNGETGEIVWDKGRDFATVRKVLSMPQVNIVKKTEVQTGGFSKESILPKRNSDKLIARKKDWDPKKYGGFDSPTVAYSVLVVAKVEKGKSKKLKSVKELLGITIMERSSFEKNPIDFLEAKGYKEVKKDLIIKLPKYSLFELENGRKRMLASAGELQKGNELALPSKYVNFLYLASHYEKLKGSPEDNEQKQLFVEQHKHYLDEIIEQISEFSKRVILADANLDKVLSAYNKHRDKPIREQAENIIHLFTLTNLGAPAAFKYFDTTIDRKRYTSTKEVLDATLIHQSITGLYETRIDLSQLGGDGGGGSGSSGGTLQLDDEYRLYSPLVKPDQNIQFWLEQFPQAWAETAGMGLAKQVPPQVIQLKASATPVSVRQYPLSKEAQEGIRPHVQRLIQQGILVPVQSPWNTPLLPVRKPGTNDYRPVQDLREVNKRVQDIHPTVPNPYNLLCALPPQRSWYTVLDLKDAFFCLRLHPTSQPLFAFEWRDPGTGRTGQLTWTRLPQGFKNSPTIFNEALHRDLANFRIQHPQVTLLQYVDDLLLAGATKQDCLEGTKALLLELSDLGYRASAKKAQICRREVTYLGYSLRDGQRWLTEARKKTVVQIPAPTTAKQVREFLGTAGFCRLWIPGFATLAAPLYPLTKPKGEFSWAPEHQKAFDAIKKALLSAPALALPDVTKPFTLYVDERKGVARGVLTQTLGPWRRPVAYLSKKLDPVASGWPVCLKAIAAVAILVKDADKLTLGQNITVIAPHALENIVRQPPDRWMTNARMTHYQSLLLTERVTFAPPAALNPATLLPEETDEPVTHDCHQLLIEETGVRKDLTDIPLTGEVLTWFTDGSSYVVEGKRMAGAAVVDGTRTIWASSLPEGTSAQKAELMALTQALRLAEGKSINIYTDSRYAFATAHVHGAIYKQRGWLTSAGREIKNKEEILSLLEALHLPKRLAIIHCPGHQKAKDPISRGNQMADRVAKQAAQGVNLLAGKRTADGSEFEKRTADGSEFESPKKKAKVE

SEQ ID NO: 177 - protein, 2082 aa, synthetic construct
MPAAKRVKLDGGDKKYSIGLDIGTNSVGWAVITDEYKVPSKKFKVLGNTDRHSIKKNLIGALLFDSGETAEATRLKRTARRRYTRRKNRICYLQEIFSNEMAKVDDSFFHRLEESFLVEEDKKHERHPIFGNIVDEVAYHEKYPTIYHLRKKLVDSTDKADLRLIYLALAHMIKFRGHFLIEGDLNPDNSDVDKLFIQLVQTYNQLFEENPINASGVDAKAILSARLSKSRRLENLIAQLPGEKKNGLFGNLIALSLGLTPNFKSNFDLAEDAKLQLSKDTYDDDLDNLLAQIGDQYADLFLAAKNLSDAILLSDILRVNTEITKAPLSASMIKRYDEHHQDLTLLKALVRQQLPEKYKEIFFDQSKNGYAGYIDGGASQEEFYKFIKPILEKMDGTEELLVKLNREDLLRKQRTFDNGSIPHQIHLGELHAILRRQEDFYPFLKDNREKIEKILTFRIPYYVGPLARGNSRFAWMTRKSEETITPWNFEEVVDKGASAQSFIERMTNFDKNLPNEKVLPKHSLLYEYFTVYNELTKVKYVTEGMRKPAFLSGEQKKAIVDLLFKTNRKVTVKQLKEDYFKKIECFDSVEISGVEDRFNASLGTYHDLLKIIKDKDFLDNEENEDILEDIVLTLTLFEDREMIEERLKTYAHLFDDKVMKQLKRRRYTGWGRLSRKLINGIRDKQSGKTILDFLKSDGFANRNFMQLIHDDSLTFKEDIQKAQVSGQGDSLHEHIANLAGSPAIKKGILQTVKVVDELVKVMGRHKPENIVIEMARENQTTQKGQKNSRERMKRIEEGIKELGSQILKEHPVENTQLQNEKLYLYYLQNGRDMYVDQELDINRLSDYDVDHIVPQSFLKDDSIDNKVLTRSDKARGKSDNVPSEEVVKKMKNYWRQLLNAKLITQRKFDNLTKAERGGLSELDKAGFIKRQLVETRQITKHVAQILDSRMNTKYDENDKLIREVKVITLKSKLVSDFRKDFQFYKVREINNYHHAHDAYLNAVVGTALIKKYPKLESEFVYGDYKVYDVRKMIAKSEQEIGKATAKYFFYSNIMNFFKTEITLANGEIRKRPLIETNGETGEIVWDKGRDFATVRKVLSMPQVNIVKKTEVQTGGFSKESILPKRNSDKLIARKKDWDPKKYGGFDSPTVAYSVLVVAKVEKGKSKKLKSVKELLGITIMERSSFEKNPIDFLEAKGYKEVKKDLIIKLPKYSLFELENGRKRMLASAGELQKGNELALPSKYVNFLYLASHYEKLKGSPEDNEQKQLFVEQHKHYLDEIIEQISEFSKRVILADANLDKVLSAYNKHRDKPIREQAENIIHLFTLTNLGAPAAFKYFDTTIDRKRYTSTKEVLDATLIHQSITGLYETRIDLSQLGGDGGPAPGGTLQLDDEYRLYSPLVKPDQNIQFWLEQFPQAWAETAGMGLAKQVPPQVIQLKASATPVSVRQYPLSKEAQEGIRPHVQRLIQQGILVPVQSPWNTPLLPVRKPGTNDYRPVQDLREVNKRVQDIHPTVPNPYNLLCALPPQRSWYTVLDLKDAFFCLRLHPTSQPLFAFEWRDPGTGRTGQLTWTRLPQGFKNSPTIFNEALHRDLANFRIQHPQVTLLQYVDDLLLAGATKQDCLEGTKALLLELSDLGYRASAKKAQICRREVTYLGYSLRDGQRWLTEARKKTVVQIPAPTTAKQVREFLGTAGFCRLWIPGFATLAAPLYPLTKPKGEFSWAPEHQKAFDAIKKALLSAPALALPDVTKPFTLYVDERKGVARGVLTQTLGPWRRPVAYLSKKLDPVASGWPVCLKAIAAVAILVKDADKLTLGQNITVIAPHALENIVRQPPDRWMTNARMTHYQSLLLTERVTFAPPAALNPATLLPEETDEPVTHDCHQLLIEETGVRKDLTDIPLTGEVLTWFTDGSSYVVEGKRMAGAAVVDGTRTIWASSLPEGTSAQKAELMALTQALRLAEGKSINIYTDSRYAFATAHVHGAIYKQRGWLTSAGREIKNKEEILSLLEALHLPKRLAIIHCPGHQKAKDPISRGNQMADRVAKQAAQGVNLLAGKRTADGSEFEKRTADGSEFESPKKKAKVE

SEQ ID NO: 178 - protein, 2085 aa, synthetic construct
MPAAKRVKLDGGDKKYSIGLDIGTNSVGWAVITDEYKVPSKKFKVLGNTDRHSIKKNLIGALLFDSGETAEATRLKRTARRRYTRRKNRICYLQEIFSNEMAKVDDSFFHRLEESFLVEEDKKHERHPIFGNIVDEVAYHEKYPTIYHLRKKLVDSTDKADLRLIYLALAHMIKFRGHFLIEGDLNPDNSDVDKLFIQLVQTYNQLFEENPINASGVDAKAILSARLSKSRRLENLIAQLPGEKKNGLFGNLIALSLGLTPNFKSNFDLAEDAKLQLSKDTYDDDLDNLLAQIGDQYADLFLAAKNLSDAILLSDILRVNTEITKAPLSASMIKRYDEHHQDLTLLKALVRQQLPEKYKEIFFDQSKNGYAGYIDGGASQEEFYKFIKPILEKMDGTEELLVKLNREDLLRKQRTFDNGSIPHQIHLGELHAILRRQEDFYPFLKDNREKIEKILTFRIPYYVGPLARGNSRFAWMTRKSEETITPWNFEEVVDKGASAQSFIERMTNFDKNLPNEKVLPKHSLLYEYFTVYNELTKVKYVTEGMRKPAFLSGEQKKAIVDLLFKTNRKVTVKQLKEDYFKKIECFDSVEISGVEDRFNASLGTYHDLLKIIKDKDFLDNEENEDILEDIVLTLTLFEDREMIEERLKTYAHLFDDKVMKQLKRRRYTGWGRLSRKLINGIRDKQSGKTILDFLKSDGFANRNFMQLIHDDSLTFKEDIQKAQVSGQGDSLHEHIANLAGSPAIKKGILQTVKVVDELVKVMGRHKPENIVIEMARENQTTQKGQKNSRERMKRIEEGIKELGSQILKEHPVENTQLQNEKLYLYYLQNGRDMYVDQELDINRLSDYDVDHIVPQSFLKDDSIDNKVLTRSDKARGKSDNVPSEEVVKKMKNYWRQLLNAKLITQRKFDNLTKAERGGLSELDKAGFIKRQLVETRQITKHVAQILDSRMNTKYDENDKLIREVKVITLKSKLVSDFRKDFQFYKVREINNYHHAHDAYLNAVVGTALIKKYPKLESEFVYGDYKVYDVRKMIAKSEQEIGKATAKYFFYSNIMNFFKTEITLANGEIRKRPLIETNGETGEIVWDKGRDFATVRKVLSMPQVNIVKKTEVQTGGFSKESILPKRNSDKLIARKKDWDPKKYGGFDSPTVAYSVLVVAKVEKGKSKKLKSVKELLGITIMERSSFEKNPIDFLEAKGYKEVKKDLIIKLPKYSLFELENGRKRMLASAGELQKGNELALPSKYVNFLYLASHYEKLKGSPEDNEQKQLFVEQHKHYLDEIIEQISEFSKRVILADANLDKVLSAYNKHRDKPIREQAENIIHLFTLTNLGAPAAFKYFDTTIDRKRYTSTKEVLDATLIHQSITGLYETRIDLSQLGGDGGGSSGSSGGTLQLDDEYRLYSPLVKPDQNIQFWLEQFPQAWAETAGMGLAKQVPPQVIQLKASATPVSVRQYPLSKEAQEGIRPHVQRLIQQGILVPVQSPWNTPLLPVRKPGTNDYRPVQDLREVNKRVQDIHPTVPNPYNLLCALPPQRSWYTVLDLKDAFFCLRLHPTSQPLFAFEWRDPGTGRTGQLTWTRLPQGFKNSPTIFNEALHRDLANFRIQHPQVTLLQYVDDLLLAGATKQDCLEGTKALLLELSDLGYRASAKKAQICRREVTYLGYSLRDGQRWLTEARKKTVVQIPAPTTAKQVREFLGTAGFCRLWIPGFATLAAPLYPLTKPKGEFSWAPEHQKAFDAIKKALLSAPALALPDVTKPFTLYVDERKGVARGVLTQTLGPWRRPVAYLSKKLDPVASGWPVCLKAIAAVAILVKDADKLTLGQNITVIAPHALENIVRQPPDRWMTNARMTHYQSLLLTERVTFAPPAALNPATLLPEETDEPVTHDCHQLLIEETGVRKDLTDIPLTGEVLTWFTDGSSYVVEGKRMAGAAVVDGTRTIWASSLPEGTSAQKAELMALTQALRLAEGKSINIYTDSRYAFATAHVHGAIYKQRGWLTSAGREIKNKEEILSLLEALHLPKRLAIIHCPGHQKAKDPISRGNQMADRVAKQAAQGVNLLAGKRTADGSEFEKRTADGSEFESPKKKAKVE

SEQ ID NO: 179 - protein, 2085 aa, synthetic construct
MPAAKRVKLDGGDKKYSIGLDIGTNSVGWAVITDEYKVPSKKFKVLGNTDRHSIKKNLIGALLFDSGETAEATRLKRTARRRYTRRKNRICYLQEIFSNEMAKVDDSFFHRLEESFLVEEDKKHERHPIFGNIVDEVAYHEKYPTIYHLRKKLVDSTDKADLRLIYLALAHMIKFRGHFLIEGDLNPDNSDVDKLFIQLVQTYNQLFEENPINASGVDAKAILSARLSKSRRLENLIAQLPGEKKNGLFGNLIALSLGLTPNFKSNFDLAEDAKLQLSKDTYDDDLDNLLAQIGDQYADLFLAAKNLSDAILLSDILRVNTEITKAPLSASMIKRYDEHHQDLTLLKALVRQQLPEKYKEIFFDQSKNGYAGYIDGGASQEEFYKFIKPILEKMDGTEELLVKLNREDLLRKQRTFDNGSIPHQIHLGELHAILRRQEDFYPFLKDNREKIEKILTFRIPYYVGPLARGNSRFAWMTRKSEETITPWNFEEVVDKGASAQSFIERMTNFDKNLPNEKVLPKHSLLYEYFTVYNELTKVKYVTEGMRKPAFLSGEQKKAIVDLLFKTNRKVTVKQLKEDYFKKIECFDSVEISGVEDRFNASLGTYHDLLKIIKDKDFLDNEENEDILEDIVLTLTLFEDREMIEERLKTYAHLFDDKVMKQLKRRRYTGWGRLSRKLINGIRDKQSGKTILDFLKSDGFANRNFMQLIHDDSLTFKEDIQKAQVSGQGDSLHEHIANLAGSPAIKKGILQTVKVVDELVKVMGRHKPENIVIEMARENQTTQKGQKNSRERMKRIEEGIKELGSQILKEHPVENTQLQNEKLYLYYLQNGRDMYVDQELDINRLSDYDVDHIVPQSFLKDDSIDNKVLTRSDKARGKSDNVPSEEVVKKMKNYWRQLLNAKLITQRKFDNLTKAERGGLSELDKAGFIKRQLVETRQITKHVAQILDSRMNTKYDENDKLIREVKVITLKSKLVSDFRKDFQFYKVREINNYHHAHDAYLNAVVGTALIKKYPKLESEFVYGDYKVYDVRKMIAKSEQEIGKATAKYFFYSNIMNFFKTEITLANGEIRKRPLIETNGETGEIVWDKGRDFATVRKVLSMPQVNIVKKTEVQTGGFSKESILPKRNSDKLIARKKDWDPKKYGGFDSPTVAYSVLVVAKVEKGKSKKLKSVKELLGITIMERSSFEKNPIDFLEAKGYKEVKKDLIIKLPKYSLFELENGRKRMLASAGELQKGNELALPSKYVNFLYLASHYEKLKGSPEDNEQKQLFVEQHKHYLDEIIEQISEFSKRVILADANLDKVLSAYNKHRDKPIREQAENIIHLFTLTNLGAPAAFKYFDTTIDRKRYTSTKEVLDATLIHQSITGLYETRIDLSQLGGDGGGGGGGSGGTLQLDDEYRLYSPLVKPDQNIQFWLEQFPQAWAETAGMGLAKQVPPQVIQLKASATPVSVRQYPLSKEAQEGIRPHVQRLIQQGILVPVQSPWNTPLLPVRKPGTNDYRPVQDLREVNKRVQDIHPTVPNPYNLLCALPPQRSWYTVLDLKDAFFCLRLHPTSQPLFAFEWRDPGTGRTGQLTWTRLPQGFKNSPTIFNEALHRDLANFRIQHPQVTLLQYVDDLLLAGATKQDCLEGTKALLLELSDLGYRASAKKAQICRREVTYLGYSLRDGQRWLTEARKKTVVQIPAPTTAKQVREFLGTAGFCRLWIPGFATLAAPLYPLTKPKGEFSWAPEHQKAFDAIKKALLSAPALALPDVTKPFTLYVDERKGVARGVLTQTLGPWRRPVAYLSKKLDPVASGWPVCLKAIAAVAILVKDADKLTLGQNITVIAPHALENIVRQPPDRWMTNARMTHYQSLLLTERVTFAPPAALNPATLLPEETDEPVTHDCHQLLIEETGVRKDLTDIPLTGEVLTWFTDGSSYVVEGKRMAGAAVVDGTRTIWASSLPEGTSAQKAELMALTQALRLAEGKSINIYTDSRYAFATAHVHGAIYKQRGWLTSAGREIKNKEEILSLLEALHLPKRLAIIHCPGHQKAKDPISRGNQMADRVAKQAAQGVNLLAGKRTADGSEFEKRTADGSEFESPKKKAKVE

SEQ ID NO: 180 - protein, 2088 aa, synthetic construct
MPAAKRVKLDGGDKKYSIGLDIGTNSVGWAVITDEYKVPSKKFKVLGNTDRHSIKKNLIGALLFDSGETAEATRLKRTARRRYTRRKNRICYLQEIFSNEMAKVDDSFFHRLEESFLVEEDKKHERHPIFGNIVDEVAYHEKYPTIYHLRKKLVDSTDKADLRLIYLALAHMIKFRGHFLIEGDLNPDNSDVDKLFIQLVQTYNQLFEENPINASGVDAKAILSARLSKSRRLENLIAQLPGEKKNGLFGNLIALSLGLTPNFKSNFDLAEDAKLQLSKDTYDDDLDNLLAQIGDQYADLFLAAKNLSDAILLSDILRVNTEITKAPLSASMIKRYDEHHQDLTLLKALVRQQLPEKYKEIFFDQSKNGYAGYIDGGASQEEFYKFIKPILEKMDGTEELLVKLNREDLLRKQRTFDNGSIPHQIHLGELHAILRRQEDFYPFLKDNREKIEKILTFRIPYYVGPLARGNSRFAWMTRKSEETITPWNFEEVVDKGASAQSFIERMTNFDKNLPNEKVLPKHSLLYEYFTVYNELTKVKYVTEGMRKPAFLSGEQKKAIVDLLFKTNRKVTVKQLKEDYFKKIECFDSVEISGVEDRFNASLGTYHDLLKIIKDKDFLDNEENEDILEDIVLTLTLFEDREMIEERLKTYAHLFDDKVMKQLKRRRYTGWGRLSRKLINGIRDKQSGKTILDFLKSDGFANRNFMQLIHDDSLTFKEDIQKAQVSGQGDSLHEHIANLAGSPAIKKGILQTVKVVDELVKVMGRHKPENIVIEMARENQTTQKGQKNSRERMKRIEEGIKELGSQILKEHPVENTQLQNEKLYLYYLQNGRDMYVDQELDINRLSDYDVDHIVPQSFLKDDSIDNKVLTRSDKARGKSDNVPSEEVVKKMKNYWRQLLNAKLITQRKFDNLTKAERGGLSELDKAGFIKRQLVETRQITKHVAQILDSRMNTKYDENDKLIREVKVITLKSKLVSDFRKDFQFYKVREINNYHHAHDAYLNAVVGTALIKKYPKLESEFVYGDYKVYDVRKMIAKSEQEIGKATAKYFFYSNIMNFFKTEITLANGEIRKRPLIETNGETGEIVWDKGRDFATVRKVLSMPQVNIVKKTEVQTGGFSKESILPKRNSDKLIARKKDWDPKKYGGFDSPTVAYSVLVVAKVEKGKSKKLKSVKELLGITIMERSSFEKNPIDFLEAKGYKEVKKDLIIKLPKYSLFELENGRKRMLASAGELQKGNELALPSKYVNFLYLASHYEKLKGSPEDNEQKQLFVEQHKHYLDEIIEQISEFSKRVILADANLDKVLSAYNKHRDKPIREQAENIIHLFTLTNLGAPAAFKYFDTTIDRKRYTSTKEVLDATLIHQSITGLYETRIDLSQLGGDGGGGGGSSGGSGGTLQLDDEYRLYSPLVKPDQNIQFWLEQFPQAWAETAGMGLAKQVPPQVIQLKASATPVSVRQYPLSKEAQEGIRPHVQRLIQQGILVPVQSPWNTPLLPVRKPGTNDYRPVQDLREVNKRVQDIHPTVPNPYNLLCALPPQRSWYTVLDLKDAFFCLRLHPTSQPLFAFEWRDPGTGRTGQLTWTRLPQGFKNSPTIFNEALHRDLANFRIQHPQVTLLQYVDDLLLAGATKQDCLEGTKALLLELSDLGYRASAKKAQICRREVTYLGYSLRDGQRWLTEARKKTVVQIPAPTTAKQVREFLGTAGFCRLWIPGFATLAAPLYPLTKPKGEFSWAPEHQKAFDAIKKALLSAPALALPDVTKPFTLYVDERKGVARGVLTQTLGPWRRPVAYLSKKLDPVASGWPVCLKAIAAVAILVKDADKLTLGQNITVIAPHALENIVRQPPDRWMTNARMTHYQSLLLTERVTFAPPAALNPATLLPEETDEPVTHDCHQLLIEETGVRKDLTDIPLTGEVLTWFTDGSSYVVEGKRMAGAAVVDGTRTIWASSLPEGTSAQKAELMALTQALRLAEGKSINIYTDSRYAFATAHVHGAIYKQRGWLTSAGREIKNKEEILSLLEALHLPKRLAIIHCPGHQKAKDPISRGNQMADRVAKQAAQGVNLLAGKRTADGSEFEKRTADGSEFESPKKKAKVE

SEQ ID NO: 181 - protein, 2088 aa, synthetic construct
MPAAKRVKLDGGDKKYSIGLDIGTNSVGWAVITDEYKVPSKKFKVLGNTDRHSIKKNLIGALLFDSGETAEATRLKRTARRRYTRRKNRICYLQEIFSNEMAKVDDSFFHRLEESFLVEEDKKHERHPIFGNIVDEVAYHEKYPTIYHLRKKLVDSTDKADLRLIYLALAHMIKFRGHFLIEGDLNPDNSDVDKLFIQLVQTYNQLFEENPINASGVDAKAILSARLSKSRRLENLIAQLPGEKKNGLFGNLIALSLGLTPNFKSNFDLAEDAKLQLSKDTYDDDLDNLLAQIGDQYADLFLAAKNLSDAILLSDILRVNTEITKAPLSASMIKRYDEHHQDLTLLKALVRQQLPEKYKEIFFDQSKNGYAGYIDGGASQEEFYKFIKPILEKMDGTEELLVKLNREDLLRKQRTFDNGSIPHQIHLGELHAILRRQEDFYPFLKDNREKIEKILTFRIPYYVGPLARGNSRFAWMTRKSEETITPWNFEEVVDKGASAQSFIERMTNFDKNLPNEKVLPKHSLLYEYFTVYNELTKVKYVTEGMRKPAFLSGEQKKAIVDLLFKTNRKVTVKQLKEDYFKKIECFDSVEISGVEDRFNASLGTYHDLLKIIKDKDFLDNEENEDILEDIVLTLTLFEDREMIEERLKTYAHLFDDKVMKQLKRRRYTGWGRLSRKLINGIRDKQSGKTILDFLKSDGFANRNFMQLIHDDSLTFKEDIQKAQVSGQGDSLHEHIANLAGSPAIKKGILQTVKVVDELVKVMGRHKPENIVIEMARENQTTQKGQKNSRERMKRIEEGIKELGSQILKEHPVENTQLQNEKLYLYYLQNGRDMYVDQELDINRLSDYDVDHIVPQSFLKDDSIDNKVLTRSDKARGKSDNVPSEEVVKKMKNYWRQLLNAKLITQRKFDNLTKAERGGLSELDKAGFIKRQLVETRQITKHVAQILDSRMNTKYDENDKLIREVKVITLKSKLVSDFRKDFQFYKVREINNYHHAHDAYLNAVVGTALIKKYPKLESEFVYGDYKVYDVRKMIAKSEQEIGKATAKYFFYSNIMNFFKTEITLANGEIRKRPLIETNGETGEIVWDKGRDFATVRKVLSMPQVNIVKKTEVQTGGFSKESILPKRNSDKLIARKKDWDPKKYGGFDSPTVAYSVLVVAKVEKGKSKKLKSVKELLGITIMERSSFEKNPIDFLEAKGYKEVKKDLIIKLPKYSLFELENGRKRMLASAGELQKGNELALPSKYVNFLYLASHYEKLKGSPEDNEQKQLFVEQHKHYLDEIIEQISEFSKRVILADANLDKVLSAYNKHRDKPIREQAENIIHLFTLTNLGAPAAFKYFDTTIDRKRYTSTKEVLDATLIHQSITGLYETRIDLSQLGGDGGGSSGSSGSSGGTLQLDDEYRLYSPLVKPDQNIQFWLEQFPQAWAETAGMGLAKQVPPQVIQLKASATPVSVRQYPLSKEAQEGIRPHVQRLIQQGILVPVQSPWNTPLLPVRKPGTNDYRPVQDLREVNKRVQDIHPTVPNPYNLLCALPPQRSWYTVLDLKDAFFCLRLHPTSQPLFAFEWRDPGTGRTGQLTWTRLPQGFKNSPTIFNEALHRDLANFRIQHPQVTLLQYVDDLLLAGATKQDCLEGTKALLLELSDLGYRASAKKAQICRREVTYLGYSLRDGQRWLTEARKKTVVQIPAPTTAKQVREFLGTAGFCRLWIPGFATLAAPLYPLTKPKGEFSWAPEHQKAFDAIKKALLSAPALALPDVTKPFTLYVDERKGVARGVLTQTLGPWRRPVAYLSKKLDPVASGWPVCLKAIAAVAILVKDADKLTLGQNITVIAPHALENIVRQPPDRWMTNARMTHYQSLLLTERVTFAPPAALNPATLLPEETDEPVTHDCHQLLIEETGVRKDLTDIPLTGEVLTWFTDGSSYVVEGKRMAGAAVVDGTRTIWASSLPEGTSAQKAELMALTQALRLAEGKSINIYTDSRYAFATAHVHGAIYKQRGWLTSAGREIKNKEEILSLLEALHLPKRLAIIHCPGHQKAKDPISRGNQMADRVAKQAAQGVNLLAGKRTADGSEFEKRTADGSEFESPKKKAKVE

SEQ ID NO: 182 - protein, 2088 aa, synthetic construct
MPAAKRVKLDGGDKKYSIGLDIGTNSVGWAVITDEYKVPSKKFKVLGNTDRHSIKKNLIGALLFDSGETAEATRLKRTARRRYTRRKNRICYLQEIFSNEMAKVDDSFFHRLEESFLVEEDKKHERHPIFGNIVDEVAYHEKYPTIYHLRKKLVDSTDKADLRLIYLALAHMIKFRGHFLIEGDLNPDNSDVDKLFIQLVQTYNQLFEENPINASGVDAKAILSARLSKSRRLENLIAQLPGEKKNGLFGNLIALSLGLTPNFKSNFDLAEDAKLQLSKDTYDDDLDNLLAQIGDQYADLFLAAKNLSDAILLSDILRVNTEITKAPLSASMIKRYDEHHQDLTLLKALVRQQLPEKYKEIFFDQSKNGYAGYIDGGASQEEFYKFIKPILEKMDGTEELLVKLNREDLLRKQRTFDNGSIPHQIHLGELHAILRRQEDFYPFLKDNREKIEKILTFRIPYYVGPLARGNSRFAWMTRKSEETITPWNFEEVVDKGASAQSFIERMTNFDKNLPNEKVLPKHSLLYEYFTVYNELTKVKYVTEGMRKPAFLSGEQKKAIVDLLFKTNRKVTVKQLKEDYFKKIECFDSVEISGVEDRFNASLGTYHDLLKIIKDKDFLDNEENEDILEDIVLTLTLFEDREMIEERLKTYAHLFDDKVMKQLKRRRYTGWGRLSRKLINGIRDKQSGKTILDFLKSDGFANRNFMQLIHDDSLTFKEDIQKAQVSGQGDSLHEHIANLAGSPAIKKGILQTVKVVDELVKVMGRHKPENIVIEMARENQTTQKGQKNSRERMKRIEEGIKELGSQILKEHPVENTQLQNEKLYLYYLQNGRDMYVDQELDINRLSDYDVDHIVPQSFLKDDSIDNKVLTRSDKARGKSDNVPSEEVVKKMKNYWRQLLNAKLITQRKFDNLTKAERGGLSELDKAGFIKRQLVETRQITKHVAQILDSRMNTKYDENDKLIREVKVITLKSKLVSDFRKDFQFYKVREINNYHHAHDAYLNAVVGTALIKKYPKLESEFVYGDYKVYDVRKMIAKSEQEIGKATAKYFFYSNIMNFFKTEITLANGEIRKRPLIETNGETGEIVWDKGRDFATVRKVLSMPQVNIVKKTEVQTGGFSKESILPKRNSDKLIARKKDWDPKKYGGFDSPTVAYSVLVVAKVEKGKSKKLKSVKELLGITIMERSSFEKNPIDFLEAKGYKEVKKDLIIKLPKYSLFELENGRKRMLASAGELQKGNELALPSKYVNFLYLASHYEKLKGSPEDNEQKQLFVEQHKHYLDEIIEQISEFSKRVILADANLDKVLSAYNKHRDKPIREQAENIIHLFTLTNLGAPAAFKYFDTTIDRKRYTSTKEVLDATLIHQSITGLYETRIDLSQLGGDGGGSSGGSGGGGGTLQLDDEYRLYSPLVKPDQNIQFWLEQFPQAWAETAGMGLAKQVPPQVIQLKASATPVSVRQYPLSKEAQEGIRPHVQRLIQQGILVPVQSPWNTPLLPVRKPGTNDYRPVQDLREVNKRVQDIHPTVPNPYNLLCALPPQRSWYTVLDLKDAFFCLRLHPTSQPLFAFEWRDPGTGRTGQLTWTRLPQGFKNSPTIFNEALHRDLANFRIQHPQVTLLQYVDDLLLAGATKQDCLEGTKALLLELSDLGYRASAKKAQICRREVTYLGYSLRDGQRWLTEARKKTVVQIPAPTTAKQVREFLGTAGFCRLWIPGFATLAAPLYPLTKPKGEFSWAPEHQKAFDAIKKALLSAPALALPDVTKPFTLYVDERKGVARGVLTQTLGPWRRPVAYLSKKLDPVASGWPVCLKAIAAVAILVKDADKLTLGQNITVIAPHALENIVRQPPDRWMTNARMTHYQSLLLTERVTFAPPAALNPATLLPEETDEPVTHDCHQLLIEETGVRKDLTDIPLTGEVLTWFTDGSSYVVEGKRMAGAAVVDGTRTIWASSLPEGTSAQKAELMALTQALRLAEGKSINIYTDSRYAFATAHVHGAIYKQRGWLTSAGREIKNKEEILSLLEALHLPKRLAIIHCPGHQKAKDPISRGNQMADRVAKQAAQGVNLLAGKRTADGSEFEKRTADGSEFESPKKKAKVE

SEQ ID NO: 183 - protein, 2085 aa, synthetic construct
MPAAKRVKLDGGDKKYSIGLDIGTNSVGWAVITDEYKVPSKKFKVLGNTDRHSIKKNLIGALLFDSGETAEATRLKRTARRRYTRRKNRICYLQEIFSNEMAKVDDSFFHRLEESFLVEEDKKHERHPIFGNIVDEVAYHEKYPTIYHLRKKLVDSTDKADLRLIYLALAHMIKFRGHFLIEGDLNPDNSDVDKLFIQLVQTYNQLFEENPINASGVDAKAILSARLSKSRRLENLIAQLPGEKKNGLFGNLIALSLGLTPNFKSNFDLAEDAKLQLSKDTYDDDLDNLLAQIGDQYADLFLAAKNLSDAILLSDILRVNTEITKAPLSASMIKRYDEHHQDLTLLKALVRQQLPEKYKEIFFDQSKNGYAGYIDGGASQEEFYKFIKPILEKMDGTEELLVKLNREDLLRKQRTFDNGSIPHQIHLGELHAILRRQEDFYPFLKDNREKIEKILTFRIPYYVGPLARGNSRFAWMTRKSEETITPWNFEEVVDKGASAQSFIERMTNFDKNLPNEKVLPKHSLLYEYFTVYNELTKVKYVTEGMRKPAFLSGEQKKAIVDLLFKTNRKVTVKQLKEDYFKKIECFDSVEISGVEDRFNASLGTYHDLLKIIKDKDFLDNEENEDILEDIVLTLTLFEDREMIEERLKTYAHLFDDKVMKQLKRRRYTGWGRLSRKLINGIRDKQSGKTILDFLKSDGFANRNFMQLIHDDSLTFKEDIQKAQVSGQGDSLHEHIANLAGSPAIKKGILQTVKVVDELVKVMGRHKPENIVIEMARENQTTQKGQKNSRERMKRIEEGIKELGSQILKEHPVENTQLQNEKLYLYYLQNGRDMYVDQELDINRLSDYDVDHIVPQSFLKDDSIDNKVLTRSDKARGKSDNVPSEEVVKKMKNYWRQLLNAKLITQRKFDNLTKAERGGLSELDKAGFIKRQLVETRQITKHVAQILDSRMNTKYDENDKLIREVKVITLKSKLVSDFRKDFQFYKVREINNYHHAHDAYLNAVVGTALIKKYPKLESEFVYGDYKVYDVRKMIAKSEQEIGKATAKYFFYSNIMNFFKTEITLANGEIRKRPLIETNGETGEIVWDKGRDFATVRKVLSMPQVNIVKKTEVQTGGFSKESILPKRNSDKLIARKKDWDPKKYGGFDSPTVAYSVLVVAKVEKGKSKKLKSVKELLGITIMERSSFEKNPIDFLEAKGYKEVKKDLIIKLPKYSLFELENGRKRMLASAGELQKGNELALPSKYVNFLYLASHYEKLKGSPEDNEQKQLFVEQHKHYLDEIIEQISEFSKRVILADANLDKVLSAYNKHRDKPIREQAENIIHLFTLTNLGAPAAFKYFDTTIDRKRYTSTKEVLDATLIHQSITGLYETRIDLSQLGGDGGGGGGGGGGTLQLDDEYRLYSPLVKPDQNIQFWLEQFPQAWAETAGMGLAKQVPPQVIQLKASATPVSVRQYPLSKEAQEGIRPHVQRLIQQGILVPVQSPWNTPLLPVRKPGTNDYRPVQDLREVNKRVQDIHPTVPNPYNLLCALPPQRSWYTVLDLKDAFFCLRLHPTSQPLFAFEWRDPGTGRTGQLTWTRLPQGFKNSPTIFNEALHRDLANFRIQHPQVTLLQYVDDLLLAGATKQDCLEGTKALLLELSDLGYRASAKKAQICRREVTYLGYSLRDGQRWLTEARKKTVVQIPAPTTAKQVREFLGTAGFCRLWIPGFATLAAPLYPLTKPKGEFSWAPEHQKAFDAIKKALLSAPALALPDVTKPFTLYVDERKGVARGVLTQTLGPWRRPVAYLSKKLDPVASGWPVCLKAIAAVAILVKDADKLTLGQNITVIAPHALENIVRQPPDRWMTNARMTHYQSLLLTERVTFAPPAALNPATLLPEETDEPVTHDCHQLLIEETGVRKDLTDIPLTGEVLTWFTDGSSYVVEGKRMAGAAVVDGTRTIWASSLPEGTSAQKAELMALTQALRLAEGKSINIYTDSRYAFATAHVHGAIYKQRGWLTSAGREIKNKEEILSLLEALHLPKRLAIIHCPGHQKAKDPISRGNQMADRVAKQAAQGVNLLAGKRTADGSEFEKRTADGSEFESPKKKAKVE

SEQ ID NO: 184 - protein, 2085 aa, synthetic construct
MPAAKRVKLDGGDKKYSIGLDIGTNSVGWAVITDEYKVPSKKFKVLGNTDRHSIKKNLIGALLFDSGETAEATRLKRTARRRYTRRKNRICYLQEIFSNEMAKVDDSFFHRLEESFLVEEDKKHERHPIFGNIVDEVAYHEKYPTIYHLRKKLVDSTDKADLRLIYLALAHMIKFRGHFLIEGDLNPDNSDVDKLFIQLVQTYNQLFEENPINASGVDAKAILSARLSKSRRLENLIAQLPGEKKNGLFGNLIALSLGLTPNFKSNFDLAEDAKLQLSKDTYDDDLDNLLAQIGDQYADLFLAAKNLSDAILLSDILRVNTEITKAPLSASMIKRYDEHHQDLTLLKALVRQQLPEKYKEIFFDQSKNGYAGYIDGGASQEEFYKFIKPILEKMDGTEELLVKLNREDLLRKQRTFDNGSIPHQIHLGELHAILRRQEDFYPFLKDNREKIEKILTFRIPYYVGPLARGNSRFAWMTRKSEETITPWNFEEVVDKGASAQSFIERMTNFDKNLPNEKVLPKHSLLYEYFTVYNELTKVKYVTEGMRKPAFLSGEQKKAIVDLLFKTNRKVTVKQLKEDYFKKIECFDSVEISGVEDRFNASLGTYHDLLKIIKDKDFLDNEENEDILEDIVLTLTLFEDREMIEERLKTYAHLFDDKVMKQLKRRRYTGWGRLSRKLINGIRDKQSGKTILDFLKSDGFANRNFMQLIHDDSLTFKEDIQKAQVSGQGDSLHEHIANLAGSPAIKKGILQTVKVVDELVKVMGRHKPENIVIEMARENQTTQKGQKNSRERMKRIEEGIKELGSQILKEHPVENTQLQNEKLYLYYLQNGRDMYVDQELDINRLSDYDVDHIVPQSFLKDDSIDNKVLTRSDKARGKSDNVPSEEVVKKMKNYWRQLLNAKLITQRKFDNLTKAERGGLSELDKAGFIKRQLVETRQITKHVAQILDSRMNTKYDENDKLIREVKVITLKSKLVSDFRKDFQFYKVREINNYHHAHDAYLNAVVGTALIKKYPKLESEFVYGDYKVYDVRKMIAKSEQEIGKATAKYFFYSNIMNFFKTEITLANGEIRKRPLIETNGETGEIVWDKGRDFATVRKVLSMPQVNIVKKTEVQTGGFSKESILPKRNSDKLIARKKDWDPKKYGGFDSPTVAYSVLVVAKVEKGKSKKLKSVKELLGITIMERSSFEKNPIDFLEAKGYKEVKKDLIIKLPKYSLFELENGRKRMLASAGELQKGNELALPSKYVNFLYLASHYEKLKGSPEDNEQKQLFVEQHKHYLDEIIEQISEFSKRVILADANLDKVLSAYNKHRDKPIREQAENIIHLFTLTNLGAPAAFKYFDTTIDRKRYTSTKEVLDATLIHQSITGLYETRIDLSQLGGDGGGGSGGGGGTLQLDDEYRLYSPLVKPDQNIQFWLEQFPQAWAETAGMGLAKQVPPQVIQLKASATPVSVRQYPLSKEAQEGIRPHVQRLIQQGILVPVQSPWNTPLLPVRKPGTNDYRPVQDLREVNKRVQDIHPTVPNPYNLLCALPPQRSWYTVLDLKDAFFCLRLHPTSQPLFAFEWRDPGTGRTGQLTWTRLPQGFKNSPTIFNEALHRDLANFRIQHPQVTLLQYVDDLLLAGATKQDCLEGTKALLLELSDLGYRASAKKAQICRREVTYLGYSLRDGQRWLTEARKKTVVQIPAPTTAKQVREFLGTAGFCRLWIPGFATLAAPLYPLTKPKGEFSWAPEHQKAFDAIKKALLSAPALALPDVTKPFTLYVDERKGVARGVLTQTLGPWRRPVAYLSKKLDPVASGWPVCLKAIAAVAILVKDADKLTLGQNITVIAPHALENIVRQPPDRWMTNARMTHYQSLLLTERVTFAPPAALNPATLLPEETDEPVTHDCHQLLIEETGVRKDLTDIPLTGEVLTWFTDGSSYVVEGKRMAGAAVVDGTRTIWASSLPEGTSAQKAELMALTQALRLAEGKSINIYTDSRYAFATAHVHGAIYKQRGWLTSAGREIKNKEEILSLLEALHLPKRLAIIHCPGHQKAKDPISRGNQMADRVAKQAAQGVNLLAGKRTADGSEFEKRTADGSEFESPKKKAKVE

SEQ ID NO: 185 - protein, 2087 aa, synthetic construct
MPAAKRVKLDGGDKKYSIGLDIGTNSVGWAVITDEYKVPSKKFKVLGNTDRHSIKKNLIGALLFDSGETAEATRLKRTARRRYTRRKNRICYLQEIFSNEMAKVDDSFFHRLEESFLVEEDKKHERHPIFGNIVDEVAYHEKYPTIYHLRKKLVDSTDKADLRLIYLALAHMIKFRGHFLIEGDLNPDNSDVDKLFIQLVQTYNQLFEENPINASGVDAKAILSARLSKSRRLENLIAQLPGEKKNGLFGNLIALSLGLTPNFKSNFDLAEDAKLQLSKDTYDDDLDNLLAQIGDQYADLFLAAKNLSDAILLSDILRVNTEITKAPLSASMIKRYDEHHQDLTLLKALVRQQLPEKYKEIFFDQSKNGYAGYIDGGASQEEFYKFIKPILEKMDGTEELLVKLNREDLLRKQRTFDNGSIPHQIHLGELHAILRRQEDFYPFLKDNREKIEKILTFRIPYYVGPLARGNSRFAWMTRKSEETITPWNFEEVVDKGASAQSFIERMTNFDKNLPNEKVLPKHSLLYEYFTVYNELTKVKYVTEGMRKPAFLSGEQKKAIVDLLFKTNRKVTVKQLKEDYFKKIECFDSVEISGVEDRFNASLGTYHDLLKIIKDKDFLDNEENEDILEDIVLTLTLFEDREMIEERLKTYAHLFDDKVMKQLKRRRYTGWGRLSRKLINGIRDKQSGKTILDFLKSDGFANRNFMQLIHDDSLTFKEDIQKAQVSGQGDSLHEHIANLAGSPAIKKGILQTVKVVDELVKVMGRHKPENIVIEMARENQTTQKGQKNSRERMKRIEEGIKELGSQILKEHPVENTQLQNEKLYLYYLQNGRDMYVDQELDINRLSDYDVDHIVPQSFLKDDSIDNKVLTRSDKARGKSDNVPSEEVVKKMKNYWRQLLNAKLITQRKFDNLTKAERGGLSELDKAGFIKRQLVETRQITKHVAQILDSRMNTKYDENDKLIREVKVITLKSKLVSDFRKDFQFYKVREINNYHHAHDAYLNAVVGTALIKKYPKLESEFVYGDYKVYDVRKMIAKSEQEIGKATAKYFFYSNIMNFFKTEITLANGEIRKRPLIETNGETGEIVWDKGRDFATVRKVLSMPQVNIVKKTEVQTGGFSKESILPKRNSDKLIARKKDWDPKKYGGFDSPTVAYSVLVVAKVEKGKSKKLKSVKELLGITIMERSSFEKNPIDFLEAKGYKEVKKDLIIKLPKYSLFELENGRKRMLASAGELQKGNELALPSKYVNFLYLASHYEKLKGSPEDNEQKQLFVEQHKHYLDEIIEQISEFSKRVILADANLDKVLSAYNKHRDKPIREQAENIIHLFTLTNLGAPAAFKYFDTTIDRKRYTSTKEVLDATLIHQSITGLYETRIDLSQLGGDGGGGGEAAAKGGTLQLDDEYRLYSPLVKPDQNIQFWLEQFPQAWAETAGMGLAKQVPPQVIQLKASATPVSVRQYPLSKEAQEGIRPHVQRLIQQGILVPVQSPWNTPLLPVRKPGTNDYRPVQDLREVNKRVQDIHPTVPNPYNLLCALPPQRSWYTVLDLKDAFFCLRLHPTSQPLFAFEWRDPGTGRTGQLTWTRLPQGFKNSPTIFNEALHRDLANFRIQHPQVTLLQYVDDLLLAGATKQDCLEGTKALLLELSDLGYRASAKKAQICRREVTYLGYSLRDGQRWLTEARKKTVVQIPAPTTAKQVREFLGTAGFCRLWIPGFATLAAPLYPLTKPKGEFSWAPEHQKAFDAIKKALLSAPALALPDVTKPFTLYVDERKGVARGVLTQTLGPWRRPVAYLSKKLDPVASGWPVCLKAIAAVAILVKDADKLTLGQNITVIAPHALENIVRQPPDRWMTNARMTHYQSLLLTERVTFAPPAALNPATLLPEETDEPVTHDCHQLLIEETGVRKDLTDIPLTGEVLTWFTDGSSYVVEGKRMAGAAVVDGTRTIWASSLPEGTSAQKAELMALTQALRLAEGKSINIYTDSRYAFATAHVHGAIYKQRGWLTSAGREIKNKEEILSLLEALHLPKRLAIIHCPGHQKAKDPISRGNQMADRVAKQAAQGVNLLAGKRTADGSEFEKRTADGSEFESPKKKAKVE

SEQ ID NO: 186 - protein, 2085 aa, synthetic construct
MPAAKRVKLDGGDKKYSIGLDIGTNSVGWAVITDEYKVPSKKFKVLGNTDRHSIKKNLIGALLFDSGETAEATRLKRTARRRYTRRKNRICYLQEIFSNEMAKVDDSFFHRLEESFLVEEDKKHERHPIFGNIVDEVAYHEKYPTIYHLRKKLVDSTDKADLRLIYLALAHMIKFRGHFLIEGDLNPDNSDVDKLFIQLVQTYNQLFEENPINASGVDAKAILSARLSKSRRLENLIAQLPGEKKNGLFGNLIALSLGLTPNFKSNFDLAEDAKLQLSKDTYDDDLDNLLAQIGDQYADLFLAAKNLSDAILLSDILRVNTEITKAPLSASMIKRYDEHHQDLTLLKALVRQQLPEKYKEIFFDQSKNGYAGYIDGGASQEEFYKFIKPILEKMDGTEELLVKLNREDLLRKQRTFDNGSIPHQIHLGELHAILRRQEDFYPFLKDNREKIEKILTFRIPYYVGPLARGNSRFAWMTRKSEETITPWNFEEVVDKGASAQSFIERMTNFDKNLPNEKVLPKHSLLYEYFTVYNELTKVKYVTEGMRKPAFLSGEQKKAIVDLLFKTNRKVTVKQLKEDYFKKIECFDSVEISGVEDRFNASLGTYHDLLKIIKDKDFLDNEENEDILEDIVLTLTLFEDREMIEERLKTYAHLFDDKVMKQLKRRRYTGWGRLSRKLINGIRDKQSGKTILDFLKSDGFANRNFMQLIHDDSLTFKEDIQKAQVSGQGDSLHEHIANLAGSPAIKKGILQTVKVVDELVKVMGRHKPENIVIEMARENQTTQKGQKNSRERMKRIEEGIKELGSQILKEHPVENTQLQNEKLYLYYLQNGRDMYVDQELDINRLSDYDVDHIVPQSFLKDDSIDNKVLTRSDKARGKSDNVPSEEVVKKMKNYWRQLLNAKLITQRKFDNLTKAERGGLSELDKAGFIKRQLVETRQITKHVAQILDSRMNTKYDENDKLIREVKVITLKSKLVSDFRKDFQFYKVREINNYHHAHDAYLNAVVGTALIKKYPKLESEFVYGDYKVYDVRKMIAKSEQEIGKATAKYFFYSNIMNFFKTEITLANGEIRKRPLIETNGETGEIVWDKGRDFATVRKVLSMPQVNIVKKTEVQTGGFSKESILPKRNSDKLIARKKDWDPKKYGGFDSPTVAYSVLVVAKVEKGKSKKLKSVKELLGITIMERSSFEKNPIDFLEAKGYKEVKKDLIIKLPKYSLFELENGRKRMLASAGELQKGNELALPSKYVNFLYLASHYEKLKGSPEDNEQKQLFVEQHKHYLDEIIEQISEFSKRVILADANLDKVLSAYNKHRDKPIREQAENIIHLFTLTNLGAPAAFKYFDTTIDRKRYTSTKEVLDATLIHQSITGLYETRIDLSQLGGDGGGGSGGSGGTLQLDDEYRLYSPLVKPDQNIQFWLEQFPQAWAETAGMGLAKQVPPQVIQLKASATPVSVRQYPLSKEAQEGIRPHVQRLIQQGILVPVQSPWNTPLLPVRKPGTNDYRPVQDLREVNKRVQDIHPTVPNPYNLLCALPPQRSWYTVLDLKDAFFCLRLHPTSQPLFAFEWRDPGTGRTGQLTWTRLPQGFKNSPTIFNEALHRDLANFRIQHPQVTLLQYVDDLLLAGATKQDCLEGTKALLLELSDLGYRASAKKAQICRREVTYLGYSLRDGQRWLTEARKKTVVQIPAPTTAKQVREFLGTAGFCRLWIPGFATLAAPLYPLTKPKGEFSWAPEHQKAFDAIKKALLSAPALALPDVTKPFTLYVDERKGVARGVLTQTLGPWRRPVAYLSKKLDPVASGWPVCLKAIAAVAILVKDADKLTLGQNITVIAPHALENIVRQPPDRWMTNARMTHYQSLLLTERVTFAPPAALNPATLLPEETDEPVTHDCHQLLIEETGVRKDLTDIPLTGEVLTWFTDGSSYVVEGKRMAGAAVVDGTRTIWASSLPEGTSAQKAELMALTQALRLAEGKSINIYTDSRYAFATAHVHGAIYKQRGWLTSAGREIKNKEEILSLLEALHLPKRLAIIHCPGHQKAKDPISRGNQMADRVAKQAAQGVNLLAGKRTADGSEFEKRTADGSEFESPKKKAKVE

SEQ ID NO: 187 - protein, 1999 aa, synthetic construct
MPAAKRVKLDGGDKKYSIGLDIGTNSVGWAVITDEYKVPSKKFKVLGNTDRHSIKKNLIGALLFDSGETAEATRLKRTARRRYTRRKNRICYLQEIFSNEMAKVDDSFFHRLEESFLVEEDKKHERHPIFGNIVDEVAYHEKYPTIYHLRKKLVDSTDKADLRLIYLALAHMIKFRGHFLIEGDLNPDNSDVDKLFIQLVQTYNQLFEENPINASGVDAKAILSARLSKSRRLENLIAQLPGEKKNGLFGNLIALSLGLTPNFKSNFDLAEDAKLQLSKDTYDDDLDNLLAQIGDQYADLFLAAKNLSDAILLSDILRVNTEITKAPLSASMIKRYDEHHQDLTLLKALVRQQLPEKYKEIFFDQSKNGYAGYIDGGASQEEFYKFIKPILEKMDGTEELLVKLNREDLLRKQRTFDNGSIPHQIHLGELHAILRRQEDFYPFLKDNREKIEKILTFRIPYYVGPLARGNSRFAWMTRKSEETITPWNFEEVVDKGASAQSFIERMTNFDKNLPNEKVLPKHSLLYEYFTVYNELTKVKYVTEGMRKPAFLSGEQKKAIVDLLFKTNRKVTVKQLKEDYFKKIECFDSVEISGVEDRFNASLGTYHDLLKIIKDKDFLDNEENEDILEDIVLTLTLFEDREMIEERLKTYAHLFDDKVMKQLKRRRYTGWGRLSRKLINGIRDKQSGKTILDFLKSDGFANRNFMQLIHDDSLTFKEDIQKAQVSGQGDSLHEHIANLAGSPAIKKGILQTVKVVDELVKVMGRHKPENIVIEMARENQTTQKGQKNSRERMKRIEEGIKELGSQILKEHPVENTQLQNEKLYLYYLQNGRDMYVDQELDINRLSDYDVDHIVPQSFLKDDSIDNKVLTRSDKARGKSDNVPSEEVVKKMKNYWRQLLNAKLITQRKFDNLTKAERGGLSELDKAGFIKRQLVETRQITKHVAQILDSRMNTKYDENDKLIREVKVITLKSKLVSDFRKDFQFYKVREINNYHHAHDAYLNAVVGTALIKKYPKLESEFVYGDYKVYDVRKMIAKSEQEIGKATAKYFFYSNIMNFFKTEITLANGEIRKRPLIETNGETGEIVWDKGRDFATVRKVLSMPQVNIVKKTEVQTGGFSKESILPKRNSDKLIARKKDWDPKKYGGFDSPTVAYSVLVVAKVEKGKSKKLKSVKELLGITIMERSSFEKNPIDFLEAKGYKEVKKDLIIKLPKYSLFELENGRKRMLASAGELQKGNELALPSKYVNFLYLASHYEKLKGSPEDNEQKQLFVEQHKHYLDEIIEQISEFSKRVILADANLDKVLSAYNKHRDKPIREQAENIIHLFTLTNLGAPAAFKYFDTTIDRKRYTSTKEVLDATLIHQSITGLYETRIDLSQLGGDGGGGSGGGGSSGGGVLDTPPSHIGLEHLPPPPEVPQFPLNLERLQALQDLVHRSLEAGYISPWDGPGNNPVFPVRKPNGAWRFVHDLRATNALTKPIPALSPGPPDLTAIPTHPPHIICLDLKDAFFQIPVEDRFRFYLSFTLPSPGGLQPHRRFAWRVLPQGFINSPALFNRALQEPLRQVSAAFSQSLLVSYMDDILYASPTEEQRSQCYQALAARLRDLGFQVASEKTSQTPSPVPFLGQMVHEQIVTYQSLPTLQISSPISLHQLQAVLGDLQWVSRGTPTTRRPLQLLYSSLKRHHDPRAIIQLSPEQLQGIAELRQALSHNARSRYNEQEPLLAYVHLTRAGSTLVLFQKGAQFPLAYFQTPLTDNQASPWGLLLLLGCQYLQTQALSSYAKPILKYYHNLPKTSLDNWIQSSEDPRVQELLQLWPQISSQGIQPPGPWKTLITRAEVFLTPQFSPDPIPAALCLFSDGATGRGAYCLWKDHLLDFQAVPAPESAQKGELAGLLAGLAAAPPEPVNIWVDSKYLYSLLRTWVLGAWLQPDPVPSYALLYKSLLRHPAIVVGHVRSHSSASHPIASLNNYVDQLAGKRTADGSEFEKRTADGSEFESPKKKAKVE

SEQ ID NO: 188 - protein, 2015 aa, synthetic construct
MPAAKRVKLDGGDKKYSIGLDIGTNSVGWAVITDEYKVPSKKFKVLGNTDRHSIKKNLIGALLFDSGETAEATRLKRTARRRYTRRKNRICYLQEIFSNEMAKVDDSFFHRLEESFLVEEDKKHERHPIFGNIVDEVAYHEKYPTIYHLRKKLVDSTDKADLRLIYLALAHMIKFRGHFLIEGDLNPDNSDVDKLFIQLVQTYNQLFEENPINASGVDAKAILSARLSKSRRLENLIAQLPGEKKNGLFGNLIALSLGLTPNFKSNFDLAEDAKLQLSKDTYDDDLDNLLAQIGDQYADLFLAAKNLSDAILLSDILRVNTEITKAPLSASMIKRYDEHHQDLTLLKALVRQQLPEKYKEIFFDQSKNGYAGYIDGGASQEEFYKFIKPILEKMDGTEELLVKLNREDLLRKQRTFDNGSIPHQIHLGELHAILRRQEDFYPFLKDNREKIEKILTFRIPYYVGPLARGNSRFAWMTRKSEETITPWNFEEVVDKGASAQSFIERMTNFDKNLPNEKVLPKHSLLYEYFTVYNELTKVKYVTEGMRKPAFLSGEQKKAIVDLLFKTNRKVTVKQLKEDYFKKIECFDSVEISGVEDRFNASLGTYHDLLKIIKDKDFLDNEENEDILEDIVLTLTLFEDREMIEERLKTYAHLFDDKVMKQLKRRRYTGWGRLSRKLINGIRDKQSGKTILDFLKSDGFANRNFMQLIHDDSLTFKEDIQKAQVSGQGDSLHEHIANLAGSPAIKKGILQTVKVVDELVKVMGRHKPENIVIEMARENQTTQKGQKNSRERMKRIEEGIKELGSQILKEHPVENTQLQNEKLYLYYLQNGRDMYVDQELDINRLSDYDVDHIVPQSFLKDDSIDNKVLTRSDKARGKSDNVPSEEVVKKMKNYWRQLLNAKLITQRKFDNLTKAERGGLSELDKAGFIKRQLVETRQITKHVAQILDSRMNTKYDENDKLIREVKVITLKSKLVSDFRKDFQFYKVREINNYHHAHDAYLNAVVGTALIKKYPKLESEFVYGDYKVYDVRKMIAKSEQEIGKATAKYFFYSNIMNFFKTEITLANGEIRKRPLIETNGETGEIVWDKGRDFATVRKVLSMPQVNIVKKTEVQTGGFSKESILPKRNSDKLIARKKDWDPKKYGGFDSPTVAYSVLVVAKVEKGKSKKLKSVKELLGITIMERSSFEKNPIDFLEAKGYKEVKKDLIIKLPKYSLFELENGRKRMLASAGELQKGNELALPSKYVNFLYLASHYEKLKGSPEDNEQKQLFVEQHKHYLDEIIEQISEFSKRVILADANLDKVLSAYNKHRDKPIREQAENIIHLFTLTNLGAPAAFKYFDTTIDRKRYTSTKEVLDATLIHQSITGLYETRIDLSQLGGDGGGGGGSGGGGSGGGGSGGGGSGGGGSGGGVLDTPPSHIGLEHLPPPPEVPQFPLNLERLQALQDLVHRSLEAGYISPWDGPGNNPVFPVRKPNGAWRFVHDLRATNALTKPIPALSPGPPDLTAIPTHPPHIICLDLKDAFFQIPVEDRFRFYLSFTLPSPGGLQPHRRFAWRVLPQGFINSPALFNRALQEPLRQVSAAFSQSLLVSYMDDILYASPTEEQRSQCYQALAARLRDLGFQVASEKTSQTPSPVPFLGQMVHEQIVTYQSLPTLQISSPISLHQLQAVLGDLQWVSRGTPTTRRPLQLLYSSLKRHHDPRAIIQLSPEQLQGIAELRQALSHNARSRYNEQEPLLAYVHLTRAGSTLVLFQKGAQFPLAYFQTPLTDNQASPWGLLLLLGCQYLQTQALSSYAKPILKYYHNLPKTSLDNWIQSSEDPRVQELLQLWPQISSQGIQPPGPWKTLITRAEVFLTPQFSPDPIPAALCLFSDGATGRGAYCLWKDHLLDFQAVPAPESAQKGELAGLLAGLAAAPPEPVNIWVDSKYLYSLLRTWVLGAWLQPDPVPSYALLYKSLLRHPAIVVGHVRSHSSASHPIASLNNYVDQLAGKRTADGSEFEKRTADGSEFESPKKKAKVE

SEQ ID NO: 189 - protein, 1996 aa, synthetic construct
MPAAKRVKLDGGDKKYSIGLDIGTNSVGWAVITDEYKVPSKKFKVLGNTDRHSIKKNLIGALLFDSGETAEATRLKRTARRRYTRRKNRICYLQEIFSNEMAKVDDSFFHRLEESFLVEEDKKHERHPIFGNIVDEVAYHEKYPTIYHLRKKLVDSTDKADLRLIYLALAHMIKFRGHFLIEGDLNPDNSDVDKLFIQLVQTYNQLFEENPINASGVDAKAILSARLSKSRRLENLIAQLPGEKKNGLFGNLIALSLGLTPNFKSNFDLAEDAKLQLSKDTYDDDLDNLLAQIGDQYADLFLAAKNLSDAILLSDILRVNTEITKAPLSASMIKRYDEHHQDLTLLKALVRQQLPEKYKEIFFDQSKNGYAGYIDGGASQEEFYKFIKPILEKMDGTEELLVKLNREDLLRKQRTFDNGSIPHQIHLGELHAILRRQEDFYPFLKDNREKIEKILTFRIPYYVGPLARGNSRFAWMTRKSEETITPWNFEEVVDKGASAQSFIERMTNFDKNLPNEKVLPKHSLLYEYFTVYNELTKVKYVTEGMRKPAFLSGEQKKAIVDLLFKTNRKVTVKQLKEDYFKKIECFDSVEISGVEDRFNASLGTYHDLLKIIKDKDFLDNEENEDILEDIVLTLTLFEDREMIEERLKTYAHLFDDKVMKQLKRRRYTGWGRLSRKLINGIRDKQSGKTILDFLKSDGFANRNFMQLIHDDSLTFKEDIQKAQVSGQGDSLHEHIANLAGSPAIKKGILQTVKVVDELVKVMGRHKPENIVIEMARENQTTQKGQKNSRERMKRIEEGIKELGSQILKEHPVENTQLQNEKLYLYYLQNGRDMYVDQELDINRLSDYDVDHIVPQSFLKDDSIDNKVLTRSDKARGKSDNVPSEEVVKKMKNYWRQLLNAKLITQRKFDNLTKAERGGLSELDKAGFIKRQLVETRQITKHVAQILDSRMNTKYDENDKLIREVKVITLKSKLVSDFRKDFQFYKVREINNYHHAHDAYLNAVVGTALIKKYPKLESEFVYGDYKVYDVRKMIAKSEQEIGKATAKYFFYSNIMNFFKTEITLANGEIRKRPLIETNGETGEIVWDKGRDFATVRKVLSMPQVNIVKKTEVQTGGFSKESILPKRNSDKLIARKKDWDPKKYGGFDSPTVAYSVLVVAKVEKGKSKKLKSVKELLGITIMERSSFEKNPIDFLEAKGYKEVKKDLIIKLPKYSLFELENGRKRMLASAGELQKGNELALPSKYVNFLYLASHYEKLKGSPEDNEQKQLFVEQHKHYLDEIIEQISEFSKRVILADANLDKVLSAYNKHRDKPIREQAENIIHLFTLTNLGAPAAFKYFDTTIDRKRYTSTKEVLDATLIHQSITGLYETRIDLSQLGGDGGGGGGSSGGGVLDTPPSHIGLEHLPPPPEVPQFPLNLERLQALQDLVHRSLEAGYISPWDGPGNNPVFPVRKPNGAWRFVHDLRATNALTKPIPALSPGPPDLTAIPTHPPHIICLDLKDAFFQIPVEDRFRFYLSFTLPSPGGLQPHRRFAWRVLPQGFINSPALFNRALQEPLRQVSAAFSQSLLVSYMDDILYASPTEEQRSQCYQALAARLRDLGFQVASEKTSQTPSPVPFLGQMVHEQIVTYQSLPTLQISSPISLHQLQAVLGDLQWVSRGTPTTRRPLQLLYSSLKRHHDPRAIIQLSPEQLQGIAELRQALSHNARSRYNEQEPLLAYVHLTRAGSTLVLFQKGAQFPLAYFQTPLTDNQASPWGLLLLLGCQYLQTQALSSYAKPILKYYHNLPKTSLDNWIQSSEDPRVQELLQLWPQISSQGIQPPGPWKTLITRAEVFLTPQFSPDPIPAALCLFSDGATGRGAYCLWKDHLLDFQAVPAPESAQKGELAGLLAGLAAAPPEPVNIWVDSKYLYSLLRTWVLGAWLQPDPVPSYALLYKSLLRHPAIVVGHVRSHSSASHPIASLNNYVDQLAGKRTADGSEFEKRTADGSEFESPKKKAKVE

SEQ ID NO: 190 - protein, 2123 aa, synthetic construct; identical to SEQ ID NO: 36

SEQ ID NO: 191 - protein, 2095 aa, synthetic construct
MPAAKRVKLDGGDKKYSIGLDIGTNSVGWAVITDEYKVPSKKFKVLGNTDRHSIKKNLIGALLFDSGETAEATRLKRTARRRYTRRKNRICYLQEIFSNEMAKVDDSFFHRLEESFLVEEDKKHERHPIFGNIVDEVAYHEKYPTIYHLRKKLVDSTDKADLRLIYLALAHMIKFRGHFLIEGDLNPDNSDVDKLFIQLVQTYNQLFEENPINASGVDAKAILSARLSKSRRLENLIAQLPGEKKNGLFGNLIALSLGLTPNFKSNFDLAEDAKLQLSKDTYDDDLDNLLAQIGDQYADLFLAAKNLSDAILLSDILRVNTEITKAPLSASMIKRYDEHHQDLTLLKALVRQQLPEKYKEIFFDQSKNGYAGYIDGGASQEEFYKFIKPILEKMDGTEELLVKLNREDLLRKQRTFDNGSIPHQIHLGELHAILRRQEDFYPFLKDNREKIEKILTFRIPYYVGPLARGNSRFAWMTRKSEETITPWNFEEVVDKGASAQSFIERMTNFDKNLPNEKVLPKHSLLYEYFTVYNELTKVKYVTEGMRKPAFLSGEQKKAIVDLLFKTNRKVTVKQLKEDYFKKIECFDSVEISGVEDRFNASLGTYHDLLKIIKDKDFLDNEENEDILEDIVLTLTLFEDREMIEERLKTYAHLFDDKVMKQLKRRRYTGWGRLSRKLINGIRDKQSGKTILDFLKSDGFANRNFMQLIHDDSLTFKEDIQKAQVSGQGDSLHEHIANLAGSPAIKKGILQTVKVVDELVKVMGRHKPENIVIEMARENQTTQKGQKNSRERMKRIEEGIKELGSQILKEHPVENTQLQNEKLYLYYLQNGRDMYVDQELDINRLSDYDVDHIVPQSFLKDDSIDNKVLTRSDKARGKSDNVPSEEVVKKMKNYWRQLLNAKLITQRKFDNLTKAERGGLSELDKAGFIKRQLVETRQITKHVAQILDSRMNTKYDENDKLIREVKVITLKSKLVSDFRKDFQFYKVREINNYHHAHDAYLNAVVGTALIKKYPKLESEFVYGDYKVYDVRKMIAKSEQEIGKATAKYFFYSNIMNFFKTEITLANGEIRKRPLIETNGETGEIVWDKGRDFATVRKVLSMPQVNIVKKTEVQTGGFSKESILPKRNSDKLIARKKDWDPKKYGGFDSPTVAYSVLVVAKVEKGKSKKLKSVKELLGITIMERSSFEKNPIDFLEAKGYKEVKKDLIIKLPKYSLFELENGRKRMLASAGELQKGNELALPSKYVNFLYLASHYEKLKGSPEDNEQKQLFVEQHKHYLDEIIEQISEFSKRVILADANLDKVLSAYNKHRDKPIREQAENIIHLFTLTNLGAPAAFKYFDTTIDRKRYTSTKEVLDATLIHQSITGLYETRIDLSQLGGDGGGGSGGSGGSGGSGGSGGSGGLDDEYRLYSPLVKPDQNIQFWLEQFPQAWAETAGMGLAKQVPPQVIQLKASATPVSVRQYPLSKEAQEGIRPHVQRLIQQGILVPVQSPWNTPLLPVRKPGTNDYRPVQDLREVNKRVQDIHPTVPNPYNLLCALPPQRSWYTVLDLKDAFFCLRLHPTSQPLFAFEWRDPGTGRTGQLTWTRLPQGFKNSPTIFNEALHRDLANFRIQHPQVTLLQYVDDLLLAGATKQDCLEGTKALLLELSDLGYRASAKKAQICRREVTYLGYSLRDGQRWLTEARKKTVVQIPAPTTAKQVREFLGKAGFCRLFIPGFATLAAPLYPLTKPKGEFSWAPEHQKAFDAIKKALLSAPALALPDVTKPFTLYVDERKGVARGVLTQTLGPWRRPVAYLSKKLDPVASGWPVCLKAIAAVAILVKDADKLTLGQNITVIAPHALENIVRQPPDRWMTNARMTHYQSLLLTERVTFAPPAALNPATLLPEETDEPVTHDCHQLLIEETGVRKDLTDIPLTGEVLTWFTDGSSYVVEGKRMAGAAVVDGTRTIWASSLPEGTSAQKAELMALTQALRLAEGKSINIYTDSRYAFATAHVHGAIYKQRGWLTSAGREIKNKEEILSLLEALHLPKRLAIIHCPGHQKAKDPISRGNQMADRVAKQAAQGVNLLPAGKRTADGSEFEKRTADGSEFESPKKKAKVE

SEQ ID NO: 192 - protein, 2088 aa, synthetic construct
MPAAKRVKLDGGDKKYSIGLDIGTNSVGWAVITDEYKVPSKKFKVLGNTDRHSIKKNLIGALLFDSGETAEATRLKRTARRRYTRRKNRICYLQEIFSNEMAKVDDSFFHRLEESFLVEEDKKHERHPIFGNIVDEVAYHEKYPTIYHLRKKLVDSTDKADLRLIYLALAHMIKFRGHFLIEGDLNPDNSDVDKLFIQLVQTYNQLFEENPINASGVDAKAILSARLSKSRRLENLIAQLPGEKKNGLFGNLIALSLGLTPNFKSNFDLAEDAKLQLSKDTYDDDLDNLLAQIGDQYADLFLAAKNLSDAILLSDILRVNTEITKAPLSASMIKRYDEHHQDLTLLKALVRQQLPEKYKEIFFDQSKNGYAGYIDGGASQEEFYKFIKPILEKMDGTEELLVKLNREDLLRKQRTFDNGSIPHQIHLGELHAILRRQEDFYPFLKDNREKIEKILTFRIPYYVGPLARGNSRFAWMTRKSEETITPWNFEEVVDKGASAQSFIERMTNFDKNLPNEKVLPKHSLLYEYFTVYNELTKVKYVTEGMRKPAFLSGEQKKAIVDLLFKTNRKVTVKQLKEDYFKKIECFDSVEISGVEDRFNASLGTYHDLLKIIKDKDFLDNEENEDILEDIVLTLTLFEDREMIEERLKTYAHLFDDKVMKQLKRRRYTGWGRLSRKLINGIRDKQSGKTILDFLKSDGFANRNFMQLIHDDSLTFKEDIQKAQVSGQGDSLHEHIANLAGSPAIKKGILQTVKVVDELVKVMGRHKPENIVIEMARENQTTQKGQKNSRERMKRIEEGIKELGSQILKEHPVENTQLQNEKLYLYYLQNGRDMYVDQELDINRLSDYDVDHIVPQSFLKDDSIDNKVLTRSDKARGKSDNVPSEEVVKKMKNYWRQLLNAKLITQRKFDNLTKAERGGLSELDKAGFIKRQLVETRQITKHVAQILDSRMNTKYDENDKLIREVKVITLKSKLVSDFRKDFQFYKVREINNYHHAHDAYLNAVVGTALIKKYPKLESEFVYGDYKVYDVRKMIAKSEQEIGKATAKYFFYSNIMNFFKTEITLANGEIRKRPLIETNGETGEIVWDKGRDFATVRKVLSMPQVNIVKKTEVQTGGFSKESILPKRNSDKLIARKKDWDPKKYGGFDSPTVAYSVLVVAKVEKGKSKKLKSVKELLGITIMERSSFEKNPIDFLEAKGYKEVKKDLIIKLPKYSLFELENGRKRMLASAGELQKGNELALPSKYVNFLYLASHYEKLKGSPEDNEQKQLFVEQHKHYLDEIIEQISEFSKRVILADANLDKVLSAYNKHRDKPIREQAENIIHLFTLTNLGAPAAFKYFDTTIDRKRYTSTKEVLDATLIHQSITGLYETRIDLSQLGGDGGPAPEAAAKGGGGGLDDEYRLYSPLVKPDQNIQFWLEQFPQAWAETAGMGLAKQVPPQVIQLKASATPVSVRQYPLSKEAQEGIRPHVQRLIQQGILVPVQSPWNTPLLPVRKPGTNDYRPVQDLREVNKRVQDIHPTVPNPYNLLCALPPQRSWYTVLDLKDAFFCLRLHPTSQPLFAFEWRDPGTGRTGQLTWTRLPQGFKNSPTIFNEALHRDLANFRIQHPQVTLLQYVDDLLLAGATKQDCLEGTKALLLELSDLGYRASAKKAQICRREVTYLGYSLRDGQRWLTEARKKTVVQIPAPTTAKQVREFLGKAGFCRLFIPGFATLAAPLYPLTKPKGEFSWAPEHQKAFDAIKKALLSAPALALPDVTKPFTLYVDERKGVARGVLTQTLGPWRRPVAYLSKKLDPVASGWPVCLKAIAAVAILVKDADKLTLGQNITVIAPHALENIVRQPPDRWMTNARMTHYQSLLLTERVTFAPPAALNPATLLPEETDEPVTHDCHQLLIEETGVRKDLTDIPLTGEVLTWFTDGSSYVVEGKRMAGAAVVDGTRTIWASSLPEGTSAQKAELMALTQALRLAEGKSINIYTDSRYAFATAHVHGAIYKQRGWLTSAGREIKNKEEILSLLEALHLPKRLAIIHCPGHQKAKDPISRGNQMADRVAKQAAQGVNLLPAGKRTADGSEFEKRTADGSEFESPKKKAKVE

SEQ ID NO: 193 - protein, 2107 aa, synthetic construct
MPAAKRVKLDGGDKKYSIGLDIGTNSVGWAVITDEYKVPSKKFKVLGNTDRHSIKKNLIGALLFDSGETAEATRLKRTARRRYTRRKNRICYLQEIFSNEMAKVDDSFFHRLEESFLVEEDKKHERHPIFGNIVDEVAYHEKYPTIYHLRKKLVDSTDKADLRLIYLALAHMIKFRGHFLIEGDLNPDNSDVDKLFIQLVQTYNQLFEENPINASGVDAKAILSARLSKSRRLENLIAQLPGEKKNGLFGNLIALSLGLTPNFKSNFDLAEDAKLQLSKDTYDDDLDNLLAQIGDQYADLFLAAKNLSDAILLSDILRVNTEITKAPLSASMIKRYDEHHQDLTLLKALVRQQLPEKYKEIFFDQSKNGYAGYIDGGASQEEFYKFIKPILEKMDGTEELLVKLNREDLLRKQRTFDNGSIPHQIHLGELHAILRRQEDFYPFLKDNREKIEKILTFRIPYYVGPLARGNSRFAWMTRKSEETITPWNFEEVVDKGASAQSFIERMTNFDKNLPNEKVLPKHSLLYEYFTVYNELTKVKYVTEGMRKPAFLSGEQKKAIVDLLFKTNRKVTVKQLKEDYFKKIECFDSVEISGVEDRFNASLGTYHDLLKIIKDKDFLDNEENEDILEDIVLTLTLFEDREMIEERLKTYAHLFDDKVMKQLKRRRYTGWGRLSRKLINGIRDKQSGKTILDFLKSDGFANRNFMQLIHDDSLTFKEDIQKAQVSGQGDSLHEHIANLAGSPAIKKGILQTVKVVDELVKVMGRHKPENIVIEMARENQTTQKGQKNSRERMKRIEEGIKELGSQILKEHPVENTQLQNEKLYLYYLQNGRDMYVDQELDINRLSDYDVDHIVPQSFLKDDSIDNKVLTRSDKARGKSDNVPSEEVVKKMKNYWRQLLNAKLITQRKFDNLTKAERGGLSELDKAGFIKRQLVETRQITKHVAQILDSRMNTKYDENDKLIREVKVITLKSKLVSDFRKDFQFYKVREINNYHHAHDAYLNAVVGTALIKKYPKLESEFVYGDYKVYDVRKMIAKSEQEIGKATAKYFFYSNIMNFFKTEITLANGEIRKRPLIETNGETGEIVWDKGRDFATVRKVLSMPQVNIVKKTEVQTGGFSKESILPKRNSDKLIARKKDWDPKKYGGFDSPTVAYSVLVVAKVEKGKSKKLKSVKELLGITIMERSSFEKNPIDFLEAKGYKEVKKDLIIKLPKYSLFELENGRKRMLASAGELQKGNELALPSKYVNFLYLASHYEKLKGSPEDNEQKQLFVEQHKHYLDEIIEQISEFSKRVILADANLDKVLSAYNKHRDKPIREQAENIIHLFTLTNLGAPAAFKYFDTTIDRKRYTSTKEVLDATLIHQSITGLYETRIDLSQLGGDGGEAAAKEAAAKEAAAKEAAAKEAAAKEAAAKGGLDDEYRLYSPLVKPDQNIQFWLEQFPQAWAETAGMGLAKQVPPQVIQLKASATPVSVRQYPLSKEAQEGIRPHVQRLIQQGILVPVQSPWNTPLLPVRKPGTNDYRPVQDLREVNKRVQDIHPTVPNPYNLLCALPPQRSWYTVLDLKDAFFCLRLHPTSQPLFAFEWRDPGTGRTGQLTWTRLPQGFKNSPTIFNEALHRDLANFRIQHPQVTLLQYVDDLLLAGATKQDCLEGTKALLLELSDLGYRASAKKAQICRREVTYLGYSLRDGQRWLTEARKKTVVQIPAPTTAKQVREFLGKAGFCRLFIPGFATLAAPLYPLTKPKGEFSWAPEHQKAFDAIKKALLSAPALALPDVTKPFTLYVDERKGVARGVLTQTLGPWRRPVAYLSKKLDPVASGWPVCLKAIAAVAILVKDADKLTLGQNITVIAPHALENIVRQPPDRWMTNARMTHYQSLLLTERVTFAPPAALNPATLLPEETDEPVTHDCHQLLIEETGVRKDLTDIPLTGEVLTWFTDGSSYVVEGKRMAGAAVVDGTRTIWASSLPEGTSAQKAELMALTQALRLAEGKSINIYTDSRYAFATAHVHGAIYKQRGWLTSAGREIKNKEEILSLLEALHLPKRLAIIHCPGHQKAKDPISRGNQMADRVAKQAAQGVNLLPAGKRTADGSEFEKRTADGSEFESPKKKAKVE

SEQ ID NO: 194 - protein, 2090 aa, synthetic construct; identical to SEQ ID NO: 54

SEQ ID NO: 195 - protein, 2088 aa, synthetic construct; identical to SEQ ID NO: 35

SEQ ID NO: 196 - protein, 2093 aa, synthetic construct; identical to SEQ ID NO: 90

SEQ ID NO: 197 - protein, 2086 aa, synthetic construct
MPAAKRVKLDGGDKKYSIGLDIGTNSVGWAVITDEYKVPSKKFKVLGNTDRHSIKKNLIGALLFDSGETAEATRLKRTARRRYTRRKNRICYLQEIFSNEMAKVDDSFFHRLEESFLVEEDKKHERHPIFGNIVDEVAYHEKYPTIYHLRKKLVDSTDKADLRLIYLALAHMIKFRGHFLIEGDLNPDNSDVDKLFIQLVQTYNQLFEENPINASGVDAKAILSARLSKSRRLENLIAQLPGEKKNGLFGNLIALSLGLTPNFKSNFDLAEDAKLQLSKDTYDDDLDNLLAQIGDQYADLFLAAKNLSDAILLSDILRVNTEITKAPLSASMIKRYDEHHQDLTLLKALVRQQLPEKYKEIFFDQSKNGYAGYIDGGASQEEFYKFIKPILEKMDGTEELLVKLNREDLLRKQRTFDNGSIPHQIHLGELHAILRRQEDFYPFLKDNREKIEKILTFRIPYYVGPLARGNSRFAWMTRKSEETITPWNFEEVVDKGASAQSFIERMTNFDKNLPNEKVLPKHSLLYEYFTVYNELTKVKYVTEGMRKPAFLSGEQKKAIVDLLFKTNRKVTVKQLKEDYFKKIECFDSVEISGVEDRFNASLGTYHDLLKIIKDKDFLDNEENEDILEDIVLTLTLFEDREMIEERLKTYAHLFDDKVMKQLKRRRYTGWGRLSRKLINGIRDKQSGKTILDFLKSDGFANRNFMQLIHDDSLTFKEDIQKAQVSGQGDSLHEHIANLAGSPAIKKGILQTVKVVDELVKVMGRHKPENIVIEMARENQTTQKGQKNSRERMKRIEEGIKELGSQILKEHPVENTQLQNEKLYLYYLQNGRDMYVDQELDINRLSDYDVDHIVPQSFLKDDSIDNKVLTRSDKARGKSDNVPSEEVVKKMKNYWRQLLNAKLITQRKFDNLTKAERGGLSELDKAGFIKRQLVETRQITKHVAQILDSRMNTKYDENDKLIREVKVITLKSKLVSDFRKDFQFYKVREINNYHHAHDAYLNAVVGTALIKKYPKLESEFVYGDYKVYDVRKMIAKSEQEIGKATAKYFFYSNIMNFFKTEITLANGEIRKRPLIETNGETGEIVWDKGRDFATVRKVLSMPQVNIVKKTEVQTGGFSKESILPKRNSDKLIARKKDWDPKKYGGFDSPTVAYSVLVVAKVEKGKSKKLKSVKELLGITIMERSSFEKNPIDFLEAKGYKEVKKDLIIKLPKYSLFELENGRKRMLASAGELQKGNELALPSKYVNFLYLASHYEKLKGSPEDNEQKQLFVEQHKHYLDEIIEQISEFSKRVILADANLDKVLSAYNKHRDKPIREQAENIIHLFTLTNLGAPAAFKYFDTTIDRKRYTSTKEVLDATLIHQSITGLYETRIDLSQLGGDGGGGGGGSPAPGGLDDEYRLYSPLVKPDQNIQFWLEQFPQAWAETAGMGLAKQVPPQVIQLKASATPVSVRQYPLSKEAQEGIRPHVQRLIQQGILVPVQSPWNTPLLPVRKPGTNDYRPVQDLREVNKRVQDIHPTVPNPYNLLCALPPQRSWYTVLDLKDAFFCLRLHPTSQPLFAFEWRDPGTGRTGQLTWTRLPQGFKNSPTIFNEALHRDLANFRIQHPQVTLLQYVDDLLLAGATKQDCLEGTKALLLELSDLGYRASAKKAQICRREVTYLGYSLRDGQRWLTEARKKTVVQIPAPTTAKQVREFLGKAGFCRLFIPGFATLAAPLYPLTKPKGEFSWAPEHQKAFDAIKKALLSAPALALPDVTKPFTLYVDERKGVARGVLTQTLGPWRRPVAYLSKKLDPVASGWPVCLKAIAAVAILVKDADKLTLGQNITVIAPHALENIVRQPPDRWMTNARMTHYQSLLLTERVTFAPPAALNPATLLPEETDEPVTHDCHQLLIEETGVRKDLTDIPLTGEVLTWFTDGSSYVVEGKRMAGAAVVDGTRTIWASSLPEGTSAQKAELMALTQALRLAEGKSINIYTDSRYAFATAHVHGAIYKQRGWLTSAGREIKNKEEILSLLEALHLPKRLAIIHCPGHQKAKDPISRGNQMADRVAKQAAQGVNLLPAGKRTADGSEFEKRTADGSEFESPKKKAKVE

SEQ ID NO: 198 - protein, 2086 aa, synthetic construct; identical to SEQ ID NO: 58

SEQ ID NO: 199 - protein, 2088 aa, synthetic construct; identical to SEQ ID NO: 40

SEQ ID NO: 200 - protein, 2088 aa, synthetic construct; identical to SEQ ID NO: 63

SEQ ID NO: 201 - protein, 2089 aa, synthetic construct; identical to SEQ ID NO: 74

SEQ ID NO: 202 - protein, 2092 aa, synthetic construct
MPAAKRVKLDGGDKKYSIGLDIGTNSVGWAVITDEYKVPSKKFKVLGNTDRHSIKKNLIGALLFDSGETAEATRLKRTARRRYTRRKNRICYLQEIFSNEMAKVDDSFFHRLEESFLVEEDKKHERHPIFGNIVDEVAYHEKYPTIYHLRKKLVDSTDKADLRLIYLALAHMIKFRGHFLIEGDLNPDNSDVDKLFIQLVQTYNQLFEENPINASGVDAKAILSARLSKSRRLENLIAQLPGEKKNGLFGNLIALSLGLTPNFKSNFDLAEDAKLQLSKDTYDDDLDNLLAQIGDQYADLFLAAKNLSDAILLSDILRVNTEITKAPLSASMIKRYDEHHQDLTLLKALVRQQLPEKYKEIFFDQSKNGYAGYIDGGASQEEFYKFIKPILEKMDGTEELLVKLNREDLLRKQRTFDNGSIPHQIHLGELHAILRRQEDFYPFLKDNREKIEKILTFRIPYYVGPLARGNSRFAWMTRKSEETITPWNFEEVVDKGASAQSFIERMTNFDKNLPNEKVLPKHSLLYEYFTVYNELTKVKYVTEGMRKPAFLSGEQKKAIVDLLFKTNRKVTVKQLKEDYFKKIECFDSVEISGVEDRFNASLGTYHDLLKIIKDKDFLDNEENEDILEDIVLTLTLFEDREMIEERLKTYAHLFDDKVMKQLKRRRYTGWGRLSRKLINGIRDKQSGKTILDFLKSDGFANRNFMQLIHDDSLTFKEDIQKAQVSGQGDSLHEHIANLAGSPAIKKGILQTVKVVDELVKVMGRHKPENIVIEMARENQTTQKGQKNSRERMKRIEEGIKELGSQILKEHPVENTQLQNEKLYLYYLQNGRDMYVDQELDINRLSDYDVDHIVPQSFLKDDSIDNKVLTRSDKARGKSDNVPSEEVVKKMKNYWRQLLNAKLITQRKFDNLTKAERGGLSELDKAGFIKRQLVETRQITKHVAQILDSRMNTKYDENDKLIREVKVITLKSKLVSDFRKDFQFYKVREINNYHHAHDAYLNAVVGTALIKKYPKLESEFVYGDYKVYDVRKMIAKSEQEIGKATAKYFFYSNIMNFFKTEITLANGEIRKRPLIETNGETGEIVWDKGRDFATVRKVLSMPQVNIVKKTEVQTGGFSKESILPKRNSDKLIARKKDWDPKKYGGFDSPTVAYSVLVVAKVEKGKSKKLKSVKELLGITIMERSSFEKNPIDFLEAKGYKEVKKDLIIKLPKYSLFELENGRKRMLASAGELQKGNELALPSKYVNFLYLASHYEKLKGSPEDNEQKQLFVEQHKHYLDEIIEQISEFSKRVILADANLDKVLSAYNKHRDKPIREQAENIIHLFTLTNLGAPAAFKYFDTTIDRKRYTSTKEVLDATLIHQSITGLYETRIDLSQLGGDGGGSSGSSGSSGSSGSSGGLDDEYRLYSPLVKPDQNIQFWLEQFPQAWAETAGMGLAKQVPPQVIQLKASATPVSVRQYPLSKEAQEGIRPHVQRLIQQGILVPVQSPWNTPLLPVRKPGTNDYRPVQDLREVNKRVQDIHPTVPNPYNLLCALPPQRSWYTVLDLKDAFFCLRLHPTSQPLFAFEWRDPGTGRTGQLTWTRLPQGFKNSPTIFNEALHRDLANFRIQHPQVTLLQYVDDLLLAGATKQDCLEGTKALLLELSDLGYRASAKKAQICRREVTYLGYSLRDGQRWLTEARKKTVVQIPAPTTAKQVREFLGKAGFCRLFIPGFATLAAPLYPLTKPKGEFSWAPEHQKAFDAIKKALLSAPALALPDVTKPFTLYVDERKGVARGVLTQTLGPWRRPVAYLSKKLDPVASGWPVCLKAIAAVAILVKDADKLTLGQNITVIAPHALENIVRQPPDRWMTNARMTHYQSLLLTERVTFAPPAALNPATLLPEETDEPVTHDCHQLLIEETGVRKDLTDIPLTGEVLTWFTDGSSYVVEGKRMAGAAVVDGTRTIWASSLPEGTSAQKAELMALTQALRLAEGKSINIYTDSRYAFATAHVHGAIYKQRGWLTSAGREIKNKEEILSLLEALHLPKRLAIIHCPGHQKAKDPISRGNQMADRVAKQAAQGVNLLPAGKRTADGSEFEKRTADGSEFESPKKKAKVE

SEQ ID NO: 203 - protein, 2083 aa, synthetic construct; identical to SEQ ID NO: 76

SEQ ID NO: 204 - protein, 2088 aa, synthetic construct; identical to SEQ ID NO: 71

SEQ ID NO: 205 - protein, 2086 aa, synthetic construct; identical to SEQ ID NO: 73

SEQ ID NO: 206 - protein, 2085 aa, synthetic construct; identical to SEQ ID NO: 57

SEQ ID NO: 207 - protein, 2086 aa, synthetic construct; identical to SEQ ID NO: 43

SEQ ID NO: 208 - protein, 2086 aa, synthetic construct
MPAAKRVKLDGGDKKYSIGLDIGTNSVGWAVITDEYKVPSKKFKVLGNTDRHSIKKNLIGALLFDSGETAEATRLKRTARRRYTRRKNRICYLQEIFSNEMAKVDDSFFHRLEESFLVEEDKKHERHPIFGNIVDEVAYHEKYPTIYHLRKKLVDSTDKADLRLIYLALAHMIKFRGHFLIEGDLNPDNSDVDKLFIQLVQTYNQLFEENPINASGVDAKAILSARLSKSRRLENLIAQLPGEKKNGLFGNLIALSLGLTPNFKSNFDLAEDAKLQLSKDTYDDDLDNLLAQIGDQYADLFLAAKNLSDAILLSDILRVNTEITKAPLSASMIKRYDEHHQDLTLLKALVRQQLPEKYKEIFFDQSKNGYAGYIDGGASQEEFYKFIKPILEKMDGTEELLVKLNREDLLRKQRTFDNGSIPHQIHLGELHAILRRQEDFYPFLKDNREKIEKILTFRIPYYVGPLARGNSRFAWMTRKSEETITPWNFEEVVDKGASAQSFIERMTNFDKNLPNEKVLPKHSLLYEYFTVYNELTKVKYVTEGMRKPAFLSGEQKKAIVDLLFKTNRKVTVKQLKEDYFKKIECFDSVEISGVEDRFNASLGTYHDLLKIIKDKDFLDNEENEDILEDIVLTLTLFEDREMIEERLKTYAHLFDDKVMKQLKRRRYTGWGRLSRKLINGIRDKQSGKTILDFLKSDGFANRNFMQLIHDDSLTFKEDIQKAQVSGQGDSLHEHIANLAGSPAIKKGILQTVKVVDELVKVMGRHKPENIVIEMARENQTTQKGQKNSRERMKRIEEGIKELGSQILKEHPVENTQLQNEKLYLYYLQNGRDMYVDQELDINRLSDYDVDHIVPQSFLKDDSIDNKVLTRSDKARGKSDNVPSEEVVKKMKNYWRQLLNAKLITQRKFDNLTKAERGGLSELDKAGFIKRQLVETRQITKHVAQILDSRMNTKYDENDKLIREVKVITLKSKLVSDFRKDFQFYKVREINNYHHAHDAYLNAVVGTALIKKYPKLESEFVYGDYKVYDVRKMIAKSEQEIGKATAKYFFYSNIMNFFKTEITLANGEIRKRPLIETNGETGEIVWDKGRDFATVRKVLSMPQVNIVKKTEVQTGGFSKESILPKRNSDKLIARKKDWDPKKYGGFDSPTVAYSVLVVAKVEKGKSKKLKSVKELLGITIMERSSFEKNPIDFLEAKGYKEVKKDLIIKLPKYSLFELENGRKRMLASAGELQKGNELALPSKYVNFLYLASHYEKLKGSPEDNEQKQLFVEQHKHYLDEIIEQISEFSKRVILADANLDKVLSAYNKHRDKPIREQAENIIHLFTLTNLGAPAAFKYFDTTIDRKRYTSTKEVLDATLIHQSITGLYETRIDLSQLGGDGGGSSGSSGSSGGLDDEYRLYSPLVKPDQNIQFWLEQFPQAWAETAGMGLAKQVPPQVIQLKASATPVSVRQYPLSKEAQEGIRPHVQRLIQQGILVPVQSPWNTPLLPVRKPGTNDYRPVQDLREVNKRVQDIHPTVPNPYNLLCALPPQRSWYTVLDLKDAFFCLRLHPTSQPLFAFEWRDPGTGRTGQLTWTRLPQGFKNSPTIFNEALHRDLANFRIQHPQVTLLQYVDDLLLAGATKQDCLEGTKALLLELSDLGYRASAKKAQICRREVTYLGYSLRDGQRWLTEARKKTVVQIPAPTTAKQVREFLGKAGFCRLFIPGFATLAAPLYPLTKPKGEFSWAPEHQKAFDAIKKALLSAPALALPDVTKPFTLYVDERKGVARGVLTQTLGPWRRPVAYLSKKLDPVASGWPVCLKAIAAVAILVKDADKLTLGQNITVIAPHALENIVRQPPDRWMTNARMTHYQSLLLTERVTFAPPAALNPATLLPEETDEPVTHDCHQLLIEETGVRKDLTDIPLTGEVLTWFTDGSSYVVEGKRMAGAAVVDGTRTIWASSLPEGTSAQKAELMALTQALRLAEGKSINIYTDSRYAFATAHVHGAIYKQRGWLTSAGREIKNKEEILSLLEALHLPKRLAIIHCPGHQKAKDPISRGNQMADRVAKQAAQGVNLLPAGKRTADGSEFEKRTADGSEFESPKKKAKVE

SEQ ID NO: 209 - protein, 2088 aa, synthetic construct
MPAAKRVKLDGGDKKYSIGLDIGTNSVGWAVITDEYKVPSKKFKVLGNTDRHSIKKNLIGALLFDSGETAEATRLKRTARRRYTRRKNRICYLQEIFSNEMAKVDDSFFHRLEESFLVEEDKKHERHPIFGNIVDEVAYHEKYPTIYHLRKKLVDSTDKADLRLIYLALAHMIKFRGHFLIEGDLNPDNSDVDKLFIQLVQTYNQLFEENPINASGVDAKAILSARLSKSRRLENLIAQLPGEKKNGLFGNLIALSLGLTPNFKSNFDLAEDAKLQLSKDTYDDDLDNLLAQIGDQYADLFLAAKNLSDAILLSDILRVNTEITKAPLSASMIKRYDEHHQDLTLLKALVRQQLPEKYKEIFFDQSKNGYAGYIDGGASQEEFYKFIKPILEKMDGTEELLVKLNREDLLRKQRTFDNGSIPHQIHLGELHAILRRQEDFYPFLKDNREKIEKILTFRIPYYVGPLARGNSRFAWMTRKSEETITPWNFEEVVDKGASAQSFIERMTNFDKNLPNEKVLPKHSLLYEYFTVYNELTKVKYVTEGMRKPAFLSGEQKKAIVDLLFKTNRKVTVKQLKEDYFKKIECFDSVEISGVEDRFNASLGTYHDLLKIIKDKDFLDNEENEDILEDIVLTLTLFEDREMIEERLKTYAHLFDDKVMKQLKRRRYTGWGRLSRKLINGIRDKQSGKTILDFLKSDGFANRNFMQLIHDDSLTFKEDIQKAQVSGQGDSLHEHIANLAGSPAIKKGILQTVKVVDELVKVMGRHKPENIVIEMARENQTTQKGQKNSRERMKRIEEGIKELGSQILKEHPVENTQLQNEKLYLYYLQNGRDMYVDQELDINRLSDYDVDHIVPQSFLKDDSIDNKVLTRSDKARGKSDNVPSEEVVKKMKNYWRQLLNAKLITQRKFDNLTKAERGGLSELDKAGFIKRQLVETRQITKHVAQILDSRMNTKYDENDKLIREVKVITLKSKLVSDFRKDFQFYKVREINNYHHAHDAYLNAVVGTALIKKYPKLESEFVYGDYKVYDVRKMIAKSEQEIGKATAKYFFYSNIMNFFKTEITLANGEIRKRPLIETNGETGEIVWDKGRDFATVRKVLSMPQVNIVKKTEVQTGGFSKESILPKRNSDKLIARKKDWDPKKYGGFDSPTVAYSVLVVAKVEKGKSKKLKSVKELLGITIMERSSFEKNPIDFLEAKGYKEVKKDLIIKLPKYSLFELENGRKRMLASAGELQKGNELALPSKYVNFLYLASHYEKLKGSPEDNEQKQLFVEQHKHYLDEIIEQISEFSKRVILADANLDKVLSAYNKHRDKPIREQAENIIHLFTLTNLGAPAAFKYFDTTIDRKRYTSTKEVLDATLIHQSITGLYETRIDLSQLGGDGGGSSEAAAKPAPGGLDDEYRLYSPLVKPDQNIQFWLEQFPQAWAETAGMGLAKQVPPQVIQLKASATPVSVRQYPLSKEAQEGIRPHVQRLIQQGILVPVQSPWNTPLLPVRKPGTNDYRPVQDLREVNKRVQDIHPTVPNPYNLLCALPPQRSWYTVLDLKDAFFCLRLHPTSQPLFAFEWRDPGTGRTGQLTWTRLPQGFKNSPTIFNEALHRDLANFRIQHPQVTLLQYVDDLLLAGATKQDCLEGTKALLLELSDLGYRASAKKAQICRREVTYLGYSLRDGQRWLTEARKKTVVQIPAPTTAKQVREFLGKAGFCRLFIPGFATLAAPLYPLTKPKGEFSWAPEHQKAFDAIKKALLSAPALALPDVTKPFTLYVDERKGVARGVLTQTLGPWRRPVAYLSKKLDPVASGWPVCLKAIAAVAILVKDADKLTLGQNITVIAPHALENIVRQPPDRWMTNARMTHYQSLLLTERVTFAPPAALNPATLLPEETDEPVTHDCHQLLIEETGVRKDLTDIPLTGEVLTWFTDGSSYVVEGKRMAGAAVVDGTRTIWASSLPEGTSAQKAELMALTQALRLAEGKSINIYTDSRYAFATAHVHGAIYKQRGWLTSAGREIKNKEEILSLLEALHLPKRLAIIHCPGHQKAKDPISRGNQMADRVAKQAAQGVNLLPAGKRTADGSEFEKRTADGSEFESPKKKAKVE

SEQ ID NO: 210 - protein, 2086 aa, synthetic construct; identical to SEQ ID NO: 89

SEQ ID NO: 211 - protein, 2088 aa, synthetic construct; identical to SEQ ID NO: 42

SEQ ID NO: 212 - protein, 2083 aa, synthetic construct
MPAAKRVKLDGGDKKYSIGLDIGTNSVGWAVITDEYKVPSKKFKVLGNTDRHSIKKNLIGALLFDSGETAEATRLKRTARRRYTRRKNRICYLQEIFSNEMAKVDDSFFHRLEESFLVEEDKKHERHPIFGNIVDEVAYHEKYPTIYHLRKKLVDSTDKADLRLIYLALAHMIKFRGHFLIEGDLNPDNSDVDKLFIQLVQTYNQLFEENPINASGVDAKAILSARLSKSRRLENLIAQLPGEKKNGLFGNLIALSLGLTPNFKSNFDLAEDAKLQLSKDTYDDDLDNLLAQIGDQYADLFLAAKNLSDAILLSDILRVNTEITKAPLSASMIKRYDEHHQDLTLLKALVRQQLPEKYKEIFFDQSKNGYAGYIDGGASQEEFYKFIKPILEKMDGTEELLVKLNREDLLRKQRTFDNGSIPHQIHLGELHAILRRQEDFYPFLKDNREKIEKILTFRIPYYVGPLARGNSRFAWMTRKSEETITPWNFEEVVDKGASAQSFIERMTNFDKNLPNEKVLPKHSLLYEYFTVYNELTKVKYVTEGMRKPAFLSGEQKKAIVDLLFKTNRKVTVKQLKEDYFKKIECFDSVEISGVEDRFNASLGTYHDLLKIIKDKDFLDNEENEDILEDIVLTLTLFEDREMIEERLKTYAHLFDDKVMKQLKRRRYTGWGRLSRKLINGIRDKQSGKTILDFLKSDGFANRNFMQLIHDDSLTFKEDIQKAQVSGQGDSLHEHIANLAGSPAIKKGILQTVKVVDELVKVMGRHKPENIVIEMARENQTTQKGQKNSRERMKRIEEGIKELGSQILKEHPVENTQLQNEKLYLYYLQNGRDMYVDQELDINRLSDYDVDHIVPQSFLKDDSIDNKVLTRSDKARGKSDNVPSEEVVKKMKNYWRQLLNAKLITQRKFDNLTKAERGGLSELDKAGFIKRQLVETRQITKHVAQILDSRMNTKYDENDKLIREVKVITLKSKLVSDFRKDFQFYKVREINNYHHAHDAYLNAVVGTALIKKYPKLESEFVYGDYKVYDVRKMIAKSEQEIGKATAKYFFYSNIMNFFKTEITLANGEIRKRPLIETNGETGEIVWDKGRDFATVRKVLSMPQVNIVKKTEVQTGGFSKESILPKRNSDKLIARKKDWDPKKYGGFDSPTVAYSVLVVAKVEKGKSKKLKSVKELLGITIMERSSFEKNPIDFLEAKGYKEVKKDLIIKLPKYSLFELENGRKRMLASAGELQKGNELALPSKYVNFLYLASHYEKLKGSPEDNEQKQLFVEQHKHYLDEIIEQISEFSKRVILADANLDKVLSAYNKHRDKPIREQAENIIHLFTLTNLGAPAAFKYFDTTIDRKRYTSTKEVLDATLIHQSITGLYETRIDLSQLGGDGGGGSGSSGGLDDEYRLYSPLVKPDQNIQFWLEQFPQAWAETAGMGLAKQVPPQVIQLKASATPVSVRQYPLSKEAQEGIRPHVQRLIQQGILVPVQSPWNTPLLPVRKPGTNDYRPVQDLREVNKRVQDIHPTVPNPYNLLCALPPQRSWYTVLDLKDAFFCLRLHPTSQPLFAFEWRDPGTGRTGQLTWTRLPQGFKNSPTIFNEALHRDLANFRIQHPQVTLLQYVDDLLLAGATKQDCLEGTKALLLELSDLGYRASAKKAQICRREVTYLGYSLRDGQRWLTEARKKTVVQIPAPTTAKQVREFLGKAGFCRLFIPGFATLAAPLYPLTKPKGEFSWAPEHQKAFDAIKKALLSAPALALPDVTKPFTLYVDERKGVARGVLTQTLGPWRRPVAYLSKKLDPVASGWPVCLKAIAAVAILVKDADKLTLGQNITVIAPHALENIVRQPPDRWMTNARMTHYQSLLLTERVTFAPPAALNPATLLPEETDEPVTHDCHQLLIEETGVRKDLTDIPLTGEVLTWFTDGSSYVVEGKRMAGAAVVDGTRTIWASSLPEGTSAQKAELMALTQALRLAEGKSINIYTDSRYAFATAHVHGAIYKQRGWLTSAGREIKNKEEILSLLEALHLPKRLAIIHCPGHQKAKDPISRGNQMADRVAKQAAQGVNLLPAGKRTADGSEFEKRTADGSEFESPKKKAKVE

SEQ ID NO: 213 - protein, 2086 aa, synthetic construct
MPAAKRVKLDGGDKKYSIGLDIGTNSVGWAVITDEYKVPSKKFKVLGNTDRHSIKKNLIGALLFDSGETAEATRLKRTARRRYTRRKNRICYLQEIFSNEMAKVDDSFFHRLEESFLVEEDKKHERHPIFGNIVDEVAYHEKYPTIYHLRKKLVDSTDKADLRLIYLALAHMIKFRGHFLIEGDLNPDNSDVDKLFIQLVQTYNQLFEENPINASGVDAKAILSARLSKSRRLENLIAQLPGEKKNGLFGNLIALSLGLTPNFKSNFDLAEDAKLQLSKDTYDDDLDNLLAQIGDQYADLFLAAKNLSDAILLSDILRVNTEITKAPLSASMIKRYDEHHQDLTLLKALVRQQLPEKYKEIFFDQSKNGYAGYIDGGASQEEFYKFIKPILEKMDGTEELLVKLNREDLLRKQRTFDNGSIPHQIHLGELHAILRRQEDFYPFLKDNREKIEKILTFRIPYYVGPLARGNSRFAWMTRKSEETITPWNFEEVVDKGASAQSFIERMTNFDKNLPNEKVLPKHSLLYEYFTVYNELTKVKYVTEGMRKPAFLSGEQKKAIVDLLFKTNRKVTVKQLKEDYFKKIECFDSVEISGVEDRFNASLGTYHDLLKIIKDKDFLDNEENEDILEDIVLTLTLFEDREMIEERLKTYAHLFDDKVMKQLKRRRYTGWGRLSRKLINGIRDKQSGKTILDFLKSDGFANRNFMQLIHDDSLTFKEDIQKAQVSGQGDSLHEHIANLAGSPAIKKGILQTVKVVDELVKVMGRHKPENIVIEMARENQTTQKGQKNSRERMKRIEEGIKELGSQILKEHPVENTQLQNEKLYLYYLQNGRDMYVDQELDINRLSDYDVDHIVPQSFLKDDSIDNKVLTRSDKARGKSDNVPSEEVVKKMKNYWRQLLNAKLITQRKFDNLTKAERGGLSELDKAGFIKRQLVETRQITKHVAQILDSRMNTKYDENDKLIREVKVITLKSKLVSDFRKDFQFYKVREINNYHHAHDAYLNAVVGTALIKKYPKLESEFVYGDYKVYDVRKMIAKSEQEIGKATAKYFFYSNIMNFFKTEITLANGEIRKRPLIETNGETGEIVWDKGRDFATVRKVLSMPQVNIVKKTEVQTGGFSKESILPKRNSDKLIARKKDWDPKKYGGFDSPTVAYSVLVVAKVEKGKSKKLKSVKELLGITIMERSSFEKNPIDFLEAKGYKEVKKDLIIKLPKYSLFELENGRKRMLASAGELQKGNELALPSKYVNFLYLASHYEKLKGSPEDNEQKQLFVEQHKHYLDEIIEQISEFSKRVILADANLDKVLSAYNKHRDKPIREQAENIIHLFTLTNLGAPAAFKYFDTTIDRKRYTSTKEVLDATLIHQSITGLYETRIDLSQLGGDGGGGSGGGPAPGGLDDEYRLYSPLVKPDQNIQFWLEQFPQAWAETAGMGLAKQVPPQVIQLKASATPVSVRQYPLSKEAQEGIRPHVQRLIQQGILVPVQSPWNTPLLPVRKPGTNDYRPVQDLREVNKRVQDIHPTVPNPYNLLCALPPQRSWYTVLDLKDAFFCLRLHPTSQPLFAFEWRDPGTGRTGQLTWTRLPQGFKNSPTIFNEALHRDLANFRIQHPQVTLLQYVDDLLLAGATKQDCLEGTKALLLELSDLGYRASAKKAQICRREVTYLGYSLRDGQRWLTEARKKTVVQIPAPTTAKQVREFLGKAGFCRLFIPGFATLAAPLYPLTKPKGEFSWAPEHQKAFDAIKKALLSAPALALPDVTKPFTLYVDERKGVARGVLTQTLGPWRRPVAYLSKKLDPVASGWPVCLKAIAAVAILVKDADKLTLGQNITVIAPHALENIVRQPPDRWMTNARMTHYQSLLLTERVTFAPPAALNPATLLPEETDEPVTHDCHQLLIEETGVRKDLTDIPLTGEVLTWFTDGSSYVVEGKRMAGAAVVDGTRTIWASSLPEGTSAQKAELMALTQALRLAEGKSINIYTDSRYAFATAHVHGAIYKQRGWLTSAGREIKNKEEILSLLEALHLPKRLAIIHCPGHQKAKDPISRGNQMADRVAKQAAQGVNLLPAGKRTADGSEFEKRTADGSEFESPKKKAKVE

SEQ ID NO: 214 - protein, 2095 aa, synthetic construct
MPAAKRVKLDGGDKKYSIGLDIGTNSVGWAVITDEYKVPSKKFKVLGNTDRHSIKKNLIGALLFDSGETAEATRLKRTARRRYTRRKNRICYLQEIFSNEMAKVDDSFFHRLEESFLVEEDKKHERHPIFGNIVDEVAYHEKYPTIYHLRKKLVDSTDKADLRLIYLALAHMIKFRGHFLIEGDLNPDNSDVDKLFIQLVQTYNQLFEENPINASGVDAKAILSARLSKSRRLENLIAQLPGEKKNGLFGNLIALSLGLTPNFKSNFDLAEDAKLQLSKDTYDDDLDNLLAQIGDQYADLFLAAKNLSDAILLSDILRVNTEITKAPLSASMIKRYDEHHQDLTLLKALVRQQLPEKYKEIFFDQSKNGYAGYIDGGASQEEFYKFIKPILEKMDGTEELLVKLNREDLLRKQRTFDNGSIPHQIHLGELHAILRRQEDFYPFLKDNREKIEKILTFRIPYYVGPLARGNSRFAWMTRKSEETITPWNFEEVVDKGASAQSFIERMTNFDKNLPNEKVLPKHSLLYEYFTVYNELTKVKYVTEGMRKPAFLSGEQKKAIVDLLFKTNRKVTVKQLKEDYFKKIECFDSVEISGVEDRFNASLGTYHDLLKIIKDKDFLDNEENEDILEDIVLTLTLFEDREMIEERLKTYAHLFDDKVMKQLKRRRYTGWGRLSRKLINGIRDKQSGKTILDFLKSDGFANRNFMQLIHDDSLTFKEDIQKAQVSGQGDSLHEHIANLAGSPAIKKGILQTVKVVDELVKVMGRHKPENIVIEMARENQTTQKGQKNSRERMKRIEEGIKELGSQILKEHPVENTQLQNEKLYLYYLQNGRDMYVDQELDINRLSDYDVDHIVPQSFLKDDSIDNKVLTRSDKARGKSDNVPSEEVVKKMKNYWRQLLNAKLITQRKFDNLTKAERGGLSELDKAGFIKRQLVETRQITKHVAQILDSRMNTKYDENDKLIREVKVITLKSKLVSDFRKDFQFYKVREINNYHHAHDAYLNAVVGTALIKKYPKLESEFVYGDYKVYDVRKMIAKSEQEIGKATAKYFFYSNIMNFFKTEITLANGEIRKRPLIETNGETGEIVWDKGRDFATVRKVLSMPQVNIVKKTEVQTGGFSKESILPKRNSDKLIARKKDWDPKKYGGFDSPTVAYSVLVVAKVEKGKSKKLKSVKELLGITIMERSSFEKNPIDFLEAKGYKEVKKDLIIKLPKYSLFELENGRKRMLASAGELQKGNELALPSKYVNFLYLASHYEKLKGSPEDNEQKQLFVEQHKHYLDEIIEQISEFSKRVILADANLDKVLSAYNKHRDKPIREQAENIIHLFTLTNLGAPAAFKYFDTTIDRKRYTSTKEVLDATLIHQSITGLYETRIDLSQLGGDGGGSSGSSGSSGSSGSSGSSGGLDDEYRLYSPLVKPDQNIQFWLEQFPQAWAETAGMGLAKQVPPQVIQLKASATPVSVRQYPLSKEAQEGIRPHVQRLIQQGILVPVQSPWNTPLLPVRKPGTNDYRPVQDLREVNKRVQDIHPTVPNPYNLLCALPPQRSWYTVLDLKDAFFCLRLHPTSQPLFAFEWRDPGTGRTGQLTWTRLPQGFKNSPTIFNEALHRDLANFRIQHPQVTLLQYVDDLLLAGATKQDCLEGTKALLLELSDLGYRASAKKAQICRREVTYLGYSLRDGQRWLTEARKKTVVQIPAPTTAKQVREFLGKAGFCRLFIPGFATLAAPLYPLTKPKGEFSWAPEHQKAFDAIKKALLSAPALALPDVTKPFTLYVDERKGVARGVLTQTLGPWRRPVAYLSKKLDPVASGWPVCLKAIAAVAILVKDADKLTLGQNITVIAPHALENIVRQPPDRWMTNARMTHYQSLLLTERVTFAPPAALNPATLLPEETDEPVTHDCHQLLIEETGVRKDLTDIPLTGEVLTWFTDGSSYVVEGKRMAGAAVVDGTRTIWASSLPEGTSAQKAELMALTQALRLAEGKSINIYTDSRYAFATAHVHGAIYKQRGWLTSAGREIKNKEEILSLLEALHLPKRLAIIHCPGHQKAKDPISRGNQMADRVAKQAAQGVNLLPAGKRTADGSEFEKRTADGSEFESPKKKAKVE

SEQ ID NO: 215 - protein, 2097 aa, synthetic construct; identical to SEQ ID NO: 46

SEQ ID NO: 216 - protein, 2092 aa, synthetic construct; identical to SEQ ID NO: 51

SEQ ID NO: 217 - protein, 2088 aa, synthetic construct
MPAAKRVKLDGGDKKYSIGLDIGTNSVGWAVITDEYKVPSKKFKVLGNTDRHSIKKNLIGALLFDSGETAEATRLKRTARRRYTRRKNRICYLQEIFSNEMAKVDDSFFHRLEESFLVEEDKKHERHPIFGNIVDEVAYHEKYPTIYHLRKKLVDSTDKADLRLIYLALAHMIKFRGHFLIEGDLNPDNSDVDKLFIQLVQTYNQLFEENPINASGVDAKAILSARLSKSRRLENLIAQLPGEKKNGLFGNLIALSLGLTPNFKSNFDLAEDAKLQLSKDTYDDDLDNLLAQIGDQYADLFLAAKNLSDAILLSDILRVNTEITKAPLSASMIKRYDEHHQDLTLLKALVRQQLPEKYKEIFFDQSKNGYAGYIDGGASQEEFYKFIKPILEKMDGTEELLVKLNREDLLRKQRTFDNGSIPHQIHLGELHAILRRQEDFYPFLKDNREKIEKILTFRIPYYVGPLARGNSRFAWMTRKSEETITPWNFEEVVDKGASAQSFIERMTNFDKNLPNEKVLPKHSLLYEYFTVYNELTKVKYVTEGMRKPAFLSGEQKKAIVDLLFKTNRKVTVKQLKEDYFKKIECFDSVEISGVEDRFNASLGTYHDLLKIIKDKDFLDNEENEDILEDIVLTLTLFEDREMIEERLKTYAHLFDDKVMKQLKRRRYTGWGRLSRKLINGIRDKQSGKTILDFLKSDGFANRNFMQLIHDDSLTFKEDIQKAQVSGQGDSLHEHIANLAGSPAIKKGILQTVKVVDELVKVMGRHKPENIVIEMARENQTTQKGQKNSRERMKRIEEGIKELGSQILKEHPVENTQLQNEKLYLYYLQNGRDMYVDQELDINRLSDYDVDHIVPQSFLKDDSIDNKVLTRSDKARGKSDNVPSEEVVKKMKNYWRQLLNAKLITQRKFDNLTKAERGGLSELDKAGFIKRQLVETRQITKHVAQILDSRMNTKYDENDKLIREVKVITLKSKLVSDFRKDFQFYKVREINNYHHAHDAYLNAVVGTALIKKYPKLESEFVYGDYKVYDVRKMIAKSEQEIGKATAKYFFYSNIMNFFKTEITLANGEIRKRPLIETNGETGEIVWDKGRDFATVRKVLSMPQVNIVKKTEVQTGGFSKESILPKRNSDKLIARKKDWDPKKYGGFDSPTVAYSVLVVAKVEKGKSKKLKSVKELLGITIMERSSFEKNPIDFLEAKGYKEVKKDLIIKLPKYSLFELENGRKRMLASAGELQKGNELALPSKYVNFLYLASHYEKLKGSPEDNEQKQLFVEQHKHYLDEIIEQISEFSKRVILADANLDKVLSAYNKHRDKPIREQAENIIHLFTLTNLGAPAAFKYFDTTIDRKRYTSTKEVLDATLIHQSITGLYETRIDLSQLGGDGGPAPGGSEAAAKGGLDDEYRLYSPLVKPDQNIQFWLEQFPQAWAETAGMGLAKQVPPQVIQLKASATPVSVRQYPLSKEAQEGIRPHVQRLIQQGILVPVQSPWNTPLLPVRKPGTNDYRPVQDLREVNKRVQDIHPTVPNPYNLLCALPPQRSWYTVLDLKDAFFCLRLHPTSQPLFAFEWRDPGTGRTGQLTWTRLPQGFKNSPTIFNEALHRDLANFRIQHPQVTLLQYVDDLLLAGATKQDCLEGTKALLLELSDLGYRASAKKAQICRREVTYLGYSLRDGQRWLTEARKKTVVQIPAPTTAKQVREFLGKAGFCRLFIPGFATLAAPLYPLTKPKGEFSWAPEHQKAFDAIKKALLSAPALALPDVTKPFTLYVDERKGVARGVLTQTLGPWRRPVAYLSKKLDPVASGWPVCLKAIAAVAILVKDADKLTLGQNITVIAPHALENIVRQPPDRWMTNARMTHYQSLLLTERVTFAPPAALNPATLLPEETDEPVTHDCHQLLIEETGVRKDLTDIPLTGEVLTWFTDGSSYVVEGKRMAGAAVVDGTRTIWASSLPEGTSAQKAELMALTQALRLAEGKSINIYTDSRYAFATAHVHGAIYKQRGWLTSAGREIKNKEEILSLLEALHLPKRLAIIHCPGHQKAKDPISRGNQMADRVAKQAAQGVNLLPAGKRTADGSEFEKRTADGSEFESPKKKAKVE

SEQ ID NO: 218 - protein, 2082 aa, synthetic construct; identical to SEQ ID NO: 70

SEQ ID NO: 219 - protein, 2085 aa, synthetic construct; identical to SEQ ID NO: 48

SEQ ID NO: 220 - protein, 2086 aa, synthetic construct
MPAAKRVKLDGGDKKYSIGLDIGTNSVGWAVITDEYKVPSKKFKVLGNTDRHSIKKNLIGALLFDSGETAEATRLKRTARRRYTRRKNRICYLQEIFSNEMAKVDDSFFHRLEESFLVEEDKKHERHPIFGNIVDEVAYHEKYPTIYHLRKKLVDSTDKADLRLIYLALAHMIKFRGHFLIEGDLNPDNSDVDKLFIQLVQTYNQLFEENPINASGVDAKAILSARLSKSRRLENLIAQLPGEKKNGLFGNLIALSLGLTPNFKSNFDLAEDAKLQLSKDTYDDDLDNLLAQIGDQYADLFLAAKNLSDAILLSDILRVNTEITKAPLSASMIKRYDEHHQDLTLLKALVRQQLPEKYKEIFFDQSKNGYAGYIDGGASQEEFYKFIKPILEKMDGTEELLVKLNREDLLRKQRTFDNGSIPHQIHLGELHAILRRQEDFYPFLKDNREKIEKILTFRIPYYVGPLARGNSRFAWMTRKSEETITPWNFEEVVDKGASAQSFIERMTNFDKNLPNEKVLPKHSLLYEYFTVYNELTKVKYVTEGMRKPAFLSGEQKKAIVDLLFKTNRKVTVKQLKEDYFKKIECFDSVEISGVEDRFNASLGTYHDLLKIIKDKDFLDNEENEDILEDIVLTLTLFEDREMIEERLKTYAHLFDDKVMKQLKRRRYTGWGRLSRKLINGIRDKQSGKTILDFLKSDGFANRNFMQLIHDDSLTFKEDIQKAQVSGQGDSLHEHIANLAGSPAIKKGILQTVKVVDELVKVMGRHKPENIVIEMARENQTTQKGQKNSRERMKRIEEGIKELGSQILKEHPVENTQLQNEKLYLYYLQNGRDMYVDQELDINRLSDYDVDHIVPQSFLKDDSIDNKVLTRSDKARGKSDNVPSEEVVKKMKNYWRQLLNAKLITQRKFDNLTKAERGGLSELDKAGFIKRQLVETRQITKHVAQILDSRMNTKYDENDKLIREVKVITLKSKLVSDFRKDFQFYKVREINNYHHAHDAYLNAVVGTALIKKYPKLESEFVYGDYKVYDVRKMIAKSEQEIGKATAKYFFYSNIMNFFKTEITLANGEIRKRPLIETNGETGEIVWDKGRDFATVRKVLSMPQVNIVKKTEVQTGGFSKESILPKRNSDKLIARKKDWDPKKYGGFDSPTVAYSVLVVAKVEKGKSKKLKSVKELLGITIMERSSFEKNPIDFLEAKGYKEVKKDLIIKLPKYSLFELENGRKRMLASAGELQKGNELALPSKYVNFLYLASHYEKLKGSPEDNEQKQLFVEQHKHYLDEIIEQISEFSKRVILADANLDKVLSAYNKHRDKPIREQAENIIHLFTLTNLGAPAAFKYFDTTIDRKRYTSTKEVLDATLIHQSITGLYETRIDLSQLGGDGGGGGPAPGSSGGLDDEYRLYSPLVKPDQNIQFWLEQFPQAWAETAGMGLAKQVPPQVIQLKASATPVSVRQYPLSKEAQEGIRPHVQRLIQQGILVPVQSPWNTPLLPVRKPGTNDYRPVQDLREVNKRVQDIHPTVPNPYNLLCALPPQRSWYTVLDLKDAFFCLRLHPTSQPLFAFEWRDPGTGRTGQLTWTRLPQGFKNSPTIFNEALHRDLANFRIQHPQVTLLQYVDDLLLAGATKQDCLEGTKALLLELSDLGYRASAKKAQICRREVTYLGYSLRDGQRWLTEARKKTVVQIPAPTTAKQVREFLGKAGFCRLFIPGFATLAAPLYPLTKPKGEFSWAPEHQKAFDAIKKALLSAPALALPDVTKPFTLYVDERKGVARGVLTQTLGPWRRPVAYLSKKLDPVASGWPVCLKAIAAVAILVKDADKLTLGQNITVIAPHALENIVRQPPDRWMTNARMTHYQSLLLTERVTFAPPAALNPATLLPEETDEPVTHDCHQLLIEETGVRKDLTDIPLTGEVLTWFTDGSSYVVEGKRMAGAAVVDGTRTIWASSLPEGTSAQKAELMALTQALRLAEGKSINIYTDSRYAFATAHVHGAIYKQRGWLTSAGREIKNKEEILSLLEALHLPKRLAIIHCPGHQKAKDPISRGNQMADRVAKQAAQGVNLLPAGKRTADGSEFEKRTADGSEFESPKKKAKVE

SEQ ID NO: 221 - protein, 2085 aa, synthetic construct
MPAAKRVKLDGGDKKYSIGLDIGTNSVGWAVITDEYKVPSKKFKVLGNTDRHSIKKNLIGALLFDSGETAEATRLKRTARRRYTRRKNRICYLQEIFSNEMAKVDDSFFHRLEESFLVEEDKKHERHPIFGNIVDEVAYHEKYPTIYHLRKKLVDSTDKADLRLIYLALAHMIKFRGHFLIEGDLNPDNSDVDKLFIQLVQTYNQLFEENPINASGVDAKAILSARLSKSRRLENLIAQLPGEKKNGLFGNLIALSLGLTPNFKSNFDLAEDAKLQLSKDTYDDDLDNLLAQIGDQYADLFLAAKNLSDAILLSDILRVNTEITKAPLSASMIKRYDEHHQDLTLLKALVRQQLPEKYKEIFFDQSKNGYAGYIDGGASQEEFYKFIKPILEKMDGTEELLVKLNREDLLRKQRTFDNGSIPHQIHLGELHAILRRQEDFYPFLKDNREKIEKILTFRIPYYVGPLARGNSRFAWMTRKSEETITPWNFEEVVDKGASAQSFIERMTNFDKNLPNEKVLPKHSLLYEYFTVYNELTKVKYVTEGMRKPAFLSGEQKKAIVDLLFKTNRKVTVKQLKEDYFKKIECFDSVEISGVEDRFNASLGTYHDLLKIIKDKDFLDNEENEDILEDIVLTLTLFEDREMIEERLKTYAHLFDDKVMKQLKRRRYTGWGRLSRKLINGIRDKQSGKTILDFLKSDGFANRNFMQLIHDDSLTFKEDIQKAQVSGQGDSLHEHIANLAGSPAIKKGILQTVKVVDELVKVMGRHKPENIVIEMARENQTTQKGQKNSRERMKRIEEGIKELGSQILKEHPVENTQLQNEKLYLYYLQNGRDMYVDQELDINRLSDYDVDHIVPQSFLKDDSIDNKVLTRSDKARGKSDNVPSEEVVKKMKNYWRQLLNAKLITQRKFDNLTKAERGGLSELDKAGFIKRQLVETRQITKHVAQILDSRMNTKYDENDKLIREVKVITLKSKLVSDFRKDFQFYKVREINNYHHAHDAYLNAVVGTALIKKYPKLESEFVYGDYKVYDVRKMIAKSEQEIGKATAKYFFYSNIMNFFKTEITLANGEIRKRPLIETNGETGEIVWDKGRDFATVRKVLSMPQVNIVKKTEVQTGGFSKESILPKRNSDKLIARKKDWDPKKYGGFDSPTVAYSVLVVAKVEKGKSKKLKSVKELLGITIMERSSFEKNPIDFLEAKGYKEVKKDLIIKLPKYSLFELENGRKRMLASAGELQKGNELALPSKYVNFLYLASHYEKLKGSPEDNEQKQLFVEQHKHYLDEIIEQISEFSKRVILADANLDKVLSAYNKHRDKPIREQAENIIHLFTLTNLGAPAAFKYFDTTIDRKRYTSTKEVLDATLIHQSITGLYETRIDLSQLGGDGGEAAAKGGSGGLDDEYRLYSPLVKPDQNIQFWLEQFPQAWAETAGMGLAKQVPPQVIQLKASATPVSVRQYPLSKEAQEGIRPHVQRLIQQGILVPVQSPWNTPLLPVRKPGTNDYRPVQDLREVNKRVQDIHPTVPNPYNLLCALPPQRSWYTVLDLKDAFFCLRLHPTSQPLFAFEWRDPGTGRTGQLTWTRLPQGFKNSPTIFNEALHRDLANFRIQHPQVTLLQYVDDLLLAGATKQDCLEGTKALLLELSDLGYRASAKKAQICRREVTYLGYSLRDGQRWLTEARKKTVVQIPAPTTAKQVREFLGKAGFCRLFIPGFATLAAPLYPLTKPKGEFSWAPEHQKAFDAIKKALLSAPALALPDVTKPFTLYVDERKGVARGVLTQTLGPWRRPVAYLSKKLDPVASGWPVCLKAIAAVAILVKDADKLTLGQNITVIAPHALENIVRQPPDRWMTNARMTHYQSLLLTERVTFAPPAALNPATLLPEETDEPVTHDCHQLLIEETGVRKDLTDIPLTGEVLTWFTDGSSYVVEGKRMAGAAVVDGTRTIWASSLPEGTSAQKAELMALTQALRLAEGKSINIYTDSRYAFATAHVHGAIYKQRGWLTSAGREIKNKEEILSLLEALHLPKRLAIIHCPGHQKAKDPISRGNQMADRVAKQAAQGVNLLPAGKRTADGSEFEKRTADGSEFESPKKKAKVE

SEQ ID NO: 222 - protein, 2083 aa, synthetic construct
MPAAKRVKLDGGDKKYSIGLDIGTNSVGWAVITDEYKVPSKKFKVLGNTDRHSIKKNLIGALLFDSGETAEATRLKRTARRRYTRRKNRICYLQEIFSNEMAKVDDSFFHRLEESFLVEEDKKHERHPIFGNIVDEVAYHEKYPTIYHLRKKLVDSTDKADLRLIYLALAHMIKFRGHFLIEGDLNPDNSDVDKLFIQLVQTYNQLFEENPINASGVDAKAILSARLSKSRRLENLIAQLPGEKKNGLFGNLIALSLGLTPNFKSNFDLAEDAKLQLSKDTYDDDLDNLLAQIGDQYADLFLAAKNLSDAILLSDILRVNTEITKAPLSASMIKRYDEHHQDLTLLKALVRQQLPEKYKEIFFDQSKNGYAGYIDGGASQEEFYKFIKPILEKMDGTEELLVKLNREDLLRKQRTFDNGSIPHQIHLGELHAILRRQEDFYPFLKDNREKIEKILTFRIPYYVGPLARGNSRFAWMTRKSEETITPWNFEEVVDKGASAQSFIERMTNFDKNLPNEKVLPKHSLLYEYFTVYNELTKVKYVTEGMRKPAFLSGEQKKAIVDLLFKTNRKVTVKQLKEDYFKKIECFDSVEISGVEDRFNASLGTYHDLLKIIKDKDFLDNEENEDILEDIVLTLTLFEDREMIEERLKTYAHLFDDKVMKQLKRRRYTGWGRLSRKLINGIRDKQSGKTILDFLKSDGFANRNFMQLIHDDSLTFKEDIQKAQVSGQGDSLHEHIANLAGSPAIKKGILQTVKVVDELVKVMGRHKPENIVIEMARENQTTQKGQKNSRERMKRIEEGIKELGSQILKEHPVENTQLQNEKLYLYYLQNGRDMYVDQELDINRLSDYDVDHIVPQSFLKDDSIDNKVLTRSDKARGKSDNVPSEEVVKKMKNYWRQLLNAKLITQRKFDNLTKAERGGLSELDKAGFIKRQLVETRQITKHVAQILDSRMNTKYDENDKLIREVKVITLKSKLVSDFRKDFQFYKVREINNYHHAHDAYLNAVVGTALIKKYPKLESEFVYGDYKVYDVRKMIAKSEQEIGKATAKYFFYSNIMNFFKTEITLANGEIRKRPLIETNGETGEIVWDKGRDFATVRKVLSMPQVNIVKKTEVQTGGFSKESILPKRNSDKLIARKKDWDPKKYGGFDSPTVAYSVLVVAKVEKGKSKKLKSVKELLGITIMERSSFEKNPIDFLEAKGYKEVKKDLIIKLPKYSLFELENGRKRMLASAGELQKGNELALPSKYVNFLYLASHYEKLKGSPEDNEQKQLFVEQHKHYLDEIIEQISEFSKRVILADANLDKVLSAYNKHRDKPIREQAENIIHLFTLTNLGAPAAFKYFDTTIDRKRYTSTKEVLDATLIHQSITGLYETRIDLSQLGGDGGGGSGGGGGLDDEYRLYSPLVKPDQNIQFWLEQFPQAWAETAGMGLAKQVPPQVIQLKASATPVSVRQYPLSKEAQEGIRPHVQRLIQQGILVPVQSPWNTPLLPVRKPGTNDYRPVQDLREVNKRVQDIHPTVPNPYNLLCALPPQRSWYTVLDLKDAFFCLRLHPTSQPLFAFEWRDPGTGRTGQLTWTRLPQGFKNSPTIFNEALHRDLANFRIQHPQVTLLQYVDDLLLAGATKQDCLEGTKALLLELSDLGYRASAKKAQICRREVTYLGYSLRDGQRWLTEARKKTVVQIPAPTTAKQVREFLGKAGFCRLFIPGFATLAAPLYPLTKPKGEFSWAPEHQKAFDAIKKALLSAPALALPDVTKPFTLYVDERKGVARGVLTQTLGPWRRPVAYLSKKLDPVASGWPVCLKAIAAVAILVKDADKLTLGQNITVIAPHALENIVRQPPDRWMTNARMTHYQSLLLTERVTFAPPAALNPATLLPEETDEPVTHDCHQLLIEETGVRKDLTDIPLTGEVLTWFTDGSSYVVEGKRMAGAAVVDGTRTIWASSLPEGTSAQKAELMALTQALRLAEGKSINIYTDSRYAFATAHVHGAIYKQRGWLTSAGREIKNKEEILSLLEALHLPKRLAIIHCPGHQKAKDPISRGNQMADRVAKQAAQGVNLLPAGKRTADGSEFEKRTADGSEFESPKKKAKVE

SEQ ID NO: 223 - protein, 2083 aa, synthetic construct; identical to SEQ ID NO: 47

SEQ ID NO: 224 - protein, 2088 aa, synthetic construct
MPAAKRVKLDGGDKKYSIGLDIGTNSVGWAVITDEYKVPSKKFKVLGNTDRHSIKKNLIGALLFDSGETAEATRLKRTARRRYTRRKNRICYLQEIFSNEMAKVDDSFFHRLEESFLVEEDKKHERHPIFGNIVDEVAYHEKYPTIYHLRKKLVDSTDKADLRLIYLALAHMIKFRGHFLIEGDLNPDNSDVDKLFIQLVQTYNQLFEENPINASGVDAKAILSARLSKSRRLENLIAQLPGEKKNGLFGNLIALSLGLTPNFKSNFDLAEDAKLQLSKDTYDDDLDNLLAQIGDQYADLFLAAKNLSDAILLSDILRVNTEITKAPLSASMIKRYDEHHQDLTLLKALVRQQLPEKYKEIFFDQSKNGYAGYIDGGASQEEFYKFIKPILEKMDGTEELLVKLNREDLLRKQRTFDNGSIPHQIHLGELHAILRRQEDFYPFLKDNREKIEKILTFRIPYYVGPLARGNSRFAWMTRKSEETITPWNFEEVVDKGASAQSFIERMTNFDKNLPNEKVLPKHSLLYEYFTVYNELTKVKYVTEGMRKPAFLSGEQKKAIVDLLFKTNRKVTVKQLKEDYFKKIECFDSVEISGVEDRFNASLGTYHDLLKIIKDKDFLDNEENEDILEDIVLTLTLFEDREMIEERLKTYAHLFDDKVMKQLKRRRYTGWGRLSRKLINGIRDKQSGKTILDFLKSDGFANRNFMQLIHDDSLTFKEDIQKAQVSGQGDSLHEHIANLAGSPAIKKGILQTVKVVDELVKVMGRHKPENIVIEMARENQTTQKGQKNSRERMKRIEEGIKELGSQILKEHPVENTQLQNEKLYLYYLQNGRDMYVDQELDINRLSDYDVDHIVPQSFLKDDSIDNKVLTRSDKARGKSDNVPSEEVVKKMKNYWRQLLNAKLITQRKFDNLTKAERGGLSELDKAGFIKRQLVETRQITKHVAQILDSRMNTKYDENDKLIREVKVITLKSKLVSDFRKDFQFYKVREINNYHHAHDAYLNAVVGTALIKKYPKLESEFVYGDYKVYDVRKMIAKSEQEIGKATAKYFFYSNIMNFFKTEITLANGEIRKRPLIETNGETGEIVWDKGRDFATVRKVLSMPQVNIVKKTEVQTGGFSKESILPKRNSDKLIARKKDWDPKKYGGFDSPTVAYSVLVVAKVEKGKSKKLKSVKELLGITIMERSSFEKNPIDFLEAKGYKEVKKDLIIKLPKYSLFELENGRKRMLASAGELQKGNELALPSKYVNFLYLASHYEKLKGSPEDNEQKQLFVEQHKHYLDEIIEQISEFSKRVILADANLDKVLSAYNKHRDKPIREQAENIIHLFTLTNLGAPAAFKYFDTTIDRKRYTSTKEVLDATLIHQSITGLYETRIDLSQLGGDGGEAAAKPAPGSSGGLDDEYRLYSPLVKPDQNIQFWLEQFPQAWAETAGMGLAKQVPPQVIQLKASATPVSVRQYPLSKEAQEGIRPHVQRLIQQGILVPVQSPWNTPLLPVRKPGTNDYRPVQDLREVNKRVQDIHPTVPNPYNLLCALPPQRSWYTVLDLKDAFFCLRLHPTSQPLFAFEWRDPGTGRTGQLTWTRLPQGFKNSPTIFNEALHRDLANFRIQHPQVTLLQYVDDLLLAGATKQDCLEGTKALLLELSDLGYRASAKKAQICRREVTYLGYSLRDGQRWLTEARKKTVVQIPAPTTAKQVREFLGKAGFCRLFIPGFATLAAPLYPLTKPKGEFSWAPEHQKAFDAIKKALLSAPALALPDVTKPFTLYVDERKGVARGVLTQTLGPWRRPVAYLSKKLDPVASGWPVCLKAIAAVAILVKDADKLTLGQNITVIAPHALENIVRQPPDRWMTNARMTHYQSLLLTERVTFAPPAALNPATLLPEETDEPVTHDCHQLLIEETGVRKDLTDIPLTGEVLTWFTDGSSYVVEGKRMAGAAVVDGTRTIWASSLPEGTSAQKAELMALTQALRLAEGKSINIYTDSRYAFATAHVHGAIYKQRGWLTSAGREIKNKEEILSLLEALHLPKRLAIIHCPGHQKAKDPISRGNQMADRVAKQAAQGVNLLPAGKRTADGSEFEKRTADGSEFESPKKKAKVE

SEQ ID NO: 225 - protein, 2088 aa, synthetic construct
MPAAKRVKLDGGDKKYSIGLDIGTNSVGWAVITDEYKVPSKKFKVLGNTDRHSIKKNLIGALLFDSGETAEATRLKRTARRRYTRRKNRICYLQEIFSNEMAKVDDSFFHRLEESFLVEEDKKHERHPIFGNIVDEVAYHEKYPTIYHLRKKLVDSTDKADLRLIYLALAHMIKFRGHFLIEGDLNPDNSDVDKLFIQLVQTYNQLFEENPINASGVDAKAILSARLSKSRRLENLIAQLPGEKKNGLFGNLIALSLGLTPNFKSNFDLAEDAKLQLSKDTYDDDLDNLLAQIGDQYADLFLAAKNLSDAILLSDILRVNTEITKAPLSASMIKRYDEHHQDLTLLKALVRQQLPEKYKEIFFDQSKNGYAGYIDGGASQEEFYKFIKPILEKMDGTEELLVKLNREDLLRKQRTFDNGSIPHQIHLGELHAILRRQEDFYPFLKDNREKIEKILTFRIPYYVGPLARGNSRFAWMTRKSEETITPWNFEEVVDKGASAQSFIERMTNFDKNLPNEKVLPKHSLLYEYFTVYNELTKVKYVTEGMRKPAFLSGEQKKAIVDLLFKTNRKVTVKQLKEDYFKKIECFDSVEISGVEDRFNASLGTYHDLLKIIKDKDFLDNEENEDILEDIVLTLTLFEDREMIEERLKTYAHLFDDKVMKQLKRRRYTGWGRLSRKLINGIRDKQSGKTILDFLKSDGFANRNFMQLIHDDSLTFKEDIQKAQVSGQGDSLHEHIANLAGSPAIKKGILQTVKVVDELVKVMGRHKPENIVIEMARENQTTQKGQKNSRERMKRIEEGIKELGSQILKEHPVENTQLQNEKLYLYYLQNGRDMYVDQELDINRLSDYDVDHIVPQSFLKDDSIDNKVLTRSDKARGKSDNVPSEEVVKKMKNYWRQLLNAKLITQRKFDNLTKAERGGLSELDKAGFIKRQLVETRQITKHVAQILDSRMNTKYDENDKLIREVKVITLKSKLVSDFRKDFQFYKVREINNYHHAHDAYLNAVVGTALIKKYPKLESEFVYGDYKVYDVRKMIAKSEQEIGKATAKYFFYSNIMNFFKTEITLANGEIRKRPLIETNGETGEIVWDKGRDFATVRKVLSMPQVNIVKKTEVQTGGFSKESILPKRNSDKLIARKKDWDPKKYGGFDSPTVAYSVLVVAKVEKGKSKKLKSVKELLGITIMERSSFEKNPIDFLEAKGYKEVKKDLIIKLPKYSLFELENGRKRMLASAGELQKGNELALPSKYVNFLYLASHYEKLKGSPEDNEQKQLFVEQHKHYLDEIIEQISEFSKRVILADANLDKVLSAYNKHRDKPIREQAENIIHLFTLTNLGAPAAFKYFDTTIDRKRYTSTKEVLDATLIHQSITGLYETRIDLSQLGGDGGPAPGSSEAAAKGGLDDEYRLYSPLVKPDQNIQFWLEQFPQAWAETAGMGLAKQVPPQVIQLKASATPVSVRQYPLSKEAQEGIRPHVQRLIQQGILVPVQSPWNTPLLPVRKPGTNDYRPVQDLREVNKRVQDIHPTVPNPYNLLCALPPQRSWYTVLDLKDAFFCLRLHPTSQPLFAFEWRDPGTGRTGQLTWTRLPQGFKNSPTIFNEALHRDLANFRIQHPQVTLLQYVDDLLLAGATKQDCLEGTKALLLELSDLGYRASAKKAQICRREVTYLGYSLRDGQRWLTEARKKTVVQIPAPTTAKQVREFLGKAGFCRLFIPGFATLAAPLYPLTKPKGEFSWAPEHQKAFDAIKKALLSAPALALPDVTKPFTLYVDERKGVARGVLTQTLGPWRRPVAYLSKKLDPVASGWPVCLKAIAAVAILVKDADKLTLGQNITVIAPHALENIVRQPPDRWMTNARMTHYQSLLLTERVTFAPPAALNPATLLPEETDEPVTHDCHQLLIEETGVRKDLTDIPLTGEVLTWFTDGSSYVVEGKRMAGAAVVDGTRTIWASSLPEGTSAQKAELMALTQALRLAEGKSINIYTDSRYAFATAHVHGAIYKQRGWLTSAGREIKNKEEILSLLEALHLPKRLAIIHCPGHQKAKDPISRGNQMADRVAKQAAQGVNLLPAGKRTADGSEFEKRTADGSEFESPKKKAKVE

SEQ ID NO: 226 - protein, 2086 aa, synthetic construct
MPAAKRVKLDGGDKKYSIGLDIGTNSVGWAVITDEYKVPSKKFKVLGNTDRHSIKKNLIGALLFDSGETAEATRLKRTARRRYTRRKNRICYLQEIFSNEMAKVDDSFFHRLEESFLVEEDKKHERHPIFGNIVDEVAYHEKYPTIYHLRKKLVDSTDKADLRLIYLALAHMIKFRGHFLIEGDLNPDNSDVDKLFIQLVQTYNQLFEENPINASGVDAKAILSARLSKSRRLENLIAQLPGEKKNGLFGNLIALSLGLTPNFKSNFDLAEDAKLQLSKDTYDDDLDNLLAQIGDQYADLFLAAKNLSDAILLSDILRVNTEITKAPLSASMIKRYDEHHQDLTLLKALVRQQLPEKYKEIFFDQSKNGYAGYIDGGASQEEFYKFIKPILEKMDGTEELLVKLNREDLLRKQRTFDNGSIPHQIHLGELHAILRRQEDFYPFLKDNREKIEKILTFRIPYYVGPLARGNSRFAWMTRKSEETITPWNFEEVVDKGASAQSFIERMTNFDKNLPNEKVLPKHSLLYEYFTVYNELTKVKYVTEGMRKPAFLSGEQKKAIVDLLFKTNRKVTVKQLKEDYFKKIECFDSVEISGVEDRFNASLGTYHDLLKIIKDKDFLDNEENEDILEDIVLTLTLFEDREMIEERLKTYAHLFDDKVMKQLKRRRYTGWGRLSRKLINGIRDKQSGKTILDFLKSDGFANRNFMQLIHDDSLTFKEDIQKAQVSGQGDSLHEHIANLAGSPAIKKGILQTVKVVDELVKVMGRHKPENIVIEMARENQTTQKGQKNSRERMKRIEEGIKELGSQILKEHPVENTQLQNEKLYLYYLQNGRDMYVDQELDINRLSDYDVDHIVPQSFLKDDSIDNKVLTRSDKARGKSDNVPSEEVVKKMKNYWRQLLNAKLITQRKFDNLTKAERGGLSELDKAGFIKRQLVETRQITKHVAQILDSRMNTKYDENDKLIREVKVITLKSKLVSDFRKDFQFYKVREINNYHHAHDAYLNAVVGTALIKKYPKLESEFVYGDYKVYDVRKMIAKSEQEIGKATAKYFFYSNIMNFFKTEITLANGEIRKRPLIETNGETGEIVWDKGRDFATVRKVLSMPQVNIVKKTEVQTGGFSKESILPKRNSDKLIARKKDWDPKKYGGFDSPTVAYSVLVVAKVEKGKSKKLKSVKELLGITIMERSSFEKNPIDFLEAKGYKEVKKDLIIKLPKYSLFELENGRKRMLASAGELQKGNELALPSKYVNFLYLASHYEKLKGSPEDNEQKQLFVEQHKHYLDEIIEQISEFSKRVILADANLDKVLSAYNKHRDKPIREQAENIIHLFTLTNLGAPAAFKYFDTTIDRKRYTSTKEVLDATLIHQSITGLYETRIDLSQLGGDGGGGSGGSGGSGGLDDEYRLYSPLVKPDQNIQFWLEQFPQAWAETAGMGLAKQVPPQVIQLKASATPVSVRQYPLSKEAQEGIRPHVQRLIQQGILVPVQSPWNTPLLPVRKPGTNDYRPVQDLREVNKRVQDIHPTVPNPYNLLCALPPQRSWYTVLDLKDAFFCLRLHPTSQPLFAFEWRDPGTGRTGQLTWTRLPQGFKNSPTIFNEALHRDLANFRIQHPQVTLLQYVDDLLLAGATKQDCLEGTKALLLELSDLGYRASAKKAQICRREVTYLGYSLRDGQRWLTEARKKTVVQIPAPTTAKQVREFLGKAGFCRLFIPGFATLAAPLYPLTKPKGEFSWAPEHQKAFDAIKKALLSAPALALPDVTKPFTLYVDERKGVARGVLTQTLGPWRRPVAYLSKKLDPVASGWPVCLKAIAAVAILVKDADKLTLGQNITVIAPHALENIVRQPPDRWMTNARMTHYQSLLLTERVTFAPPAALNPATLLPEETDEPVTHDCHQLLIEETGVRKDLTDIPLTGEVLTWFTDGSSYVVEGKRMAGAAVVDGTRTIWASSLPEGTSAQKAELMALTQALRLAEGKSINIYTDSRYAFATAHVHGAIYKQRGWLTSAGREIKNKEEILSLLEALHLPKRLAIIHCPGHQKAKDPISRGNQMADRVAKQAAQGVNLLPAGKRTADGSEFEKRTADGSEFESPKKKAKVE

SEQ ID NO: 227 - protein, 2083 aa, synthetic construct; identical to SEQ ID NO: 78

SEQ ID NO: 228 - protein, 2089 aa, synthetic construct; identical to SEQ ID NO: 41

SEQ ID NO: 229 - protein, 2088 aa, synthetic construct; identical to SEQ ID NO: 65

SEQ ID NO: 230 - protein, 2088 aa, synthetic construct; identical to SEQ ID NO: 80

SEQ ID NO: 231 - protein, 2088 aa, synthetic construct
MPAAKRVKLDGGDKKYSIGLDIGTNSVGWAVITDEYKVPSKKFKVLGNTDRHSIKKNLIGALLFDSGETAEATRLKRTARRRYTRRKNRICYLQEIFSNEMAKVDDSFFHRLEESFLVEEDKKHERHPIFGNIVDEVAYHEKYPTIYHLRKKLVDSTDKADLRLIYLALAHMIKFRGHFLIEGDLNPDNSDVDKLFIQLVQTYNQLFEENPINASGVDAKAILSARLSKSRRLENLIAQLPGEKKNGLFGNLIALSLGLTPNFKSNFDLAEDAKLQLSKDTYDDDLDNLLAQIGDQYADLFLAAKNLSDAILLSDILRVNTEITKAPLSASMIKRYDEHHQDLTLLKALVRQQLPEKYKEIFFDQSKNGYAGYIDGGASQEEFYKFIKPILEKMDGTEELLVKLNREDLLRKQRTFDNGSIPHQIHLGELHAILRRQEDFYPFLKDNREKIEKILTFRIPYYVGPLARGNSRFAWMTRKSEETITPWNFEEVVDKGASAQSFIERMTNFDKNLPNEKVLPKHSLLYEYFTVYNELTKVKYVTEGMRKPAFLSGEQKKAIVDLLFKTNRKVTVKQLKEDYFKKIECFDSVEISGVEDRFNASLGTYHDLLKIIKDKDFLDNEENEDILEDIVLTLTLFEDREMIEERLKTYAHLFDDKVMKQLKRRRYTGWGRLSRKLINGIRDKQSGKTILDFLKSDGFANRNFMQLIHDDSLTFKEDIQKAQVSGQGDSLHEHIANLAGSPAIKKGILQTVKVVDELVKVMGRHKPENIVIEMARENQTTQKGQKNSRERMKRIEEGIKELGSQILKEHPVENTQLQNEKLYLYYLQNGRDMYVDQELDINRLSDYDVDHIVPQSFLKDDSIDNKVLTRSDKARGKSDNVPSEEVVKKMKNYWRQLLNAKLITQRKFDNLTKAERGGLSELDKAGFIKRQLVETRQITKHVAQILDSRMNTKYDENDKLIREVKVITLKSKLVSDFRKDFQFYKVREINNYHHAHDAYLNAVVGTALIKKYPKLESEFVYGDYKVYDVRKMIAKSEQEIGKATAKYFFYSNIMNFFKTEITLANGEIRKRPLIETNGETGEIVWDKGRDFATVRKVLSMPQVNIVKKTEVQTGGFSKESILPKRNSDKLIARKKDWDPKKYGGFDSPTVAYSVLVVAKVEKGKSKKLKSVKELLGITIMERSSFEKNPIDFLEAKGYKEVKKDLIIKLPKYSLFELENGRKRMLASAGELQKGNELALPSKYVNFLYLASHYEKLKGSPEDNEQKQLFVEQHKHYLDEIIEQISEFSKRVILADANLDKVLSAYNKHRDKPIREQAENIIHLFTLTNLGAPAAFKYFDTTIDRKRYTSTKEVLDATLIHQSITGLYETRIDLSQLGGDGGEAAAKGGGGGSGGLDDEYRLYSPLVKPDQNIQFWLEQFPQAWAETAGMGLAKQVPPQVIQLKASATPVSVRQYPLSKEAQEGIRPHVQRLIQQGILVPVQSPWNTPLLPVRKPGTNDYRPVQDLREVNKRVQDIHPTVPNPYNLLCALPPQRSWYTVLDLKDAFFCLRLHPTSQPLFAFEWRDPGTGRTGQLTWTRLPQGFKNSPTIFNEALHRDLANFRIQHPQVTLLQYVDDLLLAGATKQDCLEGTKALLLELSDLGYRASAKKAQICRREVTYLGYSLRDGQRWLTEARKKTVVQIPAPTTAKQVREFLGKAGFCRLFIPGFATLAAPLYPLTKPKGEFSWAPEHQKAFDAIKKALLSAPALALPDVTKPFTLYVDERKGVARGVLTQTLGPWRRPVAYLSKKLDPVASGWPVCLKAIAAVAILVKDADKLTLGQNITVIAPHALENIVRQPPDRWMTNARMTHYQSLLLTERVTFAPPAALNPATLLPEETDEPVTHDCHQLLIEETGVRKDLTDIPLTGEVLTWFTDGSSYVVEGKRMAGAAVVDGTRTIWASSLPEGTSAQKAELMALTQALRLAEGKSINIYTDSRYAFATAHVHGAIYKQRGWLTSAGREIKNKEEILSLLEALHLPKRLAIIHCPGHQKAKDPISRGNQMADRVAKQAAQGVNLLPAGKRTADGSEFEKRTADGSEFESPKKKAKVE

SEQ ID NO: 232 - protein, 2102 aa, synthetic construct; identical to SEQ ID NO: 39

SEQ ID NO: 233 - protein, 2085 aa, synthetic construct
MPAAKRVKLDGGDKKYSIGLDIGTNSVGWAVITDEYKVPSKKFKVLGNTDRHSIKKNLIGALLFDSGETAEATRLKRTARRRYTRRKNRICYLQEIFSNEMAKVDDSFFHRLEESFLVEEDKKHERHPIFGNIVDEVAYHEKYPTIYHLRKKLVDSTDKADLRLIYLALAHMIKFRGHFLIEGDLNPDNSDVDKLFIQLVQTYNQLFEENPINASGVDAKAILSARLSKSRRLENLIAQLPGEKKNGLFGNLIALSLGLTPNFKSNFDLAEDAKLQLSKDTYDDDLDNLLAQIGDQYADLFLAAKNLSDAILLSDILRVNTEITKAPLSASMIKRYDEHHQDLTLLKALVRQQLPEKYKEIFFDQSKNGYAGYIDGGASQEEFYKFIKPILEKMDGTEELLVKLNREDLLRKQRTFDNGSIPHQIHLGELHAILRRQEDFYPFLKDNREKIEKILTFRIPYYVGPLARGNSRFAWMTRKSEETITPWNFEEVVDKGASAQSFIERMTNFDKNLPNEKVLPKHSLLYEYFTVYNELTKVKYVTEGMRKPAFLSGEQKKAIVDLLFKTNRKVTVKQLKEDYFKKIECFDSVEISGVEDRFNASLGTYHDLLKIIKDKDFLDNEENEDILEDIVLTLTLFEDREMIEERLKTYAHLFDDKVMKQLKRRRYTGWGRLSRKLINGIRDKQSGKTILDFLKSDGFANRNFMQLIHDDSLTFKEDIQKAQVSGQGDSLHEHIANLAGSPAIKKGILQTVKVVDELVKVMGRHKPENIVIEMARENQTTQKGQKNSRERMKRIEEGIKELGSQILKEHPVENTQLQNEKLYLYYLQNGRDMYVDQELDINRLSDYDVDHIVPQSFLKDDSIDNKVLTRSDKARGKSDNVPSEEVVKKMKNYWRQLLNAKLITQRKFDNLTKAERGGLSELDKAGFIKRQLVETRQITKHVAQILDSRMNTKYDENDKLIREVKVITLKSKLVSDFRKDFQFYKVREINNYHHAHDAYLNAVVGTALIKKYPKLESEFVYGDYKVYDVRKMIAKSEQEIGKATAKYFFYSNIMNFFKTEITLANGEIRKRPLIETNGETGEIVWDKGRDFATVRKVLSMPQVNIVKKTEVQTGGFSKESILPKRNSDKLIARKKDWDPKKYGGFDSPTVAYSVLVVAKVEKGKSKKLKSVKELLGITIMERSSFEKNPIDFLEAKGYKEVKKDLIIKLPKYSLFELENGRKRMLASAGELQKGNELALPSKYVNFLYLASHYEKLKGSPEDNEQKQLFVEQHKHYLDEIIEQISEFSKRVILADANLDKVLSAYNKHRDKPIREQAENIIHLFTLTNLGAPAAFKYFDTTIDRKRYTSTKEVLDATLIHQSITGLYETRIDLSQLGGDGGEAAAKPAPGGLDDEYRLYSPLVKPDQNIQFWLEQFPQAWAETAGMGLAKQVPPQVIQLKASATPVSVRQYPLSKEAQEGIRPHVQRLIQQGILVPVQSPWNTPLLPVRKPGTNDYRPVQDLREVNKRVQDIHPTVPNPYNLLCALPPQRSWYTVLDLKDAFFCLRLHPTSQPLFAFEWRDPGTGRTGQLTWTRLPQGFKNSPTIFNEALHRDLANFRIQHPQVTLLQYVDDLLLAGATKQDCLEGTKALLLELSDLGYRASAKKAQICRREVTYLGYSLRDGQRWLTEARKKTVVQIPAPTTAKQVREFLGKAGFCRLFIPGFATLAAPLYPLTKPKGEFSWAPEHQKAFDAIKKALLSAPALALPDVTKPFTLYVDERKGVARGVLTQTLGPWRRPVAYLSKKLDPVASGWPVCLKAIAAVAILVKDADKLTLGQNITVIAPHALENIVRQPPDRWMTNARMTHYQSLLLTERVTFAPPAALNPATLLPEETDEPVTHDCHQLLIEETGVRKDLTDIPLTGEVLTWFTDGSSYVVEGKRMAGAAVVDGTRTIWASSLPEGTSAQKAELMALTQALRLAEGKSINIYTDSRYAFATAHVHGAIYKQRGWLTSAGREIKNKEEILSLLEALHLPKRLAIIHCPGHQKAKDPISRGNQMADRVAKQAAQGVNLLPAGKRTADGSEFEKRTADGSEFESPKKKAKVE

SEQ ID NO: 234 - protein, 2092 aa, synthetic construct; identical to SEQ ID NO: 56

SEQ ID NO: 235 - protein, 2083 aa, synthetic construct
MPAAKRVKLDGGDKKYSIGLDIGTNSVGWAVITDEYKVPSKKFKVLGNTDRHSIKKNLIGALLFDSGETAEATRLKRTARRRYTRRKNRICYLQEIFSNEMAKVDDSFFHRLEESFLVEEDKKHERHPIFGNIVDEVAYHEKYPTIYHLRKKLVDSTDKADLRLIYLALAHMIKFRGHFLIEGDLNPDNSDVDKLFIQLVQTYNQLFEENPINASGVDAKAILSARLSKSRRLENLIAQLPGEKKNGLFGNLIALSLGLTPNFKSNFDLAEDAKLQLSKDTYDDDLDNLLAQIGDQYADLFLAAKNLSDAILLSDILRVNTEITKAPLSASMIKRYDEHHQDLTLLKALVRQQLPEKYKEIFFDQSKNGYAGYIDGGASQEEFYKFIKPILEKMDGTEELLVKLNREDLLRKQRTFDNGSIPHQIHLGELHAILRRQEDFYPFLKDNREKIEKILTFRIPYYVGPLARGNSRFAWMTRKSEETITPWNFEEVVDKGASAQSFIERMTNFDKNLPNEKVLPKHSLLYEYFTVYNELTKVKYVTEGMRKPAFLSGEQKKAIVDLLFKTNRKVTVKQLKEDYFKKIECFDSVEISGVEDRFNASLGTYHDLLKIIKDKDFLDNEENEDILEDIVLTLTLFEDREMIEERLKTYAHLFDDKVMKQLKRRRYTGWGRLSRKLINGIRDKQSGKTILDFLKSDGFANRNFMQLIHDDSLTFKEDIQKAQVSGQGDSLHEHIANLAGSPAIKKGILQTVKVVDELVKVMGRHKPENIVIEMARENQTTQKGQKNSRERMKRIEEGIKELGSQILKEHPVENTQLQNEKLYLYYLQNGRDMYVDQELDINRLSDYDVDHIVPQSFLKDDSIDNKVLTRSDKARGKSDNVPSEEVVKKMKNYWRQLLNAKLITQRKFDNLTKAERGGLSELDKAGFIKRQLVETRQITKHVAQILDSRMNTKYDENDKLIREVKVITLKSKLVSDFRKDFQFYKVREINNYHHAHDAYLNAVVGTALIKKYPKLESEFVYGDYKVYDVRKMIAKSEQEIGKATAKYFFYSNIMNFFKTEITLANGEIRKRPLIETNGETGEIVWDKGRDFATVRKVLSMPQVNIVKKTEVQTGGFSKESILPKRNSDKLIARKKDWDPKKYGGFDSPTVAYSVLVVAKVEKGKSKKLKSVKELLGITIMERSSFEKNPIDFLEAKGYKEVKKDLIIKLPKYSLFELENGRKRMLASAGELQKGNELALPSKYVNFLYLASHYEKLKGSPEDNEQKQLFVEQHKHYLDEIIEQISEFSKRVILADANLDKVLSAYNKHRDKPIREQAENIIHLFTLTNLGAPAAFKYFDTTIDRKRYTSTKEVLDATLIHQSITGLYETRIDLSQLGGDGGGSSGSSGGLDDEYRLYSPLVKPDQNIQFWLEQFPQAWAETAGMGLAKQVPPQVIQLKASATPVSVRQYPLSKEAQEGIRPHVQRLIQQGILVPVQSPWNTPLLPVRKPGTNDYRPVQDLREVNKRVQDIHPTVPNPYNLLCALPPQRSWYTVLDLKDAFFCLRLHPTSQPLFAFEWRDPGTGRTGQLTWTRLPQGFKNSPTIFNEALHRDLANFRIQHPQVTLLQYVDDLLLAGATKQDCLEGTKALLLELSDLGYRASAKKAQICRREVTYLGYSLRDGQRWLTEARKKTVVQIPAPTTAKQVREFLGKAGFCRLFIPGFATLAAPLYPLTKPKGEFSWAPEHQKAFDAIKKALLSAPALALPDVTKPFTLYVDERKGVARGVLTQTLGPWRRPVAYLSKKLDPVASGWPVCLKAIAAVAILVKDADKLTLGQNITVIAPHALENIVRQPPDRWMTNARMTHYQSLLLTERVTFAPPAALNPATLLPEETDEPVTHDCHQLLIEETGVRKDLTDIPLTGEVLTWFTDGSSYVVEGKRMAGAAVVDGTRTIWASSLPEGTSAQKAELMALTQALRLAEGKSINIYTDSRYAFATAHVHGAIYKQRGWLTSAGREIKNKEEILSLLEALHLPKRLAIIHCPGHQKAKDPISRGNQMADRVAKQAAQGVNLLPAGKRTADGSEFEKRTADGSEFESPKKKAKVE

SEQ ID NO: 236 - protein, 2089 aa, synthetic construct; identical to SEQ ID NO: 67

SEQ ID NO: 237 - protein, 2085 aa, synthetic construct
MPAAKRVKLDGGDKKYSIGLDIGTNSVGWAVITDEYKVPSKKFKVLGNTDRHSIKKNLIGALLFDSGETAEATRLKRTARRRYTRRKNRICYLQEIFSNEMAKVDDSFFHRLEESFLVEEDKKHERHPIFGNIVDEVAYHEKYPTIYHLRKKLVDSTDKADLRLIYLALAHMIKFRGHFLIEGDLNPDNSDVDKLFIQLVQTYNQLFEENPINASGVDAKAILSARLSKSRRLENLIAQLPGEKKNGLFGNLIALSLGLTPNFKSNFDLAEDAKLQLSKDTYDDDLDNLLAQIGDQYADLFLAAKNLSDAILLSDILRVNTEITKAPLSASMIKRYDEHHQDLTLLKALVRQQLPEKYKEIFFDQSKNGYAGYIDGGASQEEFYKFIKPILEKMDGTEELLVKLNREDLLRKQRTFDNGSIPHQIHLGELHAILRRQEDFYPFLKDNREKIEKILTFRIPYYVGPLARGNSRFAWMTRKSEETITPWNFEEVVDKGASAQSFIERMTNFDKNLPNEKVLPKHSLLYEYFTVYNELTKVKYVTEGMRKPAFLSGEQKKAIVDLLFKTNRKVTVKQLKEDYFKKIECFDSVEISGVEDRFNASLGTYHDLLKIIKDKDFLDNEENEDILEDIVLTLTLFEDREMIEERLKTYAHLFDDKVMKQLKRRRYTGWGRLSRKLINGIRDKQSGKTILDFLKSDGFANRNFMQLIHDDSLTFKEDIQKAQVSGQGDSLHEHIANLAGSPAIKKGILQTVKVVDELVKVMGRHKPENIVIEMARENQTTQKGQKNSRERMKRIEEGIKELGSQILKEHPVENTQLQNEKLYLYYLQNGRDMYVDQELDINRLSDYDVDHIVPQSFLKDDSIDNKVLTRSDKARGKSDNVPSEEVVKKMKNYWRQLLNAKLITQRKFDNLTKAERGGLSELDKAGFIKRQLVETRQITKHVAQILDSRMNTKYDENDKLIREVKVITLKSKLVSDFRKDFQFYKVREINNYHHAHDAYLNAVVGTALIKKYPKLESEFVYGDYKVYDVRKMIAKSEQEIGKATAKYFFYSNIMNFFKTEITLANGEIRKRPLIETNGETGEIVWDKGRDFATVRKVLSMPQVNIVKKTEVQTGGFSKESILPKRNSDKLIARKKDWDPKKYGGFDSPTVAYSVLVVAKVEKGKSKKLKSVKELLGITIMERSSFEKNPIDFLEAKGYKEVKKDLIIKLPKYSLFELENGRKRMLASAGELQKGNELALPSKYVNFLYLASHYEKLKGSPEDNEQKQLFVEQHKHYLDEIIEQISEFSKRVILADANLDKVLSAYNKHRDKPIREQAENIIHLFTLTNLGAPAAFKYFDTTIDRKRYTSTKEVLDATLIHQSITGLYETRIDLSQLGGDGGGSSEAAAKGGLDDEYRLYSPLVKPDQNIQFWLEQFPQAWAETAGMGLAKQVPPQVIQLKASATPVSVRQYPLSKEAQEGIRPHVQRLIQQGILVPVQSPWNTPLLPVRKPGTNDYRPVQDLREVNKRVQDIHPTVPNPYNLLCALPPQRSWYTVLDLKDAFFCLRLHPTSQPLFAFEWRDPGTGRTGQLTWTRLPQGFKNSPTIFNEALHRDLANFRIQHPQVTLLQYVDDLLLAGATKQDCLEGTKALLLELSDLGYRASAKKAQICRREVTYLGYSLRDGQRWLTEARKKTVVQIPAPTTAKQVREFLGKAGFCRLFIPGFATLAAPLYPLTKPKGEFSWAPEHQKAFDAIKKALLSAPALALPDVTKPFTLYVDERKGVARGVLTQTLGPWRRPVAYLSKKLDPVASGWPVCLKAIAAVAILVKDADKLTLGQNITVIAPHALENIVRQPPDRWMTNARMTHYQSLLLTERVTFAPPAALNPATLLPEETDEPVTHDCHQLLIEETGVRKDLTDIPLTGEVLTWFTDGSSYVVEGKRMAGAAVVDGTRTIWASSLPEGTSAQKAELMALTQALRLAEGKSINIYTDSRYAFATAHVHGAIYKQRGWLTSAGREIKNKEEILSLLEALHLPKRLAIIHCPGHQKAKDPISRGNQMADRVAKQAAQGVNLLPAGKRTADGSEFEKRTADGSEFESPKKKAKVE

SEQ ID NO: 238 - protein, 2092 aa, synthetic construct; identical to SEQ ID NO: 52

SEQ ID NO: 239 - protein, 2088 aa, synthetic construct; identical to SEQ ID NO: 49

SEQ ID NO: 240 - protein, 2088 aa, synthetic construct
MPAAKRVKLDGGDKKYSIGLDIGTNSVGWAVITDEYKVPSKKFKVLGNTDRHSIKKNLIGALLFDSGETAEATRLKRTARRRYTRRKNRICYLQEIFSNEMAKVDDSFFHRLEESFLVEEDKKHERHPIFGNIVDEVAYHEKYPTIYHLRKKLVDSTDKADLRLIYLALAHMIKFRGHFLIEGDLNPDNSDVDKLFIQLVQTYNQLFEENPINASGVDAKAILSARLSKSRRLENLIAQLPGEKKNGLFGNLIALSLGLTPNFKSNFDLAEDAKLQLSKDTYDDDLDNLLAQIGDQYADLFLAAKNLSDAILLSDILRVNTEITKAPLSASMIKRYDEHHQDLTLLKALVRQQLPEKYKEIFFDQSKNGYAGYIDGGASQEEFYKFIKPILEKMDGTEELLVKLNREDLLRKQRTFDNGSIPHQIHLGELHAILRRQEDFYPFLKDNREKIEKILTFRIPYYVGPLARGNSRFAWMTRKSEETITPWNFEEVVDKGASAQSFIERMTNFDKNLPNEKVLPKHSLLYEYFTVYNELTKVKYVTEGMRKPAFLSGEQKKAIVDLLFKTNRKVTVKQLKEDYFKKIECFDSVEISGVEDRFNASLGTYHDLLKIIKDKDFLDNEENEDILEDIVLTLTLFEDREMIEERLKTYAHLFDDKVMKQLKRRRYTGWGRLSRKLINGIRDKQSGKTILDFLKSDGFANRNFMQLIHDDSLTFKEDIQKAQVSGQGDSLHEHIANLAGSPAIKKGILQTVKVVDELVKVMGRHKPENIVIEMARENQTTQKGQKNSRERMKRIEEGIKELGSQILKEHPVENTQLQNEKLYLYYLQNGRDMYVDQELDINRLSDYDVDHIVPQSFLKDDSIDNKVLTRSDKARGKSDNVPSEEVVKKMKNYWRQLLNAKLITQRKFDNLTKAERGGLSELDKAGFIKRQLVETRQITKHVAQILDSRMNTKYDENDKLIREVKVITLKSKLVSDFRKDFQFYKVREINNYHHAHDAYLNAVVGTALIKKYPKLESEFVYGDYKVYDVRKMIAKSEQEIGKATAKYFFYSNIMNFFKTEITLANGEIRKRPLIETNGETGEIVWDKGRDFATVRKVLSMPQVNIVKKTEVQTGGFSKESILPKRNSDKLIARKKDWDPKKYGGFDSPTVAYSVLVVAKVEKGKSKKLKSVKELLGITIMERSSFEKNPIDFLEAKGYKEVKKDLIIKLPKYSLFELENGRKRMLASAGELQKGNELALPSKYVNFLYLASHYEKLKGSPEDNEQKQLFVEQHKHYLDEIIEQISEFSKRVILADANLDKVLSAYNKHRDKPIREQAENIIHLFTLTNLGAPAAFKYFDTTIDRKRYTSTKEVLDATLIHQSITGLYETRIDLSQLGGDGGGGGEAAAKGSSGGLDDEYRLYSPLVKPDQNIQFWLEQFPQAWAETAGMGLAKQVPPQVIQLKASATPVSVRQYPLSKEAQEGIRPHVQRLIQQGILVPVQSPWNTPLLPVRKPGTNDYRPVQDLREVNKRVQDIHPTVPNPYNLLCALPPQRSWYTVLDLKDAFFCLRLHPTSQPLFAFEWRDPGTGRTGQLTWTRLPQGFKNSPTIFNEALHRDLANFRIQHPQVTLLQYVDDLLLAGATKQDCLEGTKALLLELSDLGYRASAKKAQICRREVTYLGYSLRDGQRWLTEARKKTVVQIPAPTTAKQVREFLGKAGFCRLFIPGFATLAAPLYPLTKPKGEFSWAPEHQKAFDAIKKALLSAPALALPDVTKPFTLYVDERKGVARGVLTQTLGPWRRPVAYLSKKLDPVASGWPVCLKAIAAVAILVKDADKLTLGQNITVIAPHALENIVRQPPDRWMTNARMTHYQSLLLTERVTFAPPAALNPATLLPEETDEPVTHDCHQLLIEETGVRKDLTDIPLTGEVLTWFTDGSSYVVEGKRMAGAAVVDGTRTIWASSLPEGTSAQKAELMALTQALRLAEGKSINIYTDSRYAFATAHVHGAIYKQRGWLTSAGREIKNKEEILSLLEALHLPKRLAIIHCPGHQKAKDPISRGNQMADRVAKQAAQGVNLLPAGKRTADGSEFEKRTADGSEFESPKKKAKVE

SEQ ID NO: 241 - protein, 2086 aa, synthetic construct
MPAAKRVKLDGGDKKYSIGLDIGTNSVGWAVITDEYKVPSKKFKVLGNTDRHSIKKNLIGALLFDSGETAEATRLKRTARRRYTRRKNRICYLQEIFSNEMAKVDDSFFHRLEESFLVEEDKKHERHPIFGNIVDEVAYHEKYPTIYHLRKKLVDSTDKADLRLIYLALAHMIKFRGHFLIEGDLNPDNSDVDKLFIQLVQTYNQLFEENPINASGVDAKAILSARLSKSRRLENLIAQLPGEKKNGLFGNLIALSLGLTPNFKSNFDLAEDAKLQLSKDTYDDDLDNLLAQIGDQYADLFLAAKNLSDAILLSDILRVNTEITKAPLSASMIKRYDEHHQDLTLLKALVRQQLPEKYKEIFFDQSKNGYAGYIDGGASQEEFYKFIKPILEKMDGTEELLVKLNREDLLRKQRTFDNGSIPHQIHLGELHAILRRQEDFYPFLKDNREKIEKILTFRIPYYVGPLARGNSRFAWMTRKSEETITPWNFEEVVDKGASAQSFIERMTNFDKNLPNEKVLPKHSLLYEYFTVYNELTKVKYVTEGMRKPAFLSGEQKKAIVDLLFKTNRKVTVKQLKEDYFKKIECFDSVEISGVEDRFNASLGTYHDLLKIIKDKDFLDNEENEDILEDIVLTLTLFEDREMIEERLKTYAHLFDDKVMKQLKRRRYTGWGRLSRKLINGIRDKQSGKTILDFLKSDGFANRNFMQLIHDDSLTFKEDIQKAQVSGQGDSLHEHIANLAGSPAIKKGILQTVKVVDELVKVMGRHKPENIVIEMARENQTTQKGQKNSRERMKRIEEGIKELGSQILKEHPVENTQLQNEKLYLYYLQNGRDMYVDQELDINRLSDYDVDHIVPQSFLKDDSIDNKVLTRSDKARGKSDNVPSEEVVKKMKNYWRQLLNAKLITQRKFDNLTKAERGGLSELDKAGFIKRQLVETRQITKHVAQILDSRMNTKYDENDKLIREVKVITLKSKLVSDFRKDFQFYKVREINNYHHAHDAYLNAVVGTALIKKYPKLESEFVYGDYKVYDVRKMIAKSEQEIGKATAKYFFYSNIMNFFKTEITLANGEIRKRPLIETNGETGEIVWDKGRDFATVRKVLSMPQVNIVKKTEVQTGGFSKESILPKRNSDKLIARKKDWDPKKYGGFDSPTVAYSVLVVAKVEKGKSKKLKSVKELLGITIMERSSFEKNPIDFLEAKGYKEVKKDLIIKLPKYSLFELENGRKRMLASAGELQKGNELALPSKYVNFLYLASHYEKLKGSPEDNEQKQLFVEQHKHYLDEIIEQISEFSKRVILADANLDKVLSAYNKHRDKPIREQAENIIHLFTLTNLGAPAAFKYFDTTIDRKRYTSTKEVLDATLIHQSITGLYETRIDLSQLGGDGGGGSGSSGGGGGLDDEYRLYSPLVKPDQNIQFWLEQFPQAWAETAGMGLAKQVPPQVIQLKASATPVSVRQYPLSKEAQEGIRPHVQRLIQQGILVPVQSPWNTPLLPVRKPGTNDYRPVQDLREVNKRVQDIHPTVPNPYNLLCALPPQRSWYTVLDLKDAFFCLRLHPTSQPLFAFEWRDPGTGRTGQLTWTRLPQGFKNSPTIFNEALHRDLANFRIQHPQVTLLQYVDDLLLAGATKQDCLEGTKALLLELSDLGYRASAKKAQICRREVTYLGYSLRDGQRWLTEARKKTVVQIPAPTTAKQVREFLGKAGFCRLFIPGFATLAAPLYPLTKPKGEFSWAPEHQKAFDAIKKALLSAPALALPDVTKPFTLYVDERKGVARGVLTQTLGPWRRPVAYLSKKLDPVASGWPVCLKAIAAVAILVKDADKLTLGQNITVIAPHALENIVRQPPDRWMTNARMTHYQSLLLTERVTFAPPAALNPATLLPEETDEPVTHDCHQLLIEETGVRKDLTDIPLTGEVLTWFTDGSSYVVEGKRMAGAAVVDGTRTIWASSLPEGTSAQKAELMALTQALRLAEGKSINIYTDSRYAFATAHVHGAIYKQRGWLTSAGREIKNKEEILSLLEALHLPKRLAIIHCPGHQKAKDPISRGNQMADRVAKQAAQGVNLLPAGKRTADGSEFEKRTADGSEFESPKKKAKVE

SEQ ID NO: 242 - protein, 2088 aa, synthetic construct
MPAAKRVKLDGGDKKYSIGLDIGTNSVGWAVITDEYKVPSKKFKVLGNTDRHSIKKNLIGALLFDSGETAEATRLKRTARRRYTRRKNRICYLQEIFSNEMAKVDDSFFHRLEESFLVEEDKKHERHPIFGNIVDEVAYHEKYPTIYHLRKKLVDSTDKADLRLIYLALAHMIKFRGHFLIEGDLNPDNSDVDKLFIQLVQTYNQLFEENPINASGVDAKAILSARLSKSRRLENLIAQLPGEKKNGLFGNLIALSLGLTPNFKSNFDLAEDAKLQLSKDTYDDDLDNLLAQIGDQYADLFLAAKNLSDAILLSDILRVNTEITKAPLSASMIKRYDEHHQDLTLLKALVRQQLPEKYKEIFFDQSKNGYAGYIDGGASQEEFYKFIKPILEKMDGTEELLVKLNREDLLRKQRTFDNGSIPHQIHLGELHAILRRQEDFYPFLKDNREKIEKILTFRIPYYVGPLARGNSRFAWMTRKSEETITPWNFEEVVDKGASAQSFIERMTNFDKNLPNEKVLPKHSLLYEYFTVYNELTKVKYVTEGMRKPAFLSGEQKKAIVDLLFKTNRKVTVKQLKEDYFKKIECFDSVEISGVEDRFNASLGTYHDLLKIIKDKDFLDNEENEDILEDIVLTLTLFEDREMIEERLKTYAHLFDDKVMKQLKRRRYTGWGRLSRKLINGIRDKQSGKTILDFLKSDGFANRNFMQLIHDDSLTFKEDIQKAQVSGQGDSLHEHIANLAGSPAIKKGILQTVKVVDELVKVMGRHKPENIVIEMARENQTTQKGQKNSRERMKRIEEGIKELGSQILKEHPVENTQLQNEKLYLYYLQNGRDMYVDQELDINRLSDYDVDHIVPQSFLKDDSIDNKVLTRSDKARGKSDNVPSEEVVKKMKNYWRQLLNAKLITQRKFDNLTKAERGGLSELDKAGFIKRQLVETRQITKHVAQILDSRMNTKYDENDKLIREVKVITLKSKLVSDFRKDFQFYKVREINNYHHAHDAYLNAVVGTALIKKYPKLESEFVYGDYKVYDVRKMIAKSEQEIGKATAKYFFYSNIMNFFKTEITLANGEIRKRPLIETNGETGEIVWDKGRDFATVRKVLSMPQVNIVKKTEVQTGGFSKESILPKRNSDKLIARKKDWDPKKYGGFDSPTVAYSVLVVAKVEKGKSKKLKSVKELLGITIMERSSFEKNPIDFLEAKGYKEVKKDLIIKLPKYSLFELENGRKRMLASAGELQKGNELALPSKYVNFLYLASHYEKLKGSPEDNEQKQLFVEQHKHYLDEIIEQISEFSKRVILADANLDKVLSAYNKHRDKPIREQAENIIHLFTLTNLGAPAAFKYFDTTIDRKRYTSTKEVLDATLIHQSITGLYETRIDLSQLGGDGGEAAAKGSSPAPGGLDDEYRLYSPLVKPDQNIQFWLEQFPQAWAETAGMGLAKQVPPQVIQLKASATPVSVRQYPLSKEAQEGIRPHVQRLIQQGILVPVQSPWNTPLLPVRKPGTNDYRPVQDLREVNKRVQDIHPTVPNPYNLLCALPPQRSWYTVLDLKDAFFCLRLHPTSQPLFAFEWRDPGTGRTGQLTWTRLPQGFKNSPTIFNEALHRDLANFRIQHPQVTLLQYVDDLLLAGATKQDCLEGTKALLLELSDLGYRASAKKAQICRREVTYLGYSLRDGQRWLTEARKKTVVQIPAPTTAKQVREFLGKAGFCRLFIPGFATLAAPLYPLTKPKGEFSWAPEHQKAFDAIKKALLSAPALALPDVTKPFTLYVDERKGVARGVLTQTLGPWRRPVAYLSKKLDPVASGWPVCLKAIAAVAILVKDADKLTLGQNITVIAPHALENIVRQPPDRWMTNARMTHYQSLLLTERVTFAPPAALNPATLLPEETDEPVTHDCHQLLIEETGVRKDLTDIPLTGEVLTWFTDGSSYVVEGKRMAGAAVVDGTRTIWASSLPEGTSAQKAELMALTQALRLAEGKSINIYTDSRYAFATAHVHGAIYKQRGWLTSAGREIKNKEEILSLLEALHLPKRLAIIHCPGHQKAKDPISRGNQMADRVAKQAAQGVNLLPAGKRTADGSEFEKRTADGSEFESPKKKAKVE

SEQ ID NO: 243 - protein, 2088 aa, synthetic construct
MPAAKRVKLDGGDKKYSIGLDIGTNSVGWAVITDEYKVPSKKFKVLGNTDRHSIKKNLIGALLFDSGETAEATRLKRTARRRYTRRKNRICYLQEIFSNEMAKVDDSFFHRLEESFLVEEDKKHERHPIFGNIVDEVAYHEKYPTIYHLRKKLVDSTDKADLRLIYLALAHMIKFRGHFLIEGDLNPDNSDVDKLFIQLVQTYNQLFEENPINASGVDAKAILSARLSKSRRLENLIAQLPGEKKNGLFGNLIALSLGLTPNFKSNFDLAEDAKLQLSKDTYDDDLDNLLAQIGDQYADLFLAAKNLSDAILLSDILRVNTEITKAPLSASMIKRYDEHHQDLTLLKALVRQQLPEKYKEIFFDQSKNGYAGYIDGGASQEEFYKFIKPILEKMDGTEELLVKLNREDLLRKQRTFDNGSIPHQIHLGELHAILRRQEDFYPFLKDNREKIEKILTFRIPYYVGPLARGNSRFAWMTRKSEETITPWNFEEVVDKGASAQSFIERMTNFDKNLPNEKVLPKHSLLYEYFTVYNELTKVKYVTEGMRKPAFLSGEQKKAIVDLLFKTNRKVTVKQLKEDYFKKIECFDSVEISGVEDRFNASLGTYHDLLKIIKDKDFLDNEENEDILEDIVLTLTLFEDREMIEERLKTYAHLFDDKVMKQLKRRRYTGWGRLSRKLINGIRDKQSGKTILDFLKSDGFANRNFMQLIHDDSLTFKEDIQKAQVSGQGDSLHEHIANLAGSPAIKKGILQTVKVVDELVKVMGRHKPENIVIEMARENQTTQKGQKNSRERMKRIEEGIKELGSQILKEHPVENTQLQNEKLYLYYLQNGRDMYVDQELDINRLSDYDVDHIVPQSFLKDDSIDNKVLTRSDKARGKSDNVPSEEVVKKMKNYWRQLLNAKLITQRKFDNLTKAERGGLSELDKAGFIKRQLVETRQITKHVAQILDSRMNTKYDENDKLIREVKVITLKSKLVSDFRKDFQFYKVREINNYHHAHDAYLNAVVGTALIKKYPKLESEFVYGDYKVYDVRKMIAKSEQEIGKATAKYFFYSNIMNFFKTEITLANGEIRKRPLIETNGETGEIVWDKGRDFATVRKVLSMPQVNIVKKTEVQTGGFSKESILPKRNSDKLIARKKDWDPKKYGGFDSPTVAYSVLVVAKVEKGKSKKLKSVKELLGITIMERSSFEKNPIDFLEAKGYKEVKKDLIIKLPKYSLFELENGRKRMLASAGELQKGNELALPSKYVNFLYLASHYEKLKGSPEDNEQKQLFVEQHKHYLDEIIEQISEFSKRVILADANLDKVLSAYNKHRDKPIREQAENIIHLFTLTNLGAPAAFKYFDTTIDRKRYTSTKEVLDATLIHQSITGLYETRIDLSQLGGDGGGGSPAPEAAAKGGLDDEYRLYSPLVKPDQNIQFWLEQFPQAWAETAGMGLAKQVPPQVIQLKASATPVSVRQYPLSKEAQEGIRPHVQRLIQQGILVPVQSPWNTPLLPVRKPGTNDYRPVQDLREVNKRVQDIHPTVPNPYNLLCALPPQRSWYTVLDLKDAFFCLRLHPTSQPLFAFEWRDPGTGRTGQLTWTRLPQGFKNSPTIFNEALHRDLANFRIQHPQVTLLQYVDDLLLAGATKQDCLEGTKALLLELSDLGYRASAKKAQICRREVTYLGYSLRDGQRWLTEARKKTVVQIPAPTTAKQVREFLGKAGFCRLFIPGFATLAAPLYPLTKPKGEFSWAPEHQKAFDAIKKALLSAPALALPDVTKPFTLYVDERKGVARGVLTQTLGPWRRPVAYLSKKLDPVASGWPVCLKAIAAVAILVKDADKLTLGQNITVIAPHALENIVRQPPDRWMTNARMTHYQSLLLTERVTFAPPAALNPATLLPEETDEPVTHDCHQLLIEETGVRKDLTDIPLTGEVLTWFTDGSSYVVEGKRMAGAAVVDGTRTIWASSLPEGTSAQKAELMALTQALRLAEGKSINIYTDSRYAFATAHVHGAIYKQRGWLTSAGREIKNKEEILSLLEALHLPKRLAIIHCPGHQKAKDPISRGNQMADRVAKQAAQGVNLLPAGKRTADGSEFEKRTADGSEFESPKKKAKVE

SEQ ID NO: 244 - protein, 2084 aa, synthetic construct; identical to SEQ ID NO: 77

SEQ ID NO: 245 - protein, 2081 aa, synthetic construct; identical to SEQ ID NO: 66

SEQ ID NO: 246 - protein, 2080 aa, synthetic construct
MPAAKRVKLDGGDKKYSIGLDIGTNSVGWAVITDEYKVPSKKFKVLGNTDRHSIKKNLIGALLFDSGETAEATRLKRTARRRYTRRKNRICYLQEIFSNEMAKVDDSFFHRLEESFLVEEDKKHERHPIFGNIVDEVAYHEKYPTIYHLRKKLVDSTDKADLRLIYLALAHMIKFRGHFLIEGDLNPDNSDVDKLFIQLVQTYNQLFEENPINASGVDAKAILSARLSKSRRLENLIAQLPGEKKNGLFGNLIALSLGLTPNFKSNFDLAEDAKLQLSKDTYDDDLDNLLAQIGDQYADLFLAAKNLSDAILLSDILRVNTEITKAPLSASMIKRYDEHHQDLTLLKALVRQQLPEKYKEIFFDQSKNGYAGYIDGGASQEEFYKFIKPILEKMDGTEELLVKLNREDLLRKQRTFDNGSIPHQIHLGELHAILRRQEDFYPFLKDNREKIEKILTFRIPYYVGPLARGNSRFAWMTRKSEETITPWNFEEVVDKGASAQSFIERMTNFDKNLPNEKVLPKHSLLYEYFTVYNELTKVKYVTEGMRKPAFLSGEQKKAIVDLLFKTNRKVTVKQLKEDYFKKIECFDSVEISGVEDRFNASLGTYHDLLKIIKDKDFLDNEENEDILEDIVLTLTLFEDREMIEERLKTYAHLFDDKVMKQLKRRRYTGWGRLSRKLINGIRDKQSGKTILDFLKSDGFANRNFMQLIHDDSLTFKEDIQKAQVSGQGDSLHEHIANLAGSPAIKKGILQTVKVVDELVKVMGRHKPENIVIEMARENQTTQKGQKNSRERMKRIEEGIKELGSQILKEHPVENTQLQNEKLYLYYLQNGRDMYVDQELDINRLSDYDVDHIVPQSFLKDDSIDNKVLTRSDKARGKSDNVPSEEVVKKMKNYWRQLLNAKLITQRKFDNLTKAERGGLSELDKAGFIKRQLVETRQITKHVAQILDSRMNTKYDENDKLIREVKVITLKSKLVSDFRKDFQFYKVREINNYHHAHDAYLNAVVGTALIKKYPKLESEFVYGDYKVYDVRKMIAKSEQEIGKATAKYFFYSNIMNFFKTEITLANGEIRKRPLIETNGETGEIVWDKGRDFATVRKVLSMPQVNIVKKTEVQTGGFSKESILPKRNSDKLIARKKDWDPKKYGGFDSPTVAYSVLVVAKVEKGKSKKLKSVKELLGITIMERSSFEKNPIDFLEAKGYKEVKKDLIIKLPKYSLFELENGRKRMLASAGELQKGNELALPSKYVNFLYLASHYEKLKGSPEDNEQKQLFVEQHKHYLDEIIEQISEFSKRVILADANLDKVLSAYNKHRDKPIREQAENIIHLFTLTNLGAPAAFKYFDTTIDRKRYTSTKEVLDATLIHQSITGLYETRIDLSQLGGDGGGGGGGLDDEYRLYSPLVKPDQNIQFWLEQFPQAWAETAGMGLAKQVPPQVIQLKASATPVSVRQYPLSKEAQEGIRPHVQRLIQQGILVPVQSPWNTPLLPVRKPGTNDYRPVQDLREVNKRVQDIHPTVPNPYNLLCALPPQRSWYTVLDLKDAFFCLRLHPTSQPLFAFEWRDPGTGRTGQLTWTRLPQGFKNSPTIFNEALHRDLANFRIQHPQVTLLQYVDDLLLAGATKQDCLEGTKALLLELSDLGYRASAKKAQICRREVTYLGYSLRDGQRWLTEARKKTVVQIPAPTTAKQVREFLGKAGFCRLFIPGFATLAAPLYPLTKPKGEFSWAPEHQKAFDAIKKALLSAPALALPDVTKPFTLYVDERKGVARGVLTQTLGPWRRPVAYLSKKLDPVASGWPVCLKAIAAVAILVKDADKLTLGQNITVIAPHALENIVRQPPDRWMTNARMTHYQSLLLTERVTFAPPAALNPATLLPEETDEPVTHDCHQLLIEETGVRKDLTDIPLTGEVLTWFTDGSSYVVEGKRMAGAAVVDGTRTIWASSLPEGTSAQKAELMALTQALRLAEGKSINIYTDSRYAFATAHVHGAIYKQRGWLTSAGREIKNKEEILSLLEALHLPKRLAIIHCPGHQKAKDPISRGNQMADRVAKQAAQGVNLLPAGKRTADGSEFEKRTADGSEFESPKKKAKVE

SEQ ID NO: 247 - protein, 2088 aa, synthetic construct
MPAAKRVKLDGGDKKYSIGLDIGTNSVGWAVITDEYKVPSKKFKVLGNTDRHSIKKNLIGALLFDSGETAEATRLKRTARRRYTRRKNRICYLQEIFSNEMAKVDDSFFHRLEESFLVEEDKKHERHPIFGNIVDEVAYHEKYPTIYHLRKKLVDSTDKADLRLIYLALAHMIKFRGHFLIEGDLNPDNSDVDKLFIQLVQTYNQLFEENPINASGVDAKAILSARLSKSRRLENLIAQLPGEKKNGLFGNLIALSLGLTPNFKSNFDLAEDAKLQLSKDTYDDDLDNLLAQIGDQYADLFLAAKNLSDAILLSDILRVNTEITKAPLSASMIKRYDEHHQDLTLLKALVRQQLPEKYKEIFFDQSKNGYAGYIDGGASQEEFYKFIKPILEKMDGTEELLVKLNREDLLRKQRTFDNGSIPHQIHLGELHAILRRQEDFYPFLKDNREKIEKILTFRIPYYVGPLARGNSRFAWMTRKSEETITPWNFEEVVDKGASAQSFIERMTNFDKNLPNEKVLPKHSLLYEYFTVYNELTKVKYVTEGMRKPAFLSGEQKKAIVDLLFKTNRKVTVKQLKEDYFKKIECFDSVEISGVEDRFNASLGTYHDLLKIIKDKDFLDNEENEDILEDIVLTLTLFEDREMIEERLKTYAHLFDDKVMKQLKRRRYTGWGRLSRKLINGIRDKQSGKTILDFLKSDGFANRNFMQLIHDDSLTFKEDIQKAQVSGQGDSLHEHIANLAGSPAIKKGILQTVKVVDELVKVMGRHKPENIVIEMARENQTTQKGQKNSRERMKRIEEGIKELGSQILKEHPVENTQLQNEKLYLYYLQNGRDMYVDQELDINRLSDYDVDHIVPQSFLKDDSIDNKVLTRSDKARGKSDNVPSEEVVKKMKNYWRQLLNAKLITQRKFDNLTKAERGGLSELDKAGFIKRQLVETRQITKHVAQILDSRMNTKYDENDKLIREVKVITLKSKLVSDFRKDFQFYKVREINNYHHAHDAYLNAVVGTALIKKYPKLESEFVYGDYKVYDVRKMIAKSEQEIGKATAKYFFYSNIMNFFKTEITLANGEIRKRPLIETNGETGEIVWDKGRDFATVRKVLSMPQVNIVKKTEVQTGGFSKESILPKRNSDKLIARKKDWDPKKYGGFDSPTVAYSVLVVAKVEKGKSKKLKSVKELLGITIMERSSFEKNPIDFLEAKGYKEVKKDLIIKLPKYSLFELENGRKRMLASAGELQKGNELALPSKYVNFLYLASHYEKLKGSPEDNEQKQLFVEQHKHYLDEIIEQISEFSKRVILADANLDKVLSAYNKHRDKPIREQAENIIHLFTLTNLGAPAAFKYFDTTIDRKRYTSTKEVLDATLIHQSITGLYETRIDLSQLGGDGGEAAAKPAPGGSGGLDDEYRLYSPLVKPDQNIQFWLEQFPQAWAETAGMGLAKQVPPQVIQLKASATPVSVRQYPLSKEAQEGIRPHVQRLIQQGILVPVQSPWNTPLLPVRKPGTNDYRPVQDLREVNKRVQDIHPTVPNPYNLLCALPPQRSWYTVLDLKDAFFCLRLHPTSQPLFAFEWRDPGTGRTGQLTWTRLPQGFKNSPTIFNEALHRDLANFRIQHPQVTLLQYVDDLLLAGATKQDCLEGTKALLLELSDLGYRASAKKAQICRREVTYLGYSLRDGQRWLTEARKKTVVQIPAPTTAKQVREFLGKAGFCRLFIPGFATLAAPLYPLTKPKGEFSWAPEHQKAFDAIKKALLSAPALALPDVTKPFTLYVDERKGVARGVLTQTLGPWRRPVAYLSKKLDPVASGWPVCLKAIAAVAILVKDADKLTLGQNITVIAPHALENIVRQPPDRWMTNARMTHYQSLLLTERVTFAPPAALNPATLLPEETDEPVTHDCHQLLIEETGVRKDLTDIPLTGEVLTWFTDGSSYVVEGKRMAGAAVVDGTRTIWASSLPEGTSAQKAELMALTQALRLAEGKSINIYTDSRYAFATAHVHGAIYKQRGWLTSAGREIKNKEEILSLLEALHLPKRLAIIHCPGHQKAKDPISRGNQMADRVAKQAAQGVNLLPAGKRTADGSEFEKRTADGSEFESPKKKAKVE

SEQ ID NO: 248 - protein, 2088 aa, synthetic construct; identical to SEQ ID NO: 94

SEQ ID NO: 249 - protein, 2086 aa, synthetic construct; identical to SEQ ID NO: 60

SEQ ID NO: 250 - protein, 2088 aa, synthetic construct
MPAAKRVKLDGGDKKYSIGLDIGTNSVGWAVITDEYKVPSKKFKVLGNTDRHSIKKNLIGALLFDSGETAEATRLKRTARRRYTRRKNRICYLQEIFSNEMAKVDDSFFHRLEESFLVEEDKKHERHPIFGNIVDEVAYHEKYPTIYHLRKKLVDSTDKADLRLIYLALAHMIKFRGHFLIEGDLNPDNSDVDKLFIQLVQTYNQLFEENPINASGVDAKAILSARLSKSRRLENLIAQLPGEKKNGLFGNLIALSLGLTPNFKSNFDLAEDAKLQLSKDTYDDDLDNLLAQIGDQYADLFLAAKNLSDAILLSDILRVNTEITKAPLSASMIKRYDEHHQDLTLLKALVRQQLPEKYKEIFFDQSKNGYAGYIDGGASQEEFYKFIKPILEKMDGTEELLVKLNREDLLRKQRTFDNGSIPHQIHLGELHAILRRQEDFYPFLKDNREKIEKILTFRIPYYVGPLARGNSRFAWMTRKSEETITPWNFEEVVDKGASAQSFIERMTNFDKNLPNEKVLPKHSLLYEYFTVYNELTKVKYVTEGMRKPAFLSGEQKKAIVDLLFKTNRKVTVKQLKEDYFKKIECFDSVEISGVEDRFNASLGTYHDLLKIIKDKDFLDNEENEDILEDIVLTLTLFEDREMIEERLKTYAHLFDDKVMKQLKRRRYTGWGRLSRKLINGIRDKQSGKTILDFLKSDGFANRNFMQLIHDDSLTFKEDIQKAQVSGQGDSLHEHIANLAGSPAIKKGILQTVKVVDELVKVMGRHKPENIVIEMARENQTTQKGQKNSRERMKRIEEGIKELGSQILKEHPVENTQLQNEKLYLYYLQNGRDMYVDQELDINRLSDYDVDHIVPQSFLKDDSIDNKVLTRSDKARGKSDNVPSEEVVKKMKNYWRQLLNAKLITQRKFDNLTKAERGGLSELDKAGFIKRQLVETRQITKHVAQILDSRMNTKYDENDKLIREVKVITLKSKLVSDFRKDFQFYKVREINNYHHAHDAYLNAVVGTALIKKYPKLESEFVYGDYKVYDVRKMIAKSEQEIGKATAKYFFYSNIMNFFKTEITLANGEIRKRPLIETNGETGEIVWDKGRDFATVRKVLSMPQVNIVKKTEVQTGGFSKESILPKRNSDKLIARKKDWDPKKYGGFDSPTVAYSVLVVAKVEKGKSKKLKSVKELLGITIMERSSFEKNPIDFLEAKGYKEVKKDLIIKLPKYSLFELENGRKRMLASAGELQKGNELALPSKYVNFLYLASHYEKLKGSPEDNEQKQLFVEQHKHYLDEIIEQISEFSKRVILADANLDKVLSAYNKHRDKPIREQAENIIHLFTLTNLGAPAAFKYFDTTIDRKRYTSTKEVLDATLIHQSITGLYETRIDLSQLGGDGGGGSEAAAKGGGGGLDDEYRLYSPLVKPDQNIQFWLEQFPQAWAETAGMGLAKQVPPQVIQLKASATPVSVRQYPLSKEAQEGIRPHVQRLIQQGILVPVQSPWNTPLLPVRKPGTNDYRPVQDLREVNKRVQDIHPTVPNPYNLLCALPPQRSWYTVLDLKDAFFCLRLHPTSQPLFAFEWRDPGTGRTGQLTWTRLPQGFKNSPTIFNEALHRDLANFRIQHPQVTLLQYVDDLLLAGATKQDCLEGTKALLLELSDLGYRASAKKAQICRREVTYLGYSLRDGQRWLTEARKKTVVQIPAPTTAKQVREFLGKAGFCRLFIPGFATLAAPLYPLTKPKGEFSWAPEHQKAFDAIKKALLSAPALALPDVTKPFTLYVDERKGVARGVLTQTLGPWRRPVAYLSKKLDPVASGWPVCLKAIAAVAILVKDADKLTLGQNITVIAPHALENIVRQPPDRWMTNARMTHYQSLLLTERVTFAPPAALNPATLLPEETDEPVTHDCHQLLIEETGVRKDLTDIPLTGEVLTWFTDGSSYVVEGKRMAGAAVVDGTRTIWASSLPEGTSAQKAELMALTQALRLAEGKSINIYTDSRYAFATAHVHGAIYKQRGWLTSAGREIKNKEEILSLLEALHLPKRLAIIHCPGHQKAKDPISRGNQMADRVAKQAAQGVNLLPAGKRTADGSEFEKRTADGSEFESPKKKAKVE

SEQ ID NO: 251 - protein, 2086 aa, synthetic construct; identical to SEQ ID NO: 82

SEQ ID NO: 252 - protein, 2083 aa, synthetic construct
MPAAKRVKLDGGDKKYSIGLDIGTNSVGWAVITDEYKVPSKKFKVLGNTDRHSIKKNLIGALLFDSGETAEATRLKRTARRRYTRRKNRICYLQEIFSNEMAKVDDSFFHRLEESFLVEEDKKHERHPIFGNIVDEVAYHEKYPTIYHLRKKLVDSTDKADLRLIYLALAHMIKFRGHFLIEGDLNPDNSDVDKLFIQLVQTYNQLFEENPINASGVDAKAILSARLSKSRRLENLIAQLPGEKKNGLFGNLIALSLGLTPNFKSNFDLAEDAKLQLSKDTYDDDLDNLLAQIGDQYADLFLAAKNLSDAILLSDILRVNTEITKAPLSASMIKRYDEHHQDLTLLKALVRQQLPEKYKEIFFDQSKNGYAGYIDGGASQEEFYKFIKPILEKMDGTEELLVKLNREDLLRKQRTFDNGSIPHQIHLGELHAILRRQEDFYPFLKDNREKIEKILTFRIPYYVGPLARGNSRFAWMTRKSEETITPWNFEEVVDKGASAQSFIERMTNFDKNLPNEKVLPKHSLLYEYFTVYNELTKVKYVTEGMRKPAFLSGEQKKAIVDLLFKTNRKVTVKQLKEDYFKKIECFDSVEISGVEDRFNASLGTYHDLLKIIKDKDFLDNEENEDILEDIVLTLTLFEDREMIEERLKTYAHLFDDKVMKQLKRRRYTGWGRLSRKLINGIRDKQSGKTILDFLKSDGFANRNFMQLIHDDSLTFKEDIQKAQVSGQGDSLHEHIANLAGSPAIKKGILQTVKVVDELVKVMGRHKPENIVIEMARENQTTQKGQKNSRERMKRIEEGIKELGSQILKEHPVENTQLQNEKLYLYYLQNGRDMYVDQELDINRLSDYDVDHIVPQSFLKDDSIDNKVLTRSDKARGKSDNVPSEEVVKKMKNYWRQLLNAKLITQRKFDNLTKAERGGLSELDKAGFIKRQLVETRQITKHVAQILDSRMNTKYDENDKLIREVKVITLKSKLVSDFRKDFQFYKVREINNYHHAHDAYLNAVVGTALIKKYPKLESEFVYGDYKVYDVRKMIAKSEQEIGKATAKYFFYSNIMNFFKTEITLANGEIRKRPLIETNGETGEIVWDKGRDFATVRKVLSMPQVNIVKKTEVQTGGFSKESILPKRNSDKLIARKKDWDPKKYGGFDSPTVAYSVLVVAKVEKGKSKKLKSVKELLGITIMERSSFEKNPIDFLEAKGYKEVKKDLIIKLPKYSLFELENGRKRMLASAGELQKGNELALPSKYVNFLYLASHYEKLKGSPEDNEQKQLFVEQHKHYLDEIIEQISEFSKRVILADANLDKVLSAYNKHRDKPIREQAENIIHLFTLTNLGAPAAFKYFDTTIDRKRYTSTKEVLDATLIHQSITGLYETRIDLSQLGGDGGPAPGGSGGLDDEYRLYSPLVKPDQNIQFWLEQFPQAWAETAGMGLAKQVPPQVIQLKASATPVSVRQYPLSKEAQEGIRPHVQRLIQQGILVPVQSPWNTPLLPVRKPGTNDYRPVQDLREVNKRVQDIHPTVPNPYNLLCALPPQRSWYTVLDLKDAFFCLRLHPTSQPLFAFEWRDPGTGRTGQLTWTRLPQGFKNSPTIFNEALHRDLANFRIQHPQVTLLQYVDDLLLAGATKQDCLEGTKALLLELSDLGYRASAKKAQICRREVTYLGYSLRDGQRWLTEARKKTVVQIPAPTTAKQVREFLGKAGFCRLFIPGFATLAAPLYPLTKPKGEFSWAPEHQKAFDAIKKALLSAPALALPDVTKPFTLYVDERKGVARGVLTQTLGPWRRPVAYLSKKLDPVASGWPVCLKAIAAVAILVKDADKLTLGQNITVIAPHALENIVRQPPDRWMTNARMTHYQSLLLTERVTFAPPAALNPATLLPEETDEPVTHDCHQLLIEETGVRKDLTDIPLTGEVLTWFTDGSSYVVEGKRMAGAAVVDGTRTIWASSLPEGTSAQKAELMALTQALRLAEGKSINIYTDSRYAFATAHVHGAIYKQRGWLTSAGREIKNKEEILSLLEALHLPKRLAIIHCPGHQKAKDPISRGNQMADRVAKQAAQGVNLLPAGKRTADGSEFEKRTADGSEFESPKKKAKVE

SEQ ID NO: 253 - protein, 2083 aa, synthetic construct; identical to SEQ ID NO: 59

SEQ ID NO: 254 - protein, 2088 aa, synthetic construct
MPAAKRVKLDGGDKKYSIGLDIGTNSVGWAVITDEYKVPSKKFKVLGNTDRHSIKKNLIGALLFDSGETAEATRLKRTARRRYTRRKNRICYLQEIFSNEMAKVDDSFFHRLEESFLVEEDKKHERHPIFGNIVDEVAYHEKYPTIYHLRKKLVDSTDKADLRLIYLALAHMIKFRGHFLIEGDLNPDNSDVDKLFIQLVQTYNQLFEENPINASGVDAKAILSARLSKSRRLENLIAQLPGEKKNGLFGNLIALSLGLTPNFKSNFDLAEDAKLQLSKDTYDDDLDNLLAQIGDQYADLFLAAKNLSDAILLSDILRVNTEITKAPLSASMIKRYDEHHQDLTLLKALVRQQLPEKYKEIFFDQSKNGYAGYIDGGASQEEFYKFIKPILEKMDGTEELLVKLNREDLLRKQRTFDNGSIPHQIHLGELHAILRRQEDFYPFLKDNREKIEKILTFRIPYYVGPLARGNSRFAWMTRKSEETITPWNFEEVVDKGASAQSFIERMTNFDKNLPNEKVLPKHSLLYEYFTVYNELTKVKYVTEGMRKPAFLSGEQKKAIVDLLFKTNRKVTVKQLKEDYFKKIECFDSVEISGVEDRFNASLGTYHDLLKIIKDKDFLDNEENEDILEDIVLTLTLFEDREMIEERLKTYAHLFDDKVMKQLKRRRYTGWGRLSRKLINGIRDKQSGKTILDFLKSDGFANRNFMQLIHDDSLTFKEDIQKAQVSGQGDSLHEHIANLAGSPAIKKGILQTVKVVDELVKVMGRHKPENIVIEMARENQTTQKGQKNSRERMKRIEEGIKELGSQILKEHPVENTQLQNEKLYLYYLQNGRDMYVDQELDINRLSDYDVDHIVPQSFLKDDSIDNKVLTRSDKARGKSDNVPSEEVVKKMKNYWRQLLNAKLITQRKFDNLTKAERGGLSELDKAGFIKRQLVETRQITKHVAQILDSRMNTKYDENDKLIREVKVITLKSKLVSDFRKDFQFYKVREINNYHHAHDAYLNAVVGTALIKKYPKLESEFVYGDYKVYDVRKMIAKSEQEIGKATAKYFFYSNIMNFFKTEITLANGEIRKRPLIETNGETGEIVWDKGRDFATVRKVLSMPQVNIVKKTEVQTGGFSKESILPKRNSDKLIARKKDWDPKKYGGFDSPTVAYSVLVVAKVEKGKSKKLKSVKELLGITIMERSSFEKNPIDFLEAKGYKEVKKDLIIKLPKYSLFELENGRKRMLASAGELQKGNELALPSKYVNFLYLASHYEKLKGSPEDNEQKQLFVEQHKHYLDEIIEQISEFSKRVILADANLDKVLSAYNKHRDKPIREQAENIIHLFTLTNLGAPAAFKYFDTTIDRKRYTSTKEVLDATLIHQSITGLYETRIDLSQLGGDGGGSSGGSEAAAKGGLDDEYRLYSPLVKPDQNIQFWLEQFPQAWAETAGMGLAKQVPPQVIQLKASATPVSVRQYPLSKEAQEGIRPHVQRLIQQGILVPVQSPWNTPLLPVRKPGTNDYRPVQDLREVNKRVQDIHPTVPNPYNLLCALPPQRSWYTVLDLKDAFFCLRLHPTSQPLFAFEWRDPGTGRTGQLTWTRLPQGFKNSPTIFNEALHRDLANFRIQHPQVTLLQYVDDLLLAGATKQDCLEGTKALLLELSDLGYRASAKKAQICRREVTYLGYSLRDGQRWLTEARKKTVVQIPAPTTAKQVREFLGKAGFCRLFIPGFATLAAPLYPLTKPKGEFSWAPEHQKAFDAIKKALLSAPALALPDVTKPFTLYVDERKGVARGVLTQTLGPWRRPVAYLSKKLDPVASGWPVCLKAIAAVAILVKDADKLTLGQNITVIAPHALENIVRQPPDRWMTNARMTHYQSLLLTERVTFAPPAALNPATLLPEETDEPVTHDCHQLLIEETGVRKDLTDIPLTGEVLTWFTDGSSYVVEGKRMAGAAVVDGTRTIWASSLPEGTSAQKAELMALTQALRLAEGKSINIYTDSRYAFATAHVHGAIYKQRGWLTSAGREIKNKEEILSLLEALHLPKRLAIIHCPGHQKAKDPISRGNQMADRVAKQAAQGVNLLPAGKRTADGSEFEKRTADGSEFESPKKKAKVE

SEQ ID NO: 255 - protein, 2088 aa, synthetic construct; identical to SEQ ID NO: 86

SEQ ID NO: 256 - protein, 2107 aa, synthetic construct
MPAAKRVKLDGGDKKYSIGLDIGTNSVGWAVITDEYKVPSKKFKVLGNTDRHSIKKNLIGALLFDSGETAEATRLKRTARRRYTRRKNRICYLQEIFSNEMAKVDDSFFHRLEESFLVEEDKKHERHPIFGNIVDEVAYHEKYPTIYHLRKKLVDSTDKADLRLIYLALAHMIKFRGHFLIEGDLNPDNSDVDKLFIQLVQTYNQLFEENPINASGVDAKAILSARLSKSRRLENLIAQLPGEKKNGLFGNLIALSLGLTPNFKSNFDLAEDAKLQLSKDTYDDDLDNLLAQIGDQYADLFLAAKNLSDAILLSDILRVNTEITKAPLSASMIKRYDEHHQDLTLLKALVRQQLPEKYKEIFFDQSKNGYAGYIDGGASQEEFYKFIKPILEKMDGTEELLVKLNREDLLRKQRTFDNGSIPHQIHLGELHAILRRQEDFYPFLKDNREKIEKILTFRIPYYVGPLARGNSRFAWMTRKSEETITPWNFEEVVDKGASAQSFIERMTNFDKNLPNEKVLPKHSLLYEYFTVYNELTKVKYVTEGMRKPAFLSGEQKKAIVDLLFKTNRKVTVKQLKEDYFKKIECFDSVEISGVEDRFNASLGTYHDLLKIIKDKDFLDNEENEDILEDIVLTLTLFEDREMIEERLKTYAHLFDDKVMKQLKRRRYTGWGRLSRKLINGIRDKQSGKTILDFLKSDGFANRNFMQLIHDDSLTFKEDIQKAQVSGQGDSLHEHIANLAGSPAIKKGILQTVKVVDELVKVMGRHKPENIVIEMARENQTTQKGQKNSRERMKRIEEGIKELGSQILKEHPVENTQLQNEKLYLYYLQNGRDMYVDQELDINRLSDYDVDHIVPQSFLKDDSIDNKVLTRSDKARGKSDNVPSEEVVKKMKNYWRQLLNAKLITQRKFDNLTKAERGGLSELDKAGFIKRQLVETRQITKHVAQILDSRMNTKYDENDKLIREVKVITLKSKLVSDFRKDFQFYKVREINNYHHAHDAYLNAVVGTALIKKYPKLESEFVYGDYKVYDVRKMIAKSEQEIGKATAKYFFYSNIMNFFKTEITLANGEIRKRPLIETNGETGEIVWDKGRDFATVRKVLSMPQVNIVKKTEVQTGGFSKESILPKRNSDKLIARKKDWDPKKYGGFDSPTVAYSVLVVAKVEKGKSKKLKSVKELLGITIMERSSFEKNPIDFLEAKGYKEVKKDLIIKLPKYSLFELENGRKRMLASAGELQKGNELALPSKYVNFLYLASHYEKLKGSPEDNEQKQLFVEQHKHYLDEIIEQISEFSKRVILADANLDKVLSAYNKHRDKPIREQAENIIHLFTLTNLGAPAAFKYFDTTIDRKRYTSTKEVLDATLIHQSITGLYETRIDLSQLGGDGGGGGGSGGGGSGGGGSGGGGSGGGGSGGGGSGGLDDEYRLYSPLVKPDQNIQFWLEQFPQAWAETAGMGLAKQVPPQVIQLKASATPVSVRQYPLSKEAQEGIRPHVQRLIQQGILVPVQSPWNTPLLPVRKPGTNDYRPVQDLREVNKRVQDIHPTVPNPYNLLCALPPQRSWYTVLDLKDAFFCLRLHPTSQPLFAFEWRDPGTGRTGQLTWTRLPQGFKNSPTIFNEALHRDLANFRIQHPQVTLLQYVDDLLLAGATKQDCLEGTKALLLELSDLGYRASAKKAQICRREVTYLGYSLRDGQRWLTEARKKTVVQIPAPTTAKQVREFLGKAGFCRLFIPGFATLAAPLYPLTKPKGEFSWAPEHQKAFDAIKKALLSAPALALPDVTKPFTLYVDERKGVARGVLTQTLGPWRRPVAYLSKKLDPVASGWPVCLKAIAAVAILVKDADKLTLGQNITVIAPHALENIVRQPPDRWMTNARMTHYQSLLLTERVTFAPPAALNPATLLPEETDEPVTHDCHQLLIEETGVRKDLTDIPLTGEVLTWFTDGSSYVVEGKRMAGAAVVDGTRTIWASSLPEGTSAQKAELMALTQALRLAEGKSINIYTDSRYAFATAHVHGAIYKQRGWLTSAGREIKNKEEILSLLEALHLPKRLAIIHCPGHQKAKDPISRGNQMADRVAKQAAQGVNLLPAGKRTADGSEFEKRTADGSEFESPKKKAKVE

SEQ ID NO: 257 - protein, 2086 aa, synthetic construct; identical to SEQ ID NO: 64

SEQ ID NO: 258 - protein, 2088 aa, synthetic construct
MPAAKRVKLDGGDKKYSIGLDIGTNSVGWAVITDEYKVPSKKFKVLGNTDRHSIKKNLIGALLFDSGETAEATRLKRTARRRYTRRKNRICYLQEIFSNEMAKVDDSFFHRLEESFLVEEDKKHERHPIFGNIVDEVAYHEKYPTIYHLRKKLVDSTDKADLRLIYLALAHMIKFRGHFLIEGDLNPDNSDVDKLFIQLVQTYNQLFEENPINASGVDAKAILSARLSKSRRLENLIAQLPGEKKNGLFGNLIALSLGLTPNFKSNFDLAEDAKLQLSKDTYDDDLDNLLAQIGDQYADLFLAAKNLSDAILLSDILRVNTEITKAPLSASMIKRYDEHHQDLTLLKALVRQQLPEKYKEIFFDQSKNGYAGYIDGGASQEEFYKFIKPILEKMDGTEELLVKLNREDLLRKQRTFDNGSIPHQIHLGELHAILRRQEDFYPFLKDNREKIEKILTFRIPYYVGPLARGNSRFAWMTRKSEETITPWNFEEVVDKGASAQSFIERMTNFDKNLPNEKVLPKHSLLYEYFTVYNELTKVKYVTEGMRKPAFLSGEQKKAIVDLLFKTNRKVTVKQLKEDYFKKIECFDSVEISGVEDRFNASLGTYHDLLKIIKDKDFLDNEENEDILEDIVLTLTLFEDREMIEERLKTYAHLFDDKVMKQLKRRRYTGWGRLSRKLINGIRDKQSGKTILDFLKSDGFANRNFMQLIHDDSLTFKEDIQKAQVSGQGDSLHEHIANLAGSPAIKKGILQTVKVVDELVKVMGRHKPENIVIEMARENQTTQKGQKNSRERMKRIEEGIKELGSQILKEHPVENTQLQNEKLYLYYLQNGRDMYVDQELDINRLSDYDVDHIVPQSFLKDDSIDNKVLTRSDKARGKSDNVPSEEVVKKMKNYWRQLLNAKLITQRKFDNLTKAERGGLSELDKAGFIKRQLVETRQITKHVAQILDSRMNTKYDENDKLIREVKVITLKSKLVSDFRKDFQFYKVREINNYHHAHDAYLNAVVGTALIKKYPKLESEFVYGDYKVYDVRKMIAKSEQEIGKATAKYFFYSNIMNFFKTEITLANGEIRKRPLIETNGETGEIVWDKGRDFATVRKVLSMPQVNIVKKTEVQTGGFSKESILPKRNSDKLIARKKDWDPKKYGGFDSPTVAYSVLVVAKVEKGKSKKLKSVKELLGITIMERSSFEKNPIDFLEAKGYKEVKKDLIIKLPKYSLFELENGRKRMLASAGELQKGNELALPSKYVNFLYLASHYEKLKGSPEDNEQKQLFVEQHKHYLDEIIEQISEFSKRVILADANLDKVLSAYNKHRDKPIREQAENIIHLFTLTNLGAPAAFKYFDTTIDRKRYTSTKEVLDATLIHQSITGLYETRIDLSQLGGDGGGSSEAAAKGGSGGLDDEYRLYSPLVKPDQNIQFWLEQFPQAWAETAGMGLAKQVPPQVIQLKASATPVSVRQYPLSKEAQEGIRPHVQRLIQQGILVPVQSPWNTPLLPVRKPGTNDYRPVQDLREVNKRVQDIHPTVPNPYNLLCALPPQRSWYTVLDLKDAFFCLRLHPTSQPLFAFEWRDPGTGRTGQLTWTRLPQGFKNSPTIFNEALHRDLANFRIQHPQVTLLQYVDDLLLAGATKQDCLEGTKALLLELSDLGYRASAKKAQICRREVTYLGYSLRDGQRWLTEARKKTVVQIPAPTTAKQVREFLGKAGFCRLFIPGFATLAAPLYPLTKPKGEFSWAPEHQKAFDAIKKALLSAPALALPDVTKPFTLYVDERKGVARGVLTQTLGPWRRPVAYLSKKLDPVASGWPVCLKAIAAVAILVKDADKLTLGQNITVIAPHALENIVRQPPDRWMTNARMTHYQSLLLTERVTFAPPAALNPATLLPEETDEPVTHDCHQLLIEETGVRKDLTDIPLTGEVLTWFTDGSSYVVEGKRMAGAAVVDGTRTIWASSLPEGTSAQKAELMALTQALRLAEGKSINIYTDSRYAFATAHVHGAIYKQRGWLTSAGREIKNKEEILSLLEALHLPKRLAIIHCPGHQKAKDPISRGNQMADRVAKQAAQGVNLLPAGKRTADGSEFEKRTADGSEFESPKKKAKVE

SEQ ID NO: 259 - protein, 2083 aa, synthetic construct
MPAAKRVKLDGGDKKYSIGLDIGTNSVGWAVITDEYKVPSKKFKVLGNTDRHSIKKNLIGALLFDSGETAEATRLKRTARRRYTRRKNRICYLQEIFSNEMAKVDDSFFHRLEESFLVEEDKKHERHPIFGNIVDEVAYHEKYPTIYHLRKKLVDSTDKADLRLIYLALAHMIKFRGHFLIEGDLNPDNSDVDKLFIQLVQTYNQLFEENPINASGVDAKAILSARLSKSRRLENLIAQLPGEKKNGLFGNLIALSLGLTPNFKSNFDLAEDAKLQLSKDTYDDDLDNLLAQIGDQYADLFLAAKNLSDAILLSDILRVNTEITKAPLSASMIKRYDEHHQDLTLLKALVRQQLPEKYKEIFFDQSKNGYAGYIDGGASQEEFYKFIKPILEKMDGTEELLVKLNREDLLRKQRTFDNGSIPHQIHLGELHAILRRQEDFYPFLKDNREKIEKILTFRIPYYVGPLARGNSRFAWMTRKSEETITPWNFEEVVDKGASAQSFIERMTNFDKNLPNEKVLPKHSLLYEYFTVYNELTKVKYVTEGMRKPAFLSGEQKKAIVDLLFKTNRKVTVKQLKEDYFKKIECFDSVEISGVEDRFNASLGTYHDLLKIIKDKDFLDNEENEDILEDIVLTLTLFEDREMIEERLKTYAHLFDDKVMKQLKRRRYTGWGRLSRKLINGIRDKQSGKTILDFLKSDGFANRNFMQLIHDDSLTFKEDIQKAQVSGQGDSLHEHIANLAGSPAIKKGILQTVKVVDELVKVMGRHKPENIVIEMARENQTTQKGQKNSRERMKRIEEGIKELGSQILKEHPVENTQLQNEKLYLYYLQNGRDMYVDQELDINRLSDYDVDHIVPQSFLKDDSIDNKVLTRSDKARGKSDNVPSEEVVKKMKNYWRQLLNAKLITQRKFDNLTKAERGGLSELDKAGFIKRQLVETRQITKHVAQILDSRMNTKYDENDKLIREVKVITLKSKLVSDFRKDFQFYKVREINNYHHAHDAYLNAVVGTALIKKYPKLESEFVYGDYKVYDVRKMIAKSEQEIGKATAKYFFYSNIMNFFKTEITLANGEIRKRPLIETNGETGEIVWDKGRDFATVRKVLSMPQVNIVKKTEVQTGGFSKESILPKRNSDKLIARKKDWDPKKYGGFDSPTVAYSVLVVAKVEKGKSKKLKSVKELLGITIMERSSFEKNPIDFLEAKGYKEVKKDLIIKLPKYSLFELENGRKRMLASAGELQKGNELALPSKYVNFLYLASHYEKLKGSPEDNEQKQLFVEQHKHYLDEIIEQISEFSKRVILADANLDKVLSAYNKHRDKPIREQAENIIHLFTLTNLGAPAAFKYFDTTIDRKRYTSTKEVLDATLIHQSITGLYETRIDLSQLGGDGGGGSGGSGGLDDEYRLYSPLVKPDQNIQFWLEQFPQAWAETAGMGLAKQVPPQVIQLKASATPVSVRQYPLSKEAQEGIRPHVQRLIQQGILVPVQSPWNTPLLPVRKPGTNDYRPVQDLREVNKRVQDIHPTVPNPYNLLCALPPQRSWYTVLDLKDAFFCLRLHPTSQPLFAFEWRDPGTGRTGQLTWTRLPQGFKNSPTIFNEALHRDLANFRIQHPQVTLLQYVDDLLLAGATKQDCLEGTKALLLELSDLGYRASAKKAQICRREVTYLGYSLRDGQRWLTEARKKTVVQIPAPTTAKQVREFLGKAGFCRLFIPGFATLAAPLYPLTKPKGEFSWAPEHQKAFDAIKKALLSAPALALPDVTKPFTLYVDERKGVARGVLTQTLGPWRRPVAYLSKKLDPVASGWPVCLKAIAAVAILVKDADKLTLGQNITVIAPHALENIVRQPPDRWMTNARMTHYQSLLLTERVTFAPPAALNPATLLPEETDEPVTHDCHQLLIEETGVRKDLTDIPLTGEVLTWFTDGSSYVVEGKRMAGAAVVDGTRTIWASSLPEGTSAQKAELMALTQALRLAEGKSINIYTDSRYAFATAHVHGAIYKQRGWLTSAGREIKNKEEILSLLEALHLPKRLAIIHCPGHQKAKDPISRGNQMADRVAKQAAQGVNLLPAGKRTADGSEFEKRTADGSEFESPKKKAKVE

SEQ ID NO: 260 - protein, 2088 aa, synthetic construct; identical to SEQ ID NO: 93

SEQ ID NO: 261 - protein, 2083 aa, synthetic construct; identical to SEQ ID NO: 81

SEQ ID NO: 262 - protein, 2080 aa, synthetic construct
MPAAKRVKLDGGDKKYSIGLDIGTNSVGWAVITDEYKVPSKKFKVLGNTDRHSIKKNLIGALLFDSGETAEATRLKRTARRRYTRRKNRICYLQEIFSNEMAKVDDSFFHRLEESFLVEEDKKHERHPIFGNIVDEVAYHEKYPTIYHLRKKLVDSTDKADLRLIYLALAHMIKFRGHFLIEGDLNPDNSDVDKLFIQLVQTYNQLFEENPINASGVDAKAILSARLSKSRRLENLIAQLPGEKKNGLFGNLIALSLGLTPNFKSNFDLAEDAKLQLSKDTYDDDLDNLLAQIGDQYADLFLAAKNLSDAILLSDILRVNTEITKAPLSASMIKRYDEHHQDLTLLKALVRQQLPEKYKEIFFDQSKNGYAGYIDGGASQEEFYKFIKPILEKMDGTEELLVKLNREDLLRKQRTFDNGSIPHQIHLGELHAILRRQEDFYPFLKDNREKIEKILTFRIPYYVGPLARGNSRFAWMTRKSEETITPWNFEEVVDKGASAQSFIERMTNFDKNLPNEKVLPKHSLLYEYFTVYNELTKVKYVTEGMRKPAFLSGEQKKAIVDLLFKTNRKVTVKQLKEDYFKKIECFDSVEISGVEDRFNASLGTYHDLLKIIKDKDFLDNEENEDILEDIVLTLTLFEDREMIEERLKTYAHLFDDKVMKQLKRRRYTGWGRLSRKLINGIRDKQSGKTILDFLKSDGFANRNFMQLIHDDSLTFKEDIQKAQVSGQGDSLHEHIANLAGSPAIKKGILQTVKVVDELVKVMGRHKPENIVIEMARENQTTQKGQKNSRERMKRIEEGIKELGSQILKEHPVENTQLQNEKLYLYYLQNGRDMYVDQELDINRLSDYDVDHIVPQSFLKDDSIDNKVLTRSDKARGKSDNVPSEEVVKKMKNYWRQLLNAKLITQRKFDNLTKAERGGLSELDKAGFIKRQLVETRQITKHVAQILDSRMNTKYDENDKLIREVKVITLKSKLVSDFRKDFQFYKVREINNYHHAHDAYLNAVVGTALIKKYPKLESEFVYGDYKVYDVRKMIAKSEQEIGKATAKYFFYSNIMNFFKTEITLANGEIRKRPLIETNGETGEIVWDKGRDFATVRKVLSMPQVNIVKKTEVQTGGFSKESILPKRNSDKLIARKKDWDPKKYGGFDSPTVAYSVLVVAKVEKGKSKKLKSVKELLGITIMERSSFEKNPIDFLEAKGYKEVKKDLIIKLPKYSLFELENGRKRMLASAGELQKGNELALPSKYVNFLYLASHYEKLKGSPEDNEQKQLFVEQHKHYLDEIIEQISEFSKRVILADANLDKVLSAYNKHRDKPIREQAENIIHLFTLTNLGAPAAFKYFDTTIDRKRYTSTKEVLDATLIHQSITGLYETRIDLSQLGGDGGGGSGGLDDEYRLYSPLVKPDQNIQFWLEQFPQAWAETAGMGLAKQVPPQVIQLKASATPVSVRQYPLSKEAQEGIRPHVQRLIQQGILVPVQSPWNTPLLPVRKPGTNDYRPVQDLREVNKRVQDIHPTVPNPYNLLCALPPQRSWYTVLDLKDAFFCLRLHPTSQPLFAFEWRDPGTGRTGQLTWTRLPQGFKNSPTIFNEALHRDLANFRIQHPQVTLLQYVDDLLLAGATKQDCLEGTKALLLELSDLGYRASAKKAQICRREVTYLGYSLRDGQRWLTEARKKTVVQIPAPTTAKQVREFLGKAGFCRLFIPGFATLAAPLYPLTKPKGEFSWAPEHQKAFDAIKKALLSAPALALPDVTKPFTLYVDERKGVARGVLTQTLGPWRRPVAYLSKKLDPVASGWPVCLKAIAAVAILVKDADKLTLGQNITVIAPHALENIVRQPPDRWMTNARMTHYQSLLLTERVTFAPPAALNPATLLPEETDEPVTHDCHQLLIEETGVRKDLTDIPLTGEVLTWFTDGSSYVVEGKRMAGAAVVDGTRTIWASSLPEGTSAQKAELMALTQALRLAEGKSINIYTDSRYAFATAHVHGAIYKQRGWLTSAGREIKNKEEILSLLEALHLPKRLAIIHCPGHQKAKDPISRGNQMADRVAKQAAQGVNLLPAGKRTADGSEFEKRTADGSEFESPKKKAKVE

SEQ ID NO: 263 - protein, 2088 aa, synthetic construct; identical to SEQ ID NO: 92

SEQ ID NO: 264 - protein, 2088 aa, synthetic construct; identical to SEQ ID NO: 53

SEQ ID NO: 265 - protein, 2083 aa, synthetic construct; identical to SEQ ID NO: 79

SEQ ID NO: 266 - protein, 2082 aa, synthetic construct
MPAAKRVKLDGGDKKYSIGLDIGTNSVGWAVITDEYKVPSKKFKVLGNTDRHSIKKNLIGALLFDSGETAEATRLKRTARRRYTRRKNRICYLQEIFSNEMAKVDDSFFHRLEESFLVEEDKKHERHPIFGNIVDEVAYHEKYPTIYHLRKKLVDSTDKADLRLIYLALAHMIKFRGHFLIEGDLNPDNSDVDKLFIQLVQTYNQLFEENPINASGVDAKAILSARLSKSRRLENLIAQLPGEKKNGLFGNLIALSLGLTPNFKSNFDLAEDAKLQLSKDTYDDDLDNLLAQIGDQYADLFLAAKNLSDAILLSDILRVNTEITKAPLSASMIKRYDEHHQDLTLLKALVRQQLPEKYKEIFFDQSKNGYAGYIDGGASQEEFYKFIKPILEKMDGTEELLVKLNREDLLRKQRTFDNGSIPHQIHLGELHAILRRQEDFYPFLKDNREKIEKILTFRIPYYVGPLARGNSRFAWMTRKSEETITPWNFEEVVDKGASAQSFIERMTNFDKNLPNEKVLPKHSLLYEYFTVYNELTKVKYVTEGMRKPAFLSGEQKKAIVDLLFKTNRKVTVKQLKEDYFKKIECFDSVEISGVEDRFNASLGTYHDLLKIIKDKDFLDNEENEDILEDIVLTLTLFEDREMIEERLKTYAHLFDDKVMKQLKRRRYTGWGRLSRKLINGIRDKQSGKTILDFLKSDGFANRNFMQLIHDDSLTFKEDIQKAQVSGQGDSLHEHIANLAGSPAIKKGILQTVKVVDELVKVMGRHKPENIVIEMARENQTTQKGQKNSRERMKRIEEGIKELGSQILKEHPVENTQLQNEKLYLYYLQNGRDMYVDQELDINRLSDYDVDHIVPQSFLKDDSIDNKVLTRSDKARGKSDNVPSEEVVKKMKNYWRQLLNAKLITQRKFDNLTKAERGGLSELDKAGFIKRQLVETRQITKHVAQILDSRMNTKYDENDKLIREVKVITLKSKLVSDFRKDFQFYKVREINNYHHAHDAYLNAVVGTALIKKYPKLESEFVYGDYKVYDVRKMIAKSEQEIGKATAKYFFYSNIMNFFKTEITLANGEIRKRPLIETNGETGEIVWDKGRDFATVRKVLSMPQVNIVKKTEVQTGGFSKESILPKRNSDKLIARKKDWDPKKYGGFDSPTVAYSVLVVAKVEKGKSKKLKSVKELLGITIMERSSFEKNPIDFLEAKGYKEVKKDLIIKLPKYSLFELENGRKRMLASAGELQKGNELALPSKYVNFLYLASHYEKLKGSPEDNEQKQLFVEQHKHYLDEIIEQISEFSKRVILADANLDKVLSAYNKHRDKPIREQAENIIHLFTLTNLGAPAAFKYFDTTIDRKRYTSTKEVLDATLIHQSITGLYETRIDLSQLGGDGGPAPAPGGLDDEYRLYSPLVKPDQNIQFWLEQFPQAWAETAGMGLAKQVPPQVIQLKASATPVSVRQYPLSKEAQEGIRPHVQRLIQQGILVPVQSPWNTPLLPVRKPGTNDYRPVQDLREVNKRVQDIHPTVPNPYNLLCALPPQRSWYTVLDLKDAFFCLRLHPTSQPLFAFEWRDPGTGRTGQLTWTRLPQGFKNSPTIFNEALHRDLANFRIQHPQVTLLQYVDDLLLAGATKQDCLEGTKALLLELSDLGYRASAKKAQICRREVTYLGYSLRDGQRWLTEARKKTVVQIPAPTTAKQVREFLGKAGFCRLFIPGFATLAAPLYPLTKPKGEFSWAPEHQKAFDAIKKALLSAPALALPDVTKPFTLYVDERKGVARGVLTQTLGPWRRPVAYLSKKLDPVASGWPVCLKAIAAVAILVKDADKLTLGQNITVIAPHALENIVRQPPDRWMTNARMTHYQSLLLTERVTFAPPAALNPATLLPEETDEPVTHDCHQLLIEETGVRKDLTDIPLTGEVLTWFTDGSSYVVEGKRMAGAAVVDGTRTIWASSLPEGTSAQKAELMALTQALRLAEGKSINIYTDSRYAFATAHVHGAIYKQRGWLTSAGREIKNKEEILSLLEALHLPKRLAIIHCPGHQKAKDPISRGNQMADRVAKQAAQGVNLLPAGKRTADGSEFEKRTADGSEFESPKKKAKVE

SEQ ID NO: 267 - protein, 2086 aa, synthetic construct
MPAAKRVKLDGGDKKYSIGLDIGTNSVGWAVITDEYKVPSKKFKVLGNTDRHSIKKNLIGALLFDSGETAEATRLKRTARRRYTRRKNRICYLQEIFSNEMAKVDDSFFHRLEESFLVEEDKKHERHPIFGNIVDEVAYHEKYPTIYHLRKKLVDSTDKADLRLIYLALAHMIKFRGHFLIEGDLNPDNSDVDKLFIQLVQTYNQLFEENPINASGVDAKAILSARLSKSRRLENLIAQLPGEKKNGLFGNLIALSLGLTPNFKSNFDLAEDAKLQLSKDTYDDDLDNLLAQIGDQYADLFLAAKNLSDAILLSDILRVNTEITKAPLSASMIKRYDEHHQDLTLLKALVRQQLPEKYKEIFFDQSKNGYAGYIDGGASQEEFYKFIKPILEKMDGTEELLVKLNREDLLRKQRTFDNGSIPHQIHLGELHAILRRQEDFYPFLKDNREKIEKILTFRIPYYVGPLARGNSRFAWMTRKSEETITPWNFEEVVDKGASAQSFIERMTNFDKNLPNEKVLPKHSLLYEYFTVYNELTKVKYVTEGMRKPAFLSGEQKKAIVDLLFKTNRKVTVKQLKEDYFKKIECFDSVEISGVEDRFNASLGTYHDLLKIIKDKDFLDNEENEDILEDIVLTLTLFEDREMIEERLKTYAHLFDDKVMKQLKRRRYTGWGRLSRKLINGIRDKQSGKTILDFLKSDGFANRNFMQLIHDDSLTFKEDIQKAQVSGQGDSLHEHIANLAGSPAIKKGILQTVKVVDELVKVMGRHKPENIVIEMARENQTTQKGQKNSRERMKRIEEGIKELGSQILKEHPVENTQLQNEKLYLYYLQNGRDMYVDQELDINRLSDYDVDHIVPQSFLKDDSIDNKVLTRSDKARGKSDNVPSEEVVKKMKNYWRQLLNAKLITQRKFDNLTKAERGGLSELDKAGFIKRQLVETRQITKHVAQILDSRMNTKYDENDKLIREVKVITLKSKLVSDFRKDFQFYKVREINNYHHAHDAYLNAVVGTALIKKYPKLESEFVYGDYKVYDVRKMIAKSEQEIGKATAKYFFYSNIMNFFKTEITLANGEIRKRPLIETNGETGEIVWDKGRDFATVRKVLSMPQVNIVKKTEVQTGGFSKESILPKRNSDKLIARKKDWDPKKYGGFDSPTVAYSVLVVAKVEKGKSKKLKSVKELLGITIMERSSFEKNPIDFLEAKGYKEVKKDLIIKLPKYSLFELENGRKRMLASAGELQKGNELALPSKYVNFLYLASHYEKLKGSPEDNEQKQLFVEQHKHYLDEIIEQISEFSKRVILADANLDKVLSAYNKHRDKPIREQAENIIHLFTLTNLGAPAAFKYFDTTIDRKRYTSTKEVLDATLIHQSITGLYETRIDLSQLGGDGGGGSPAPGSSGGLDDEYRLYSPLVKPDQNIQFWLEQFPQAWAETAGMGLAKQVPPQVIQLKASATPVSVRQYPLSKEAQEGIRPHVQRLIQQGILVPVQSPWNTPLLPVRKPGTNDYRPVQDLREVNKRVQDIHPTVPNPYNLLCALPPQRSWYTVLDLKDAFFCLRLHPTSQPLFAFEWRDPGTGRTGQLTWTRLPQGFKNSPTIFNEALHRDLANFRIQHPQVTLLQYVDDLLLAGATKQDCLEGTKALLLELSDLGYRASAKKAQICRREVTYLGYSLRDGQRWLTEARKKTVVQIPAPTTAKQVREFLGKAGFCRLFIPGFATLAAPLYPLTKPKGEFSWAPEHQKAFDAIKKALLSAPALALPDVTKPFTLYVDERKGVARGVLTQTLGPWRRPVAYLSKKLDPVASGWPVCLKAIAAVAILVKDADKLTLGQNITVIAPHALENIVRQPPDRWMTNARMTHYQSLLLTERVTFAPPAALNPATLLPEETDEPVTHDCHQLLIEETGVRKDLTDIPLTGEVLTWFTDGSSYVVEGKRMAGAAVVDGTRTIWASSLPEGTSAQKAELMALTQALRLAEGKSINIYTDSRYAFATAHVHGAIYKQRGWLTSAGREIKNKEEILSLLEALHLPKRLAIIHCPGHQKAKDPISRGNQMADRVAKQAAQGVNLLPAGKRTADGSEFEKRTADGSEFESPKKKAKVE

SEQ ID NO: 268 - protein, 2086 aa, synthetic construct; identical to SEQ ID NO: 38

SEQ ID NO: 269 - protein, 2080 aa, synthetic construct
MPAAKRVKLDGGDKKYSIGLDIGTNSVGWAVITDEYKVPSKKFKVLGNTDRHSIKKNLIGALLFDSGETAEATRLKRTARRRYTRRKNRICYLQEIFSNEMAKVDDSFFHRLEESFLVEEDKKHERHPIFGNIVDEVAYHEKYPTIYHLRKKLVDSTDKADLRLIYLALAHMIKFRGHFLIEGDLNPDNSDVDKLFIQLVQTYNQLFEENPINASGVDAKAILSARLSKSRRLENLIAQLPGEKKNGLFGNLIALSLGLTPNFKSNFDLAEDAKLQLSKDTYDDDLDNLLAQIGDQYADLFLAAKNLSDAILLSDILRVNTEITKAPLSASMIKRYDEHHQDLTLLKALVRQQLPEKYKEIFFDQSKNGYAGYIDGGASQEEFYKFIKPILEKMDGTEELLVKLNREDLLRKQRTFDNGSIPHQIHLGELHAILRRQEDFYPFLKDNREKIEKILTFRIPYYVGPLARGNSRFAWMTRKSEETITPWNFEEVVDKGASAQSFIERMTNFDKNLPNEKVLPKHSLLYEYFTVYNELTKVKYVTEGMRKPAFLSGEQKKAIVDLLFKTNRKVTVKQLKEDYFKKIECFDSVEISGVEDRFNASLGTYHDLLKIIKDKDFLDNEENEDILEDIVLTLTLFEDREMIEERLKTYAHLFDDKVMKQLKRRRYTGWGRLSRKLINGIRDKQSGKTILDFLKSDGFANRNFMQLIHDDSLTFKEDIQKAQVSGQGDSLHEHIANLAGSPAIKKGILQTVKVVDELVKVMGRHKPENIVIEMARENQTTQKGQKNSRERMKRIEEGIKELGSQILKEHPVENTQLQNEKLYLYYLQNGRDMYVDQELDINRLSDYDVDHIVPQSFLKDDSIDNKVLTRSDKARGKSDNVPSEEVVKKMKNYWRQLLNAKLITQRKFDNLTKAERGGLSELDKAGFIKRQLVETRQITKHVAQILDSRMNTKYDENDKLIREVKVITLKSKLVSDFRKDFQFYKVREINNYHHAHDAYLNAVVGTALIKKYPKLESEFVYGDYKVYDVRKMIAKSEQEIGKATAKYFFYSNIMNFFKTEITLANGEIRKRPLIETNGETGEIVWDKGRDFATVRKVLSMPQVNIVKKTEVQTGGFSKESILPKRNSDKLIARKKDWDPKKYGGFDSPTVAYSVLVVAKVEKGKSKKLKSVKELLGITIMERSSFEKNPIDFLEAKGYKEVKKDLIIKLPKYSLFELENGRKRMLASAGELQKGNELALPSKYVNFLYLASHYEKLKGSPEDNEQKQLFVEQHKHYLDEIIEQISEFSKRVILADANLDKVLSAYNKHRDKPIREQAENIIHLFTLTNLGAPAAFKYFDTTIDRKRYTSTKEVLDATLIHQSITGLYETRIDLSQLGGDGGPAPGGLDDEYRLYSPLVKPDQNIQFWLEQFPQAWAETAGMGLAKQVPPQVIQLKASATPVSVRQYPLSKEAQEGIRPHVQRLIQQGILVPVQSPWNTPLLPVRKPGTNDYRPVQDLREVNKRVQDIHPTVPNPYNLLCALPPQRSWYTVLDLKDAFFCLRLHPTSQPLFAFEWRDPGTGRTGQLTWTRLPQGFKNSPTIFNEALHRDLANFRIQHPQVTLLQYVDDLLLAGATKQDCLEGTKALLLELSDLGYRASAKKAQICRREVTYLGYSLRDGQRWLTEARKKTVVQIPAPTTAKQVREFLGKAGFCRLFIPGFATLAAPLYPLTKPKGEFSWAPEHQKAFDAIKKALLSAPALALPDVTKPFTLYVDERKGVARGVLTQTLGPWRRPVAYLSKKLDPVASGWPVCLKAIAAVAILVKDADKLTLGQNITVIAPHALENIVRQPPDRWMTNARMTHYQSLLLTERVTFAPPAALNPATLLPEETDEPVTHDCHQLLIEETGVRKDLTDIPLTGEVLTWFTDGSSYVVEGKRMAGAAVVDGTRTIWASSLPEGTSAQKAELMALTQALRLAEGKSINIYTDSRYAFATAHVHGAIYKQRGWLTSAGREIKNKEEILSLLEALHLPKRLAIIHCPGHQKAKDPISRGNQMADRVAKQAAQGVNLLPAGKRTADGSEFEKRTADGSEFESPKKKAKVE

SEQ ID NO: 270 - protein, 2086 aa, synthetic construct; identical to SEQ ID NO: 69

SEQ ID NO: 271 - protein, 2083 aa, synthetic construct; identical to SEQ ID NO: 88

SEQ ID NO: 272 - protein, 2086 aa, synthetic construct; identical to SEQ ID NO: 85

SEQ ID NO: 273 - protein, 2085 aa, synthetic construct
MPAAKRVKLDGGDKKYSIGLDIGTNSVGWAVITDEYKVPSKKFKVLGNTDRHSIKKNLIGALLFDSGETAEATRLKRTARRRYTRRKNRICYLQEIFSNEMAKVDDSFFHRLEESFLVEEDKKHERHPIFGNIVDEVAYHEKYPTIYHLRKKLVDSTDKADLRLIYLALAHMIKFRGHFLIEGDLNPDNSDVDKLFIQLVQTYNQLFEENPINASGVDAKAILSARLSKSRRLENLIAQLPGEKKNGLFGNLIALSLGLTPNFKSNFDLAEDAKLQLSKDTYDDDLDNLLAQIGDQYADLFLAAKNLSDAILLSDILRVNTEITKAPLSASMIKRYDEHHQDLTLLKALVRQQLPEKYKEIFFDQSKNGYAGYIDGGASQEEFYKFIKPILEKMDGTEELLVKLNREDLLRKQRTFDNGSIPHQIHLGELHAILRRQEDFYPFLKDNREKIEKILTFRIPYYVGPLARGNSRFAWMTRKSEETITPWNFEEVVDKGASAQSFIERMTNFDKNLPNEKVLPKHSLLYEYFTVYNELTKVKYVTEGMRKPAFLSGEQKKAIVDLLFKTNRKVTVKQLKEDYFKKIECFDSVEISGVEDRFNASLGTYHDLLKIIKDKDFLDNEENEDILEDIVLTLTLFEDREMIEERLKTYAHLFDDKVMKQLKRRRYTGWGRLSRKLINGIRDKQSGKTILDFLKSDGFANRNFMQLIHDDSLTFKEDIQKAQVSGQGDSLHEHIANLAGSPAIKKGILQTVKVVDELVKVMGRHKPENIVIEMARENQTTQKGQKNSRERMKRIEEGIKELGSQILKEHPVENTQLQNEKLYLYYLQNGRDMYVDQELDINRLSDYDVDHIVPQSFLKDDSIDNKVLTRSDKARGKSDNVPSEEVVKKMKNYWRQLLNAKLITQRKFDNLTKAERGGLSELDKAGFIKRQLVETRQITKHVAQILDSRMNTKYDENDKLIREVKVITLKSKLVSDFRKDFQFYKVREINNYHHAHDAYLNAVVGTALIKKYPKLESEFVYGDYKVYDVRKMIAKSEQEIGKATAKYFFYSNIMNFFKTEITLANGEIRKRPLIETNGETGEIVWDKGRDFATVRKVLSMPQVNIVKKTEVQTGGFSKESILPKRNSDKLIARKKDWDPKKYGGFDSPTVAYSVLVVAKVEKGKSKKLKSVKELLGITIMERSSFEKNPIDFLEAKGYKEVKKDLIIKLPKYSLFELENGRKRMLASAGELQKGNELALPSKYVNFLYLASHYEKLKGSPEDNEQKQLFVEQHKHYLDEIIEQISEFSKRVILADANLDKVLSAYNKHRDKPIREQAENIIHLFTLTNLGAPAAFKYFDTTIDRKRYTSTKEVLDATLIHQSITGLYETRIDLSQLGGDGGGGGEAAAKGGLDDEYRLYSPLVKPDQNIQFWLEQFPQAWAETAGMGLAKQVPPQVIQLKASATPVSVRQYPLSKEAQEGIRPHVQRLIQQGILVPVQSPWNTPLLPVRKPGTNDYRPVQDLREVNKRVQDIHPTVPNPYNLLCALPPQRSWYTVLDLKDAFFCLRLHPTSQPLFAFEWRDPGTGRTGQLTWTRLPQGFKNSPTIFNEALHRDLANFRIQHPQVTLLQYVDDLLLAGATKQDCLEGTKALLLELSDLGYRASAKKAQICRREVTYLGYSLRDGQRWLTEARKKTVVQIPAPTTAKQVREFLGKAGFCRLFIPGFATLAAPLYPLTKPKGEFSWAPEHQKAFDAIKKALLSAPALALPDVTKPFTLYVDERKGVARGVLTQTLGPWRRPVAYLSKKLDPVASGWPVCLKAIAAVAILVKDADKLTLGQNITVIAPHALENIVRQPPDRWMTNARMTHYQSLLLTERVTFAPPAALNPATLLPEETDEPVTHDCHQLLIEETGVRKDLTDIPLTGEVLTWFTDGSSYVVEGKRMAGAAVVDGTRTIWASSLPEGTSAQKAELMALTQALRLAEGKSINIYTDSRYAFATAHVHGAIYKQRGWLTSAGREIKNKEEILSLLEALHLPKRLAIIHCPGHQKAKDPISRGNQMADRVAKQAAQGVNLLPAGKRTADGSEFEKRTADGSEFESPKKKAKVE

SEQ ID NO: 274 - protein, 2086 aa, synthetic construct
MPAAKRVKLDGGDKKYSIGLDIGTNSVGWAVITDEYKVPSKKFKVLGNTDRHSIKKNLIGALLFDSGETAEATRLKRTARRRYTRRKNRICYLQEIFSNEMAKVDDSFFHRLEESFLVEEDKKHERHPIFGNIVDEVAYHEKYPTIYHLRKKLVDSTDKADLRLIYLALAHMIKFRGHFLIEGDLNPDNSDVDKLFIQLVQTYNQLFEENPINASGVDAKAILSARLSKSRRLENLIAQLPGEKKNGLFGNLIALSLGLTPNFKSNFDLAEDAKLQLSKDTYDDDLDNLLAQIGDQYADLFLAAKNLSDAILLSDILRVNTEITKAPLSASMIKRYDEHHQDLTLLKALVRQQLPEKYKEIFFDQSKNGYAGYIDGGASQEEFYKFIKPILEKMDGTEELLVKLNREDLLRKQRTFDNGSIPHQIHLGELHAILRRQEDFYPFLKDNREKIEKILTFRIPYYVGPLARGNSRFAWMTRKSEETITPWNFEEVVDKGASAQSFIERMTNFDKNLPNEKVLPKHSLLYEYFTVYNELTKVKYVTEGMRKPAFLSGEQKKAIVDLLFKTNRKVTVKQLKEDYFKKIECFDSVEISGVEDRFNASLGTYHDLLKIIKDKDFLDNEENEDILEDIVLTLTLFEDREMIEERLKTYAHLFDDKVMKQLKRRRYTGWGRLSRKLINGIRDKQSGKTILDFLKSDGFANRNFMQLIHDDSLTFKEDIQKAQVSGQGDSLHEHIANLAGSPAIKKGILQTVKVVDELVKVMGRHKPENIVIEMARENQTTQKGQKNSRERMKRIEEGIKELGSQILKEHPVENTQLQNEKLYLYYLQNGRDMYVDQELDINRLSDYDVDHIVPQSFLKDDSIDNKVLTRSDKARGKSDNVPSEEVVKKMKNYWRQLLNAKLITQRKFDNLTKAERGGLSELDKAGFIKRQLVETRQITKHVAQILDSRMNTKYDENDKLIREVKVITLKSKLVSDFRKDFQFYKVREINNYHHAHDAYLNAVVGTALIKKYPKLESEFVYGDYKVYDVRKMIAKSEQEIGKATAKYFFYSNIMNFFKTEITLANGEIRKRPLIETNGETGEIVWDKGRDFATVRKVLSMPQVNIVKKTEVQTGGFSKESILPKRNSDKLIARKKDWDPKKYGGFDSPTVAYSVLVVAKVEKGKSKKLKSVKELLGITIMERSSFEKNPIDFLEAKGYKEVKKDLIIKLPKYSLFELENGRKRMLASAGELQKGNELALPSKYVNFLYLASHYEKLKGSPEDNEQKQLFVEQHKHYLDEIIEQISEFSKRVILADANLDKVLSAYNKHRDKPIREQAENIIHLFTLTNLGAPAAFKYFDTTIDRKRYTSTKEVLDATLIHQSITGLYETRIDLSQLGGDGGGGSGGGGSSGGLDDEYRLYSPLVKPDQNIQFWLEQFPQAWAETAGMGLAKQVPPQVIQLKASATPVSVRQYPLSKEAQEGIRPHVQRLIQQGILVPVQSPWNTPLLPVRKPGTNDYRPVQDLREVNKRVQDIHPTVPNPYNLLCALPPQRSWYTVLDLKDAFFCLRLHPTSQPLFAFEWRDPGTGRTGQLTWTRLPQGFKNSPTIFNEALHRDLANFRIQHPQVTLLQYVDDLLLAGATKQDCLEGTKALLLELSDLGYRASAKKAQICRREVTYLGYSLRDGQRWLTEARKKTVVQIPAPTTAKQVREFLGKAGFCRLFIPGFATLAAPLYPLTKPKGEFSWAPEHQKAFDAIKKALLSAPALALPDVTKPFTLYVDERKGVARGVLTQTLGPWRRPVAYLSKKLDPVASGWPVCLKAIAAVAILVKDADKLTLGQNITVIAPHALENIVRQPPDRWMTNARMTHYQSLLLTERVTFAPPAALNPATLLPEETDEPVTHDCHQLLIEETGVRKDLTDIPLTGEVLTWFTDGSSYVVEGKRMAGAAVVDGTRTIWASSLPEGTSAQKAELMALTQALRLAEGKSINIYTDSRYAFATAHVHGAIYKQRGWLTSAGREIKNKEEILSLLEALHLPKRLAIIHCPGHQKAKDPISRGNQMADRVAKQAAQGVNLLPAGKRTADGSEFEKRTADGSEFESPKKKAKVE

SEQ ID NO: 275 - protein, 2086 aa, synthetic construct; identical to SEQ ID NO: 91

SEQ ID NO: 276 - protein, 2086 aa, synthetic construct; identical to SEQ ID NO: 95

SEQ ID NO: 277 - protein, 2085 aa, synthetic construct
MPAAKRVKLDGGDKKYSIGLDIGTNSVGWAVITDEYKVPSKKFKVLGNTDRHSIKKNLIGALLFDSGETAEATRLKRTARRRYTRRKNRICYLQEIFSNEMAKVDDSFFHRLEESFLVEEDKKHERHPIFGNIVDEVAYHEKYPTIYHLRKKLVDSTDKADLRLIYLALAHMIKFRGHFLIEGDLNPDNSDVDKLFIQLVQTYNQLFEENPINASGVDAKAILSARLSKSRRLENLIAQLPGEKKNGLFGNLIALSLGLTPNFKSNFDLAEDAKLQLSKDTYDDDLDNLLAQIGDQYADLFLAAKNLSDAILLSDILRVNTEITKAPLSASMIKRYDEHHQDLTLLKALVRQQLPEKYKEIFFDQSKNGYAGYIDGGASQEEFYKFIKPILEKMDGTEELLVKLNREDLLRKQRTFDNGSIPHQIHLGELHAILRRQEDFYPFLKDNREKIEKILTFRIPYYVGPLARGNSRFAWMTRKSEETITPWNFEEVVDKGASAQSFIERMTNFDKNLPNEKVLPKHSLLYEYFTVYNELTKVKYVTEGMRKPAFLSGEQKKAIVDLLFKTNRKVTVKQLKEDYFKKIECFDSVEISGVEDRFNASLGTYHDLLKIIKDKDFLDNEENEDILEDIVLTLTLFEDREMIEERLKTYAHLFDDKVMKQLKRRRYTGWGRLSRKLINGIRDKQSGKTILDFLKSDGFANRNFMQLIHDDSLTFKEDIQKAQVSGQGDSLHEHIANLAGSPAIKKGILQTVKVVDELVKVMGRHKPENIVIEMARENQTTQKGQKNSRERMKRIEEGIKELGSQILKEHPVENTQLQNEKLYLYYLQNGRDMYVDQELDINRLSDYDVDHIVPQSFLKDDSIDNKVLTRSDKARGKSDNVPSEEVVKKMKNYWRQLLNAKLITQRKFDNLTKAERGGLSELDKAGFIKRQLVETRQITKHVAQILDSRMNTKYDENDKLIREVKVITLKSKLVSDFRKDFQFYKVREINNYHHAHDAYLNAVVGTALIKKYPKLESEFVYGDYKVYDVRKMIAKSEQEIGKATAKYFFYSNIMNFFKTEITLANGEIRKRPLIETNGETGEIVWDKGRDFATVRKVLSMPQVNIVKKTEVQTGGFSKESILPKRNSDKLIARKKDWDPKKYGGFDSPTVAYSVLVVAKVEKGKSKKLKSVKELLGITIMERSSFEKNPIDFLEAKGYKEVKKDLIIKLPKYSLFELENGRKRMLASAGELQKGNELALPSKYVNFLYLASHYEKLKGSPEDNEQKQLFVEQHKHYLDEIIEQISEFSKRVILADANLDKVLSAYNKHRDKPIREQAENIIHLFTLTNLGAPAAFKYFDTTIDRKRYTSTKEVLDATLIHQSITGLYETRIDLSQLGGDGGGGSEAAAKGGLDDEYRLYSPLVKPDQNIQFWLEQFPQAWAETAGMGLAKQVPPQVIQLKASATPVSVRQYPLSKEAQEGIRPHVQRLIQQGILVPVQSPWNTPLLPVRKPGTNDYRPVQDLREVNKRVQDIHPTVPNPYNLLCALPPQRSWYTVLDLKDAFFCLRLHPTSQPLFAFEWRDPGTGRTGQLTWTRLPQGFKNSPTIFNEALHRDLANFRIQHPQVTLLQYVDDLLLAGATKQDCLEGTKALLLELSDLGYRASAKKAQICRREVTYLGYSLRDGQRWLTEARKKTVVQIPAPTTAKQVREFLGKAGFCRLFIPGFATLAAPLYPLTKPKGEFSWAPEHQKAFDAIKKALLSAPALALPDVTKPFTLYVDERKGVARGVLTQTLGPWRRPVAYLSKKLDPVASGWPVCLKAIAAVAILVKDADKLTLGQNITVIAPHALENIVRQPPDRWMTNARMTHYQSLLLTERVTFAPPAALNPATLLPEETDEPVTHDCHQLLIEETGVRKDLTDIPLTGEVLTWFTDGSSYVVEGKRMAGAAVVDGTRTIWASSLPEGTSAQKAELMALTQALRLAEGKSINIYTDSRYAFATAHVHGAIYKQRGWLTSAGREIKNKEEILSLLEALHLPKRLAIIHCPGHQKAKDPISRGNQMADRVAKQAAQGVNLLPAGKRTADGSEFEKRTADGSEFESPKKKAKVE

SEQ ID NO: 278 - protein, 2090 aa, synthetic construct; identical to SEQ ID NO: 112

SEQ ID NO: 279 - protein, 2094 aa, synthetic construct
MPAAKRVKLDGGDKKYSIGLDIGTNSVGWAVITDEYKVPSKKFKVLGNTDRHSIKKNLIGALLFDSGETAEATRLKRTARRRYTRRKNRICYLQEIFSNEMAKVDDSFFHRLEESFLVEEDKKHERHPIFGNIVDEVAYHEKYPTIYHLRKKLVDSTDKADLRLIYLALAHMIKFRGHFLIEGDLNPDNSDVDKLFIQLVQTYNQLFEENPINASGVDAKAILSARLSKSRRLENLIAQLPGEKKNGLFGNLIALSLGLTPNFKSNFDLAEDAKLQLSKDTYDDDLDNLLAQIGDQYADLFLAAKNLSDAILLSDILRVNTEITKAPLSASMIKRYDEHHQDLTLLKALVRQQLPEKYKEIFFDQSKNGYAGYIDGGASQEEFYKFIKPILEKMDGTEELLVKLNREDLLRKQRTFDNGSIPHQIHLGELHAILRRQEDFYPFLKDNREKIEKILTFRIPYYVGPLARGNSRFAWMTRKSEETITPWNFEEVVDKGASAQSFIERMTNFDKNLPNEKVLPKHSLLYEYFTVYNELTKVKYVTEGMRKPAFLSGEQKKAIVDLLFKTNRKVTVKQLKEDYFKKIECFDSVEISGVEDRFNASLGTYHDLLKIIKDKDFLDNEENEDILEDIVLTLTLFEDREMIEERLKTYAHLFDDKVMKQLKRRRYTGWGRLSRKLINGIRDKQSGKTILDFLKSDGFANRNFMQLIHDDSLTFKEDIQKAQVSGQGDSLHEHIANLAGSPAIKKGILQTVKVVDELVKVMGRHKPENIVIEMARENQTTQKGQKNSRERMKRIEEGIKELGSQILKEHPVENTQLQNEKLYLYYLQNGRDMYVDQELDINRLSDYDVDHIVPQSFLKDDSIDNKVLTRSDKARGKSDNVPSEEVVKKMKNYWRQLLNAKLITQRKFDNLTKAERGGLSELDKAGFIKRQLVETRQITKHVAQILDSRMNTKYDENDKLIREVKVITLKSKLVSDFRKDFQFYKVREINNYHHAHDAYLNAVVGTALIKKYPKLESEFVYGDYKVYDVRKMIAKSEQEIGKATAKYFFYSNIMNFFKTEITLANGEIRKRPLIETNGETGEIVWDKGRDFATVRKVLSMPQVNIVKKTEVQTGGFSKESILPKRNSDKLIARKKDWDPKKYGGFDSPTVAYSVLVVAKVEKGKSKKLKSVKELLGITIMERSSFEKNPIDFLEAKGYKEVKKDLIIKLPKYSLFELENGRKRMLASAGELQKGNELALPSKYVNFLYLASHYEKLKGSPEDNEQKQLFVEQHKHYLDEIIEQISEFSKRVILADANLDKVLSAYNKHRDKPIREQAENIIHLFTLTNLGAPAAFKYFDTTIDRKRYTSTKEVLDATLIHQSITGLYETRIDLSQLGGDGGEAAAKEAAAKEAAAKGGTLQLDDEYRLYSPLVKPDQNIQFWLEQFPQAWAETAGMGLAKQVPPQVIQLKASATPVSVRQYPLSKEAQEGIRPHVQRLIQQGILVPVQSPWNTPLLPVRKPGTNDYRPVQDLREVNKRVQDIHPTVPNPYNLLCALPPQRSWYTVLDLKDAFFCLRLHPTSQPLFAFEWRDPGTGRTGQLTWTRLPQGFKNSPTIFDEALHRDLANFRIQHPQVTLLQYVDDLLLAGATKQDCLEGTKALLLELSDLGYRASAKKAQICRREVTYLGYSLRDGQRWLTEARKKTVVQIPAPTTAKQVREFLGTAGFCRLWIPGFATLAAPLYPLTKEKGEFSWAPEHQKAFDAIKKALLSAPALALPDVTKPFTLYVDERKGVARGVLTQTLGPWRRPVAYLSKKLDPVASGWPVCLKAIAAVAILVKDADKLTLGQNITVIAPHALENIVRQPPDRWMTNARMTHYQSLLLTERVTFAPPAALNPATLLPEETDEPVTHDCHQLLIEETGVRKDLTDIPLTGEVLTWFTDGSSYVVEGKRMAGAAVVDGTRTIWASSLPEGTSAQKAELMALTQALRLAEGKSINIYTDSRYAFATAHVHGAIYKQRGLLTSAGREIKNKEEILSLLEALHLPKRLAIIHCPGHQKAKDPISRGNQMADRVAKQAAQGVNLLAGKRTADGSEFEKRTADGSEFESPKKKAKVE

SEQ ID NO: 280 - protein, 2109 aa, synthetic construct
MPAAKRVKLDGGDKKYSIGLDIGTNSVGWAVITDEYKVPSKKFKVLGNTDRHSIKKNLIGALLFDSGETAEATRLKRTARRRYTRRKNRICYLQEIFSNEMAKVDDSFFHRLEESFLVEEDKKHERHPIFGNIVDEVAYHEKYPTIYHLRKKLVDSTDKADLRLIYLALAHMIKFRGHFLIEGDLNPDNSDVDKLFIQLVQTYNQLFEENPINASGVDAKAILSARLSKSRRLENLIAQLPGEKKNGLFGNLIALSLGLTPNFKSNFDLAEDAKLQLSKDTYDDDLDNLLAQIGDQYADLFLAAKNLSDAILLSDILRVNTEITKAPLSASMIKRYDEHHQDLTLLKALVRQQLPEKYKEIFFDQSKNGYAGYIDGGASQEEFYKFIKPILEKMDGTEELLVKLNREDLLRKQRTFDNGSIPHQIHLGELHAILRRQEDFYPFLKDNREKIEKILTFRIPYYVGPLARGNSRFAWMTRKSEETITPWNFEEVVDKGASAQSFIERMTNFDKNLPNEKVLPKHSLLYEYFTVYNELTKVKYVTEGMRKPAFLSGEQKKAIVDLLFKTNRKVTVKQLKEDYFKKIECFDSVEISGVEDRFNASLGTYHDLLKIIKDKDFLDNEENEDILEDIVLTLTLFEDREMIEERLKTYAHLFDDKVMKQLKRRRYTGWGRLSRKLINGIRDKQSGKTILDFLKSDGFANRNFMQLIHDDSLTFKEDIQKAQVSGQGDSLHEHIANLAGSPAIKKGILQTVKVVDELVKVMGRHKPENIVIEMARENQTTQKGQKNSRERMKRIEEGIKELGSQILKEHPVENTQLQNEKLYLYYLQNGRDMYVDQELDINRLSDYDVDHIVPQSFLKDDSIDNKVLTRSDKARGKSDNVPSEEVVKKMKNYWRQLLNAKLITQRKFDNLTKAERGGLSELDKAGFIKRQLVETRQITKHVAQILDSRMNTKYDENDKLIREVKVITLKSKLVSDFRKDFQFYKVREINNYHHAHDAYLNAVVGTALIKKYPKLESEFVYGDYKVYDVRKMIAKSEQEIGKATAKYFFYSNIMNFFKTEITLANGEIRKRPLIETNGETGEIVWDKGRDFATVRKVLSMPQVNIVKKTEVQTGGFSKESILPKRNSDKLIARKKDWDPKKYGGFDSPTVAYSVLVVAKVEKGKSKKLKSVKELLGITIMERSSFEKNPIDFLEAKGYKEVKKDLIIKLPKYSLFELENGRKRMLASAGELQKGNELALPSKYVNFLYLASHYEKLKGSPEDNEQKQLFVEQHKHYLDEIIEQISEFSKRVILADANLDKVLSAYNKHRDKPIREQAENIIHLFTLTNLGAPAAFKYFDTTIDRKRYTSTKEVLDATLIHQSITGLYETRIDLSQLGGDGGEAAAKEAAAKEAAAKEAAAKEAAAKEAAAKGGTLQLDDEYRLYSPLVKPDQNIQFWLEQFPQAWAETAGMGLAKQVPPQVIQLKASATPVSVRQYPLSKEAQEGIRPHVQRLIQQGILVPVQSPWNTPLLPVRKPGTNDYRPVQDLREVNKRVQDIHPTVPNPYNLLCALPPQRSWYTVLDLKDAFFCLRLHPTSQPLFAFEWRDPGTGRTGQLTWTRLPQGFKNSPTIFDEALHRDLANFRIQHPQVTLLQYVDDLLLAGATKQDCLEGTKALLLELSDLGYRASAKKAQICRREVTYLGYSLRDGQRWLTEARKKTVVQIPAPTTAKQVREFLGTAGFCRLWIPGFATLAAPLYPLTKEKGEFSWAPEHQKAFDAIKKALLSAPALALPDVTKPFTLYVDERKGVARGVLTQTLGPWRRPVAYLSKKLDPVASGWPVCLKAIAAVAILVKDADKLTLGQNITVIAPHALENIVRQPPDRWMTNARMTHYQSLLLTERVTFAPPAALNPATLLPEETDEPVTHDCHQLLIEETGVRKDLTDIPLTGEVLTWFTDGSSYVVEGKRMAGAAVVDGTRTIWASSLPEGTSAQKAELMALTQALRLAEGKSINIYTDSRYAFATAHVHGAIYKQRGLLTSAGREIKNKEEILSLLEALHLPKRLAIIHCPGHQKAKDPISRGNQMADRVAKQAAQGVNLLAGKRTADGSEFEKRTADGSEFESPKKKAKVE

SEQ ID NO: 281 - protein, 2088 aa, synthetic construct
MPAAKRVKLDGGDKKYSIGLDIGTNSVGWAVITDEYKVPSKKFKVLGNTDRHSIKKNLIGALLFDSGETAEATRLKRTARRRYTRRKNRICYLQEIFSNEMAKVDDSFFHRLEESFLVEEDKKHERHPIFGNIVDEVAYHEKYPTIYHLRKKLVDSTDKADLRLIYLALAHMIKFRGHFLIEGDLNPDNSDVDKLFIQLVQTYNQLFEENPINASGVDAKAILSARLSKSRRLENLIAQLPGEKKNGLFGNLIALSLGLTPNFKSNFDLAEDAKLQLSKDTYDDDLDNLLAQIGDQYADLFLAAKNLSDAILLSDILRVNTEITKAPLSASMIKRYDEHHQDLTLLKALVRQQLPEKYKEIFFDQSKNGYAGYIDGGASQEEFYKFIKPILEKMDGTEELLVKLNREDLLRKQRTFDNGSIPHQIHLGELHAILRRQEDFYPFLKDNREKIEKILTFRIPYYVGPLARGNSRFAWMTRKSEETITPWNFEEVVDKGASAQSFIERMTNFDKNLPNEKVLPKHSLLYEYFTVYNELTKVKYVTEGMRKPAFLSGEQKKAIVDLLFKTNRKVTVKQLKEDYFKKIECFDSVEISGVEDRFNASLGTYHDLLKIIKDKDFLDNEENEDILEDIVLTLTLFEDREMIEERLKTYAHLFDDKVMKQLKRRRYTGWGRLSRKLINGIRDKQSGKTILDFLKSDGFANRNFMQLIHDDSLTFKEDIQKAQVSGQGDSLHEHIANLAGSPAIKKGILQTVKVVDELVKVMGRHKPENIVIEMARENQTTQKGQKNSRERMKRIEEGIKELGSQILKEHPVENTQLQNEKLYLYYLQNGRDMYVDQELDINRLSDYDVDHIVPQSFLKDDSIDNKVLTRSDKARGKSDNVPSEEVVKKMKNYWRQLLNAKLITQRKFDNLTKAERGGLSELDKAGFIKRQLVETRQITKHVAQILDSRMNTKYDENDKLIREVKVITLKSKLVSDFRKDFQFYKVREINNYHHAHDAYLNAVVGTALIKKYPKLESEFVYGDYKVYDVRKMIAKSEQEIGKATAKYFFYSNIMNFFKTEITLANGEIRKRPLIETNGETGEIVWDKGRDFATVRKVLSMPQVNIVKKTEVQTGGFSKESILPKRNSDKLIARKKDWDPKKYGGFDSPTVAYSVLVVAKVEKGKSKKLKSVKELLGITIMERSSFEKNPIDFLEAKGYKEVKKDLIIKLPKYSLFELENGRKRMLASAGELQKGNELALPSKYVNFLYLASHYEKLKGSPEDNEQKQLFVEQHKHYLDEIIEQISEFSKRVILADANLDKVLSAYNKHRDKPIREQAENIIHLFTLTNLGAPAAFKYFDTTIDRKRYTSTKEVLDATLIHQSITGLYETRIDLSQLGGDGGPAPGGSGSSGGTLQLDDEYRLYSPLVKPDQNIQFWLEQFPQAWAETAGMGLAKQVPPQVIQLKASATPVSVRQYPLSKEAQEGIRPHVQRLIQQGILVPVQSPWNTPLLPVRKPGTNDYRPVQDLREVNKRVQDIHPTVPNPYNLLCALPPQRSWYTVLDLKDAFFCLRLHPTSQPLFAFEWRDPGTGRTGQLTWTRLPQGFKNSPTIFDEALHRDLANFRIQHPQVTLLQYVDDLLLAGATKQDCLEGTKALLLELSDLGYRASAKKAQICRREVTYLGYSLRDGQRWLTEARKKTVVQIPAPTTAKQVREFLGTAGFCRLWIPGFATLAAPLYPLTKEKGEFSWAPEHQKAFDAIKKALLSAPALALPDVTKPFTLYVDERKGVARGVLTQTLGPWRRPVAYLSKKLDPVASGWPVCLKAIAAVAILVKDADKLTLGQNITVIAPHALENIVRQPPDRWMTNARMTHYQSLLLTERVTFAPPAALNPATLLPEETDEPVTHDCHQLLIEETGVRKDLTDIPLTGEVLTWFTDGSSYVVEGKRMAGAAVVDGTRTIWASSLPEGTSAQKAELMALTQALRLAEGKSINIYTDSRYAFATAHVHGAIYKQRGLLTSAGREIKNKEEILSLLEALHLPKRLAIIHCPGHQKAKDPISRGNQMADRVAKQAAQGVNLLAGKRTADGSEFEKRTADGSEFESPKKKAKVE

SEQ ID NO: 282 - protein, 2087 aa, synthetic construct
MPAAKRVKLDGGDKKYSIGLDIGTNSVGWAVITDEYKVPSKKFKVLGNTDRHSIKKNLIGALLFDSGETAEATRLKRTARRRYTRRKNRICYLQEIFSNEMAKVDDSFFHRLEESFLVEEDKKHERHPIFGNIVDEVAYHEKYPTIYHLRKKLVDSTDKADLRLIYLALAHMIKFRGHFLIEGDLNPDNSDVDKLFIQLVQTYNQLFEENPINASGVDAKAILSARLSKSRRLENLIAQLPGEKKNGLFGNLIALSLGLTPNFKSNFDLAEDAKLQLSKDTYDDDLDNLLAQIGDQYADLFLAAKNLSDAILLSDILRVNTEITKAPLSASMIKRYDEHHQDLTLLKALVRQQLPEKYKEIFFDQSKNGYAGYIDGGASQEEFYKFIKPILEKMDGTEELLVKLNREDLLRKQRTFDNGSIPHQIHLGELHAILRRQEDFYPFLKDNREKIEKILTFRIPYYVGPLARGNSRFAWMTRKSEETITPWNFEEVVDKGASAQSFIERMTNFDKNLPNEKVLPKHSLLYEYFTVYNELTKVKYVTEGMRKPAFLSGEQKKAIVDLLFKTNRKVTVKQLKEDYFKKIECFDSVEISGVEDRFNASLGTYHDLLKIIKDKDFLDNEENEDILEDIVLTLTLFEDREMIEERLKTYAHLFDDKVMKQLKRRRYTGWGRLSRKLINGIRDKQSGKTILDFLKSDGFANRNFMQLIHDDSLTFKEDIQKAQVSGQGDSLHEHIANLAGSPAIKKGILQTVKVVDELVKVMGRHKPENIVIEMARENQTTQKGQKNSRERMKRIEEGIKELGSQILKEHPVENTQLQNEKLYLYYLQNGRDMYVDQELDINRLSDYDVDHIVPQSFLKDDSIDNKVLTRSDKARGKSDNVPSEEVVKKMKNYWRQLLNAKLITQRKFDNLTKAERGGLSELDKAGFIKRQLVETRQITKHVAQILDSRMNTKYDENDKLIREVKVITLKSKLVSDFRKDFQFYKVREINNYHHAHDAYLNAVVGTALIKKYPKLESEFVYGDYKVYDVRKMIAKSEQEIGKATAKYFFYSNIMNFFKTEITLANGEIRKRPLIETNGETGEIVWDKGRDFATVRKVLSMPQVNIVKKTEVQTGGFSKESILPKRNSDKLIARKKDWDPKKYGGFDSPTVAYSVLVVAKVEKGKSKKLKSVKELLGITIMERSSFEKNPIDFLEAKGYKEVKKDLIIKLPKYSLFELENGRKRMLASAGELQKGNELALPSKYVNFLYLASHYEKLKGSPEDNEQKQLFVEQHKHYLDEIIEQISEFSKRVILADANLDKVLSAYNKHRDKPIREQAENIIHLFTLTNLGAPAAFKYFDTTIDRKRYTSTKEVLDATLIHQSITGLYETRIDLSQLGGDGGEAAAKGGGGGTLQLDDEYRLYSPLVKPDQNIQFWLEQFPQAWAETAGMGLAKQVPPQVIQLKASATPVSVRQYPLSKEAQEGIRPHVQRLIQQGILVPVQSPWNTPLLPVRKPGTNDYRPVQDLREVNKRVQDIHPTVPNPYNLLCALPPQRSWYTVLDLKDAFFCLRLHPTSQPLFAFEWRDPGTGRTGQLTWTRLPQGFKNSPTIFDEALHRDLANFRIQHPQVTLLQYVDDLLLAGATKQDCLEGTKALLLELSDLGYRASAKKAQICRREVTYLGYSLRDGQRWLTEARKKTVVQIPAPTTAKQVREFLGTAGFCRLWIPGFATLAAPLYPLTKEKGEFSWAPEHQKAFDAIKKALLSAPALALPDVTKPFTLYVDERKGVARGVLTQTLGPWRRPVAYLSKKLDPVASGWPVCLKAIAAVAILVKDADKLTLGQNITVIAPHALENIVRQPPDRWMTNARMTHYQSLLLTERVTFAPPAALNPATLLPEETDEPVTHDCHQLLIEETGVRKDLTDIPLTGEVLTWFTDGSSYVVEGKRMAGAAVVDGTRTIWASSLPEGTSAQKAELMALTQALRLAEGKSINIYTDSRYAFATAHVHGAIYKQRGLLTSAGREIKNKEEILSLLEALHLPKRLAIIHCPGHQKAKDPISRGNQMADRVAKQAAQGVNLLAGKRTADGSEFEKRTADGSEFESPKKKAKVE

SEQ ID NO: 283 - protein, 2091 aa, synthetic construct
MPAAKRVKLDGGDKKYSIGLDIGTNSVGWAVITDEYKVPSKKFKVLGNTDRHSIKKNLIGALLFDSGETAEATRLKRTARRRYTRRKNRICYLQEIFSNEMAKVDDSFFHRLEESFLVEEDKKHERHPIFGNIVDEVAYHEKYPTIYHLRKKLVDSTDKADLRLIYLALAHMIKFRGHFLIEGDLNPDNSDVDKLFIQLVQTYNQLFEENPINASGVDAKAILSARLSKSRRLENLIAQLPGEKKNGLFGNLIALSLGLTPNFKSNFDLAEDAKLQLSKDTYDDDLDNLLAQIGDQYADLFLAAKNLSDAILLSDILRVNTEITKAPLSASMIKRYDEHHQDLTLLKALVRQQLPEKYKEIFFDQSKNGYAGYIDGGASQEEFYKFIKPILEKMDGTEELLVKLNREDLLRKQRTFDNGSIPHQIHLGELHAILRRQEDFYPFLKDNREKIEKILTFRIPYYVGPLARGNSRFAWMTRKSEETITPWNFEEVVDKGASAQSFIERMTNFDKNLPNEKVLPKHSLLYEYFTVYNELTKVKYVTEGMRKPAFLSGEQKKAIVDLLFKTNRKVTVKQLKEDYFKKIECFDSVEISGVEDRFNASLGTYHDLLKIIKDKDFLDNEENEDILEDIVLTLTLFEDREMIEERLKTYAHLFDDKVMKQLKRRRYTGWGRLSRKLINGIRDKQSGKTILDFLKSDGFANRNFMQLIHDDSLTFKEDIQKAQVSGQGDSLHEHIANLAGSPAIKKGILQTVKVVDELVKVMGRHKPENIVIEMARENQTTQKGQKNSRERMKRIEEGIKELGSQILKEHPVENTQLQNEKLYLYYLQNGRDMYVDQELDINRLSDYDVDHIVPQSFLKDDSIDNKVLTRSDKARGKSDNVPSEEVVKKMKNYWRQLLNAKLITQRKFDNLTKAERGGLSELDKAGFIKRQLVETRQITKHVAQILDSRMNTKYDENDKLIREVKVITLKSKLVSDFRKDFQFYKVREINNYHHAHDAYLNAVVGTALIKKYPKLESEFVYGDYKVYDVRKMIAKSEQEIGKATAKYFFYSNIMNFFKTEITLANGEIRKRPLIETNGETGEIVWDKGRDFATVRKVLSMPQVNIVKKTEVQTGGFSKESILPKRNSDKLIARKKDWDPKKYGGFDSPTVAYSVLVVAKVEKGKSKKLKSVKELLGITIMERSSFEKNPIDFLEAKGYKEVKKDLIIKLPKYSLFELENGRKRMLASAGELQKGNELALPSKYVNFLYLASHYEKLKGSPEDNEQKQLFVEQHKHYLDEIIEQISEFSKRVILADANLDKVLSAYNKHRDKPIREQAENIIHLFTLTNLGAPAAFKYFDTTIDRKRYTSTKEVLDATLIHQSITGLYETRIDLSQLGGDGGGSAGSAAGSGEFGGTLQLDDEYRLYSPLVKPDQNIQFWLEQFPQAWAETAGMGLAKQVPPQVIQLKASATPVSVRQYPLSKEAQEGIRPHVQRLIQQGILVPVQSPWNTPLLPVRKPGTNDYRPVQDLREVNKRVQDIHPTVPNPYNLLCALPPQRSWYTVLDLKDAFFCLRLHPTSQPLFAFEWRDPGTGRTGQLTWTRLPQGFKNSPTIFDEALHRDLANFRIQHPQVTLLQYVDDLLLAGATKQDCLEGTKALLLELSDLGYRASAKKAQICRREVTYLGYSLRDGQRWLTEARKKTVVQIPAPTTAKQVREFLGTAGFCRLWIPGFATLAAPLYPLTKEKGEFSWAPEHQKAFDAIKKALLSAPALALPDVTKPFTLYVDERKGVARGVLTQTLGPWRRPVAYLSKKLDPVASGWPVCLKAIAAVAILVKDADKLTLGQNITVIAPHALENIVRQPPDRWMTNARMTHYQSLLLTERVTFAPPAALNPATLLPEETDEPVTHDCHQLLIEETGVRKDLTDIPLTGEVLTWFTDGSSYVVEGKRMAGAAVVDGTRTIWASSLPEGTSAQKAELMALTQALRLAEGKSINIYTDSRYAFATAHVHGAIYKQRGLLTSAGREIKNKEEILSLLEALHLPKRLAIIHCPGHQKAKDPISRGNQMADRVAKQAAQGVNLLAGKRTADGSEFEKRTADGSEFESPKKKAKVE

SEQ ID NO: 284 - protein, 2088 aa, synthetic construct
MPAAKRVKLDGGDKKYSIGLDIGTNSVGWAVITDEYKVPSKKFKVLGNTDRHSIKKNLIGALLFDSGETAEATRLKRTARRRYTRRKNRICYLQEIFSNEMAKVDDSFFHRLEESFLVEEDKKHERHPIFGNIVDEVAYHEKYPTIYHLRKKLVDSTDKADLRLIYLALAHMIKFRGHFLIEGDLNPDNSDVDKLFIQLVQTYNQLFEENPINASGVDAKAILSARLSKSRRLENLIAQLPGEKKNGLFGNLIALSLGLTPNFKSNFDLAEDAKLQLSKDTYDDDLDNLLAQIGDQYADLFLAAKNLSDAILLSDILRVNTEITKAPLSASMIKRYDEHHQDLTLLKALVRQQLPEKYKEIFFDQSKNGYAGYIDGGASQEEFYKFIKPILEKMDGTEELLVKLNREDLLRKQRTFDNGSIPHQIHLGELHAILRRQEDFYPFLKDNREKIEKILTFRIPYYVGPLARGNSRFAWMTRKSEETITPWNFEEVVDKGASAQSFIERMTNFDKNLPNEKVLPKHSLLYEYFTVYNELTKVKYVTEGMRKPAFLSGEQKKAIVDLLFKTNRKVTVKQLKEDYFKKIECFDSVEISGVEDRFNASLGTYHDLLKIIKDKDFLDNEENEDILEDIVLTLTLFEDREMIEERLKTYAHLFDDKVMKQLKRRRYTGWGRLSRKLINGIRDKQSGKTILDFLKSDGFANRNFMQLIHDDSLTFKEDIQKAQVSGQGDSLHEHIANLAGSPAIKKGILQTVKVVDELVKVMGRHKPENIVIEMARENQTTQKGQKNSRERMKRIEEGIKELGSQILKEHPVENTQLQNEKLYLYYLQNGRDMYVDQELDINRLSDYDVDHIVPQSFLKDDSIDNKVLTRSDKARGKSDNVPSEEVVKKMKNYWRQLLNAKLITQRKFDNLTKAERGGLSELDKAGFIKRQLVETRQITKHVAQILDSRMNTKYDENDKLIREVKVITLKSKLVSDFRKDFQFYKVREINNYHHAHDAYLNAVVGTALIKKYPKLESEFVYGDYKVYDVRKMIAKSEQEIGKATAKYFFYSNIMNFFKTEITLANGEIRKRPLIETNGETGEIVWDKGRDFATVRKVLSMPQVNIVKKTEVQTGGFSKESILPKRNSDKLIARKKDWDPKKYGGFDSPTVAYSVLVVAKVEKGKSKKLKSVKELLGITIMERSSFEKNPIDFLEAKGYKEVKKDLIIKLPKYSLFELENGRKRMLASAGELQKGNELALPSKYVNFLYLASHYEKLKGSPEDNEQKQLFVEQHKHYLDEIIEQISEFSKRVILADANLDKVLSAYNKHRDKPIREQAENIIHLFTLTNLGAPAAFKYFDTTIDRKRYTSTKEVLDATLIHQSITGLYETRIDLSQLGGDGGGSSGGGGGSGGTLQLDDEYRLYSPLVKPDQNIQFWLEQFPQAWAETAGMGLAKQVPPQVIQLKASATPVSVRQYPLSKEAQEGIRPHVQRLIQQGILVPVQSPWNTPLLPVRKPGTNDYRPVQDLREVNKRVQDIHPTVPNPYNLLCALPPQRSWYTVLDLKDAFFCLRLHPTSQPLFAFEWRDPGTGRTGQLTWTRLPQGFKNSPTIFDEALHRDLANFRIQHPQVTLLQYVDDLLLAGATKQDCLEGTKALLLELSDLGYRASAKKAQICRREVTYLGYSLRDGQRWLTEARKKTVVQIPAPTTAKQVREFLGTAGFCRLWIPGFATLAAPLYPLTKEKGEFSWAPEHQKAFDAIKKALLSAPALALPDVTKPFTLYVDERKGVARGVLTQTLGPWRRPVAYLSKKLDPVASGWPVCLKAIAAVAILVKDADKLTLGQNITVIAPHALENIVRQPPDRWMTNARMTHYQSLLLTERVTFAPPAALNPATLLPEETDEPVTHDCHQLLIEETGVRKDLTDIPLTGEVLTWFTDGSSYVVEGKRMAGAAVVDGTRTIWASSLPEGTSAQKAELMALTQALRLAEGKSINIYTDSRYAFATAHVHGAIYKQRGLLTSAGREIKNKEEILSLLEALHLPKRLAIIHCPGHQKAKDPISRGNQMADRVAKQAAQGVNLLAGKRTADGSEFEKRTADGSEFESPKKKAKVE

SEQ ID NO: 285 - protein, 2090 aa, synthetic construct
MPAAKRVKLDGGDKKYSIGLDIGTNSVGWAVITDEYKVPSKKFKVLGNTDRHSIKKNLIGALLFDSGETAEATRLKRTARRRYTRRKNRICYLQEIFSNEMAKVDDSFFHRLEESFLVEEDKKHERHPIFGNIVDEVAYHEKYPTIYHLRKKLVDSTDKADLRLIYLALAHMIKFRGHFLIEGDLNPDNSDVDKLFIQLVQTYNQLFEENPINASGVDAKAILSARLSKSRRLENLIAQLPGEKKNGLFGNLIALSLGLTPNFKSNFDLAEDAKLQLSKDTYDDDLDNLLAQIGDQYADLFLAAKNLSDAILLSDILRVNTEITKAPLSASMIKRYDEHHQDLTLLKALVRQQLPEKYKEIFFDQSKNGYAGYIDGGASQEEFYKFIKPILEKMDGTEELLVKLNREDLLRKQRTFDNGSIPHQIHLGELHAILRRQEDFYPFLKDNREKIEKILTFRIPYYVGPLARGNSRFAWMTRKSEETITPWNFEEVVDKGASAQSFIERMTNFDKNLPNEKVLPKHSLLYEYFTVYNELTKVKYVTEGMRKPAFLSGEQKKAIVDLLFKTNRKVTVKQLKEDYFKKIECFDSVEISGVEDRFNASLGTYHDLLKIIKDKDFLDNEENEDILEDIVLTLTLFEDREMIEERLKTYAHLFDDKVMKQLKRRRYTGWGRLSRKLINGIRDKQSGKTILDFLKSDGFANRNFMQLIHDDSLTFKEDIQKAQVSGQGDSLHEHIANLAGSPAIKKGILQTVKVVDELVKVMGRHKPENIVIEMARENQTTQKGQKNSRERMKRIEEGIKELGSQILKEHPVENTQLQNEKLYLYYLQNGRDMYVDQELDINRLSDYDVDHIVPQSFLKDDSIDNKVLTRSDKARGKSDNVPSEEVVKKMKNYWRQLLNAKLITQRKFDNLTKAERGGLSELDKAGFIKRQLVETRQITKHVAQILDSRMNTKYDENDKLIREVKVITLKSKLVSDFRKDFQFYKVREINNYHHAHDAYLNAVVGTALIKKYPKLESEFVYGDYKVYDVRKMIAKSEQEIGKATAKYFFYSNIMNFFKTEITLANGEIRKRPLIETNGETGEIVWDKGRDFATVRKVLSMPQVNIVKKTEVQTGGFSKESILPKRNSDKLIARKKDWDPKKYGGFDSPTVAYSVLVVAKVEKGKSKKLKSVKELLGITIMERSSFEKNPIDFLEAKGYKEVKKDLIIKLPKYSLFELENGRKRMLASAGELQKGNELALPSKYVNFLYLASHYEKLKGSPEDNEQKQLFVEQHKHYLDEIIEQISEFSKRVILADANLDKVLSAYNKHRDKPIREQAENIIHLFTLTNLGAPAAFKYFDTTIDRKRYTSTKEVLDATLIHQSITGLYETRIDLSQLGGDGGGSSEAAAKGGGGGTLQLDDEYRLYSPLVKPDQNIQFWLEQFPQAWAETAGMGLAKQVPPQVIQLKASATPVSVRQYPLSKEAQEGIRPHVQRLIQQGILVPVQSPWNTPLLPVRKPGTNDYRPVQDLREVNKRVQDIHPTVPNPYNLLCALPPQRSWYTVLDLKDAFFCLRLHPTSQPLFAFEWRDPGTGRTGQLTWTRLPQGFKNSPTIFDEALHRDLANFRIQHPQVTLLQYVDDLLLAGATKQDCLEGTKALLLELSDLGYRASAKKAQICRREVTYLGYSLRDGQRWLTEARKKTVVQIPAPTTAKQVREFLGTAGFCRLWIPGFATLAAPLYPLTKEKGEFSWAPEHQKAFDAIKKALLSAPALALPDVTKPFTLYVDERKGVARGVLTQTLGPWRRPVAYLSKKLDPVASGWPVCLKAIAAVAILVKDADKLTLGQNITVIAPHALENIVRQPPDRWMTNARMTHYQSLLLTERVTFAPPAALNPATLLPEETDEPVTHDCHQLLIEETGVRKDLTDIPLTGEVLTWFTDGSSYVVEGKRMAGAAVVDGTRTIWASSLPEGTSAQKAELMALTQALRLAEGKSINIYTDSRYAFATAHVHGAIYKQRGLLTSAGREIKNKEEILSLLEALHLPKRLAIIHCPGHQKAKDPISRGNQMADRVAKQAAQGVNLLAGKRTADGSEFEKRTADGSEFESPKKKAKVE

SEQ ID NO: 286 - protein, 2090 aa, synthetic construct
MPAAKRVKLDGGDKKYSIGLDIGTNSVGWAVITDEYKVPSKKFKVLGNTDRHSIKKNLIGALLFDSGETAEATRLKRTARRRYTRRKNRICYLQEIFSNEMAKVDDSFFHRLEESFLVEEDKKHERHPIFGNIVDEVAYHEKYPTIYHLRKKLVDSTDKADLRLIYLALAHMIKFRGHFLIEGDLNPDNSDVDKLFIQLVQTYNQLFEENPINASGVDAKAILSARLSKSRRLENLIAQLPGEKKNGLFGNLIALSLGLTPNFKSNFDLAEDAKLQLSKDTYDDDLDNLLAQIGDQYADLFLAAKNLSDAILLSDILRVNTEITKAPLSASMIKRYDEHHQDLTLLKALVRQQLPEKYKEIFFDQSKNGYAGYIDGGASQEEFYKFIKPILEKMDGTEELLVKLNREDLLRKQRTFDNGSIPHQIHLGELHAILRRQEDFYPFLKDNREKIEKILTFRIPYYVGPLARGNSRFAWMTRKSEETITPWNFEEVVDKGASAQSFIERMTNFDKNLPNEKVLPKHSLLYEYFTVYNELTKVKYVTEGMRKPAFLSGEQKKAIVDLLFKTNRKVTVKQLKEDYFKKIECFDSVEISGVEDRFNASLGTYHDLLKIIKDKDFLDNEENEDILEDIVLTLTLFEDREMIEERLKTYAHLFDDKVMKQLKRRRYTGWGRLSRKLINGIRDKQSGKTILDFLKSDGFANRNFMQLIHDDSLTFKEDIQKAQVSGQGDSLHEHIANLAGSPAIKKGILQTVKVVDELVKVMGRHKPENIVIEMARENQTTQKGQKNSRERMKRIEEGIKELGSQILKEHPVENTQLQNEKLYLYYLQNGRDMYVDQELDINRLSDYDVDHIVPQSFLKDDSIDNKVLTRSDKARGKSDNVPSEEVVKKMKNYWRQLLNAKLITQRKFDNLTKAERGGLSELDKAGFIKRQLVETRQITKHVAQILDSRMNTKYDENDKLIREVKVITLKSKLVSDFRKDFQFYKVREINNYHHAHDAYLNAVVGTALIKKYPKLESEFVYGDYKVYDVRKMIAKSEQEIGKATAKYFFYSNIMNFFKTEITLANGEIRKRPLIETNGETGEIVWDKGRDFATVRKVLSMPQVNIVKKTEVQTGGFSKESILPKRNSDKLIARKKDWDPKKYGGFDSPTVAYSVLVVAKVEKGKSKKLKSVKELLGITIMERSSFEKNPIDFLEAKGYKEVKKDLIIKLPKYSLFELENGRKRMLASAGELQKGNELALPSKYVNFLYLASHYEKLKGSPEDNEQKQLFVEQHKHYLDEIIEQISEFSKRVILADANLDKVLSAYNKHRDKPIREQAENIIHLFTLTNLGAPAAFKYFDTTIDRKRYTSTKEVLDATLIHQSITGLYETRIDLSQLGGDGGGGSGGGEAAAKGGTLQLDDEYRLYSPLVKPDQNIQFWLEQFPQAWAETAGMGLAKQVPPQVIQLKASATPVSVRQYPLSKEAQEGIRPHVQRLIQQGILVPVQSPWNTPLLPVRKPGTNDYRPVQDLREVNKRVQDIHPTVPNPYNLLCALPPQRSWYTVLDLKDAFFCLRLHPTSQPLFAFEWRDPGTGRTGQLTWTRLPQGFKNSPTIFDEALHRDLANFRIQHPQVTLLQYVDDLLLAGATKQDCLEGTKALLLELSDLGYRASAKKAQICRREVTYLGYSLRDGQRWLTEARKKTVVQIPAPTTAKQVREFLGTAGFCRLWIPGFATLAAPLYPLTKEKGEFSWAPEHQKAFDAIKKALLSAPALALPDVTKPFTLYVDERKGVARGVLTQTLGPWRRPVAYLSKKLDPVASGWPVCLKAIAAVAILVKDADKLTLGQNITVIAPHALENIVRQPPDRWMTNARMTHYQSLLLTERVTFAPPAALNPATLLPEETDEPVTHDCHQLLIEETGVRKDLTDIPLTGEVLTWFTDGSSYVVEGKRMAGAAVVDGTRTIWASSLPEGTSAQKAELMALTQALRLAEGKSINIYTDSRYAFATAHVHGAIYKQRGLLTSAGREIKNKEEILSLLEALHLPKRLAIIHCPGHQKAKDPISRGNQMADRVAKQAAQGVNLLAGKRTADGSEFEKRTADGSEFESPKKKAKVE

SEQ ID NO: 287 - protein, 2090 aa, synthetic construct
MPAAKRVKLDGGDKKYSIGLDIGTNSVGWAVITDEYKVPSKKFKVLGNTDRHSIKKNLIGALLFDSGETAEATRLKRTARRRYTRRKNRICYLQEIFSNEMAKVDDSFFHRLEESFLVEEDKKHERHPIFGNIVDEVAYHEKYPTIYHLRKKLVDSTDKADLRLIYLALAHMIKFRGHFLIEGDLNPDNSDVDKLFIQLVQTYNQLFEENPINASGVDAKAILSARLSKSRRLENLIAQLPGEKKNGLFGNLIALSLGLTPNFKSNFDLAEDAKLQLSKDTYDDDLDNLLAQIGDQYADLFLAAKNLSDAILLSDILRVNTEITKAPLSASMIKRYDEHHQDLTLLKALVRQQLPEKYKEIFFDQSKNGYAGYIDGGASQEEFYKFIKPILEKMDGTEELLVKLNREDLLRKQRTFDNGSIPHQIHLGELHAILRRQEDFYPFLKDNREKIEKILTFRIPYYVGPLARGNSRFAWMTRKSEETITPWNFEEVVDKGASAQSFIERMTNFDKNLPNEKVLPKHSLLYEYFTVYNELTKVKYVTEGMRKPAFLSGEQKKAIVDLLFKTNRKVTVKQLKEDYFKKIECFDSVEISGVEDRFNASLGTYHDLLKIIKDKDFLDNEENEDILEDIVLTLTLFEDREMIEERLKTYAHLFDDKVMKQLKRRRYTGWGRLSRKLINGIRDKQSGKTILDFLKSDGFANRNFMQLIHDDSLTFKEDIQKAQVSGQGDSLHEHIANLAGSPAIKKGILQTVKVVDELVKVMGRHKPENIVIEMARENQTTQKGQKNSRERMKRIEEGIKELGSQILKEHPVENTQLQNEKLYLYYLQNGRDMYVDQELDINRLSDYDVDHIVPQSFLKDDSIDNKVLTRSDKARGKSDNVPSEEVVKKMKNYWRQLLNAKLITQRKFDNLTKAERGGLSELDKAGFIKRQLVETRQITKHVAQILDSRMNTKYDENDKLIREVKVITLKSKLVSDFRKDFQFYKVREINNYHHAHDAYLNAVVGTALIKKYPKLESEFVYGDYKVYDVRKMIAKSEQEIGKATAKYFFYSNIMNFFKTEITLANGEIRKRPLIETNGETGEIVWDKGRDFATVRKVLSMPQVNIVKKTEVQTGGFSKESILPKRNSDKLIARKKDWDPKKYGGFDSPTVAYSVLVVAKVEKGKSKKLKSVKELLGITIMERSSFEKNPIDFLEAKGYKEVKKDLIIKLPKYSLFELENGRKRMLASAGELQKGNELALPSKYVNFLYLASHYEKLKGSPEDNEQKQLFVEQHKHYLDEIIEQISEFSKRVILADANLDKVLSAYNKHRDKPIREQAENIIHLFTLTNLGAPAAFKYFDTTIDRKRYTSTKEVLDATLIHQSITGLYETRIDLSQLGGDGGEAAAKPAPGGSGGTLQLDDEYRLYSPLVKPDQNIQFWLEQFPQAWAETAGMGLAKQVPPQVIQLKASATPVSVRQYPLSKEAQEGIRPHVQRLIQQGILVPVQSPWNTPLLPVRKPGTNDYRPVQDLREVNKRVQDIHPTVPNPYNLLCALPPQRSWYTVLDLKDAFFCLRLHPTSQPLFAFEWRDPGTGRTGQLTWTRLPQGFKNSPTIFDEALHRDLANFRIQHPQVTLLQYVDDLLLAGATKQDCLEGTKALLLELSDLGYRASAKKAQICRREVTYLGYSLRDGQRWLTEARKKTVVQIPAPTTAKQVREFLGTAGFCRLWIPGFATLAAPLYPLTKEKGEFSWAPEHQKAFDAIKKALLSAPALALPDVTKPFTLYVDERKGVARGVLTQTLGPWRRPVAYLSKKLDPVASGWPVCLKAIAAVAILVKDADKLTLGQNITVIAPHALENIVRQPPDRWMTNARMTHYQSLLLTERVTFAPPAALNPATLLPEETDEPVTHDCHQLLIEETGVRKDLTDIPLTGEVLTWFTDGSSYVVEGKRMAGAAVVDGTRTIWASSLPEGTSAQKAELMALTQALRLAEGKSINIYTDSRYAFATAHVHGAIYKQRGLLTSAGREIKNKEEILSLLEALHLPKRLAIIHCPGHQKAKDPISRGNQMADRVAKQAAQGVNLLAGKRTADGSEFEKRTADGSEFESPKKKAKVE

SEQ ID NO: 288 - protein, 2090 aa, synthetic construct
MPAAKRVKLDGGDKKYSIGLDIGTNSVGWAVITDEYKVPSKKFKVLGNTDRHSIKKNLIGALLFDSGETAEATRLKRTARRRYTRRKNRICYLQEIFSNEMAKVDDSFFHRLEESFLVEEDKKHERHPIFGNIVDEVAYHEKYPTIYHLRKKLVDSTDKADLRLIYLALAHMIKFRGHFLIEGDLNPDNSDVDKLFIQLVQTYNQLFEENPINASGVDAKAILSARLSKSRRLENLIAQLPGEKKNGLFGNLIALSLGLTPNFKSNFDLAEDAKLQLSKDTYDDDLDNLLAQIGDQYADLFLAAKNLSDAILLSDILRVNTEITKAPLSASMIKRYDEHHQDLTLLKALVRQQLPEKYKEIFFDQSKNGYAGYIDGGASQEEFYKFIKPILEKMDGTEELLVKLNREDLLRKQRTFDNGSIPHQIHLGELHAILRRQEDFYPFLKDNREKIEKILTFRIPYYVGPLARGNSRFAWMTRKSEETITPWNFEEVVDKGASAQSFIERMTNFDKNLPNEKVLPKHSLLYEYFTVYNELTKVKYVTEGMRKPAFLSGEQKKAIVDLLFKTNRKVTVKQLKEDYFKKIECFDSVEISGVEDRFNASLGTYHDLLKIIKDKDFLDNEENEDILEDIVLTLTLFEDREMIEERLKTYAHLFDDKVMKQLKRRRYTGWGRLSRKLINGIRDKQSGKTILDFLKSDGFANRNFMQLIHDDSLTFKEDIQKAQVSGQGDSLHEHIANLAGSPAIKKGILQTVKVVDELVKVMGRHKPENIVIEMARENQTTQKGQKNSRERMKRIEEGIKELGSQILKEHPVENTQLQNEKLYLYYLQNGRDMYVDQELDINRLSDYDVDHIVPQSFLKDDSIDNKVLTRSDKARGKSDNVPSEEVVKKMKNYWRQLLNAKLITQRKFDNLTKAERGGLSELDKAGFIKRQLVETRQITKHVAQILDSRMNTKYDENDKLIREVKVITLKSKLVSDFRKDFQFYKVREINNYHHAHDAYLNAVVGTALIKKYPKLESEFVYGDYKVYDVRKMIAKSEQEIGKATAKYFFYSNIMNFFKTEITLANGEIRKRPLIETNGETGEIVWDKGRDFATVRKVLSMPQVNIVKKTEVQTGGFSKESILPKRNSDKLIARKKDWDPKKYGGFDSPTVAYSVLVVAKVEKGKSKKLKSVKELLGITIMERSSFEKNPIDFLEAKGYKEVKKDLIIKLPKYSLFELENGRKRMLASAGELQKGNELALPSKYVNFLYLASHYEKLKGSPEDNEQKQLFVEQHKHYLDEIIEQISEFSKRVILADANLDKVLSAYNKHRDKPIREQAENIIHLFTLTNLGAPAAFKYFDTTIDRKRYTSTKEVLDATLIHQSITGLYETRIDLSQLGGDGGEAAAKGGGGGSGGTLQLDDEYRLYSPLVKPDQNIQFWLEQFPQAWAETAGMGLAKQVPPQVIQLKASATPVSVRQYPLSKEAQEGIRPHVQRLIQQGILVPVQSPWNTPLLPVRKPGTNDYRPVQDLREVNKRVQDIHPTVPNPYNLLCALPPQRSWYTVLDLKDAFFCLRLHPTSQPLFAFEWRDPGTGRTGQLTWTRLPQGFKNSPTIFDEALHRDLANFRIQHPQVTLLQYVDDLLLAGATKQDCLEGTKALLLELSDLGYRASAKKAQICRREVTYLGYSLRDGQRWLTEARKKTVVQIPAPTTAKQVREFLGTAGFCRLWIPGFATLAAPLYPLTKEKGEFSWAPEHQKAFDAIKKALLSAPALALPDVTKPFTLYVDERKGVARGVLTQTLGPWRRPVAYLSKKLDPVASGWPVCLKAIAAVAILVKDADKLTLGQNITVIAPHALENIVRQPPDRWMTNARMTHYQSLLLTERVTFAPPAALNPATLLPEETDEPVTHDCHQLLIEETGVRKDLTDIPLTGEVLTWFTDGSSYVVEGKRMAGAAVVDGTRTIWASSLPEGTSAQKAELMALTQALRLAEGKSINIYTDSRYAFATAHVHGAIYKQRGLLTSAGREIKNKEEILSLLEALHLPKRLAIIHCPGHQKAKDPISRGNQMADRVAKQAAQGVNLLAGKRTADGSEFEKRTADGSEFESPKKKAKVE

SEQ ID NO: 289 - protein, 2082 aa, synthetic construct
MPAAKRVKLDGGDKKYSIGLDIGTNSVGWAVITDEYKVPSKKFKVLGNTDRHSIKKNLIGALLFDSGETAEATRLKRTARRRYTRRKNRICYLQEIFSNEMAKVDDSFFHRLEESFLVEEDKKHERHPIFGNIVDEVAYHEKYPTIYHLRKKLVDSTDKADLRLIYLALAHMIKFRGHFLIEGDLNPDNSDVDKLFIQLVQTYNQLFEENPINASGVDAKAILSARLSKSRRLENLIAQLPGEKKNGLFGNLIALSLGLTPNFKSNFDLAEDAKLQLSKDTYDDDLDNLLAQIGDQYADLFLAAKNLSDAILLSDILRVNTEITKAPLSASMIKRYDEHHQDLTLLKALVRQQLPEKYKEIFFDQSKNGYAGYIDGGASQEEFYKFIKPILEKMDGTEELLVKLNREDLLRKQRTFDNGSIPHQIHLGELHAILRRQEDFYPFLKDNREKIEKILTFRIPYYVGPLARGNSRFAWMTRKSEETITPWNFEEVVDKGASAQSFIERMTNFDKNLPNEKVLPKHSLLYEYFTVYNELTKVKYVTEGMRKPAFLSGEQKKAIVDLLFKTNRKVTVKQLKEDYFKKIECFDSVEISGVEDRFNASLGTYHDLLKIIKDKDFLDNEENEDILEDIVLTLTLFEDREMIEERLKTYAHLFDDKVMKQLKRRRYTGWGRLSRKLINGIRDKQSGKTILDFLKSDGFANRNFMQLIHDDSLTFKEDIQKAQVSGQGDSLHEHIANLAGSPAIKKGILQTVKVVDELVKVMGRHKPENIVIEMARENQTTQKGQKNSRERMKRIEEGIKELGSQILKEHPVENTQLQNEKLYLYYLQNGRDMYVDQELDINRLSDYDVDHIVPQSFLKDDSIDNKVLTRSDKARGKSDNVPSEEVVKKMKNYWRQLLNAKLITQRKFDNLTKAERGGLSELDKAGFIKRQLVETRQITKHVAQILDSRMNTKYDENDKLIREVKVITLKSKLVSDFRKDFQFYKVREINNYHHAHDAYLNAVVGTALIKKYPKLESEFVYGDYKVYDVRKMIAKSEQEIGKATAKYFFYSNIMNFFKTEITLANGEIRKRPLIETNGETGEIVWDKGRDFATVRKVLSMPQVNIVKKTEVQTGGFSKESILPKRNSDKLIARKKDWDPKKYGGFDSPTVAYSVLVVAKVEKGKSKKLKSVKELLGITIMERSSFEKNPIDFLEAKGYKEVKKDLIIKLPKYSLFELENGRKRMLASAGELQKGNELALPSKYVNFLYLASHYEKLKGSPEDNEQKQLFVEQHKHYLDEIIEQISEFSKRVILADANLDKVLSAYNKHRDKPIREQAENIIHLFTLTNLGAPAAFKYFDTTIDRKRYTSTKEVLDATLIHQSITGLYETRIDLSQLGGDGGGGGGGTLQLDDEYRLYSPLVKPDQNIQFWLEQFPQAWAETAGMGLAKQVPPQVIQLKASATPVSVRQYPLSKEAQEGIRPHVQRLIQQGILVPVQSPWNTPLLPVRKPGTNDYRPVQDLREVNKRVQDIHPTVPNPYNLLCALPPQRSWYTVLDLKDAFFCLRLHPTSQPLFAFEWRDPGTGRTGQLTWTRLPQGFKNSPTIFDEALHRDLANFRIQHPQVTLLQYVDDLLLAGATKQDCLEGTKALLLELSDLGYRASAKKAQICRREVTYLGYSLRDGQRWLTEARKKTVVQIPAPTTAKQVREFLGTAGFCRLWIPGFATLAAPLYPLTKEKGEFSWAPEHQKAFDAIKKALLSAPALALPDVTKPFTLYVDERKGVARGVLTQTLGPWRRPVAYLSKKLDPVASGWPVCLKAIAAVAILVKDADKLTLGQNITVIAPHALENIVRQPPDRWMTNARMTHYQSLLLTERVTFAPPAALNPATLLPEETDEPVTHDCHQLLIEETGVRKDLTDIPLTGEVLTWFTDGSSYVVEGKRMAGAAVVDGTRTIWASSLPEGTSAQKAELMALTQALRLAEGKSINIYTDSRYAFATAHVHGAIYKQRGLLTSAGREIKNKEEILSLLEALHLPKRLAIIHCPGHQKAKDPISRGNQMADRVAKQAAQGVNLLAGKRTADGSEFEKRTADGSEFESPKKKAKVE

SEQ ID NO: 290 - protein, 2090 aa, synthetic construct
MPAAKRVKLDGGDKKYSIGLDIGTNSVGWAVITDEYKVPSKKFKVLGNTDRHSIKKNLIGALLFDSGETAEATRLKRTARRRYTRRKNRICYLQEIFSNEMAKVDDSFFHRLEESFLVEEDKKHERHPIFGNIVDEVAYHEKYPTIYHLRKKLVDSTDKADLRLIYLALAHMIKFRGHFLIEGDLNPDNSDVDKLFIQLVQTYNQLFEENPINASGVDAKAILSARLSKSRRLENLIAQLPGEKKNGLFGNLIALSLGLTPNFKSNFDLAEDAKLQLSKDTYDDDLDNLLAQIGDQYADLFLAAKNLSDAILLSDILRVNTEITKAPLSASMIKRYDEHHQDLTLLKALVRQQLPEKYKEIFFDQSKNGYAGYIDGGASQEEFYKFIKPILEKMDGTEELLVKLNREDLLRKQRTFDNGSIPHQIHLGELHAILRRQEDFYPFLKDNREKIEKILTFRIPYYVGPLARGNSRFAWMTRKSEETITPWNFEEVVDKGASAQSFIERMTNFDKNLPNEKVLPKHSLLYEYFTVYNELTKVKYVTEGMRKPAFLSGEQKKAIVDLLFKTNRKVTVKQLKEDYFKKIECFDSVEISGVEDRFNASLGTYHDLLKIIKDKDFLDNEENEDILEDIVLTLTLFEDREMIEERLKTYAHLFDDKVMKQLKRRRYTGWGRLSRKLINGIRDKQSGKTILDFLKSDGFANRNFMQLIHDDSLTFKEDIQKAQVSGQGDSLHEHIANLAGSPAIKKGILQTVKVVDELVKVMGRHKPENIVIEMARENQTTQKGQKNSRERMKRIEEGIKELGSQILKEHPVENTQLQNEKLYLYYLQNGRDMYVDQELDINRLSDYDVDHIVPQSFLKDDSIDNKVLTRSDKARGKSDNVPSEEVVKKMKNYWRQLLNAKLITQRKFDNLTKAERGGLSELDKAGFIKRQLVETRQITKHVAQILDSRMNTKYDENDKLIREVKVITLKSKLVSDFRKDFQFYKVREINNYHHAHDAYLNAVVGTALIKKYPKLESEFVYGDYKVYDVRKMIAKSEQEIGKATAKYFFYSNIMNFFKTEITLANGEIRKRPLIETNGETGEIVWDKGRDFATVRKVLSMPQVNIVKKTEVQTGGFSKESILPKRNSDKLIARKKDWDPKKYGGFDSPTVAYSVLVVAKVEKGKSKKLKSVKELLGITIMERSSFEKNPIDFLEAKGYKEVKKDLIIKLPKYSLFELENGRKRMLASAGELQKGNELALPSKYVNFLYLASHYEKLKGSPEDNEQKQLFVEQHKHYLDEIIEQISEFSKRVILADANLDKVLSAYNKHRDKPIREQAENIIHLFTLTNLGAPAAFKYFDTTIDRKRYTSTKEVLDATLIHQSITGLYETRIDLSQLGGDGGEAAAKGGGGSSGGTLQLDDEYRLYSPLVKPDQNIQFWLEQFPQAWAETAGMGLAKQVPPQVIQLKASATPVSVRQYPLSKEAQEGIRPHVQRLIQQGILVPVQSPWNTPLLPVRKPGTNDYRPVQDLREVNKRVQDIHPTVPNPYNLLCALPPQRSWYTVLDLKDAFFCLRLHPTSQPLFAFEWRDPGTGRTGQLTWTRLPQGFKNSPTIFDEALHRDLANFRIQHPQVTLLQYVDDLLLAGATKQDCLEGTKALLLELSDLGYRASAKKAQICRREVTYLGYSLRDGQRWLTEARKKTVVQIPAPTTAKQVREFLGTAGFCRLWIPGFATLAAPLYPLTKEKGEFSWAPEHQKAFDAIKKALLSAPALALPDVTKPFTLYVDERKGVARGVLTQTLGPWRRPVAYLSKKLDPVASGWPVCLKAIAAVAILVKDADKLTLGQNITVIAPHALENIVRQPPDRWMTNARMTHYQSLLLTERVTFAPPAALNPATLLPEETDEPVTHDCHQLLIEETGVRKDLTDIPLTGEVLTWFTDGSSYVVEGKRMAGAAVVDGTRTIWASSLPEGTSAQKAELMALTQALRLAEGKSINIYTDSRYAFATAHVHGAIYKQRGLLTSAGREIKNKEEILSLLEALHLPKRLAIIHCPGHQKAKDPISRGNQMADRVAKQAAQGVNLLAGKRTADGSEFEKRTADGSEFESPKKKAKVE

SEQ ID NO: 291 - protein, 2083 aa, synthetic construct
MPAAKRVKLDGGDKKYSIGLDIGTNSVGWAVITDEYKVPSKKFKVLGNTDRHSIKKNLIGALLFDSGETAEATRLKRTARRRYTRRKNRICYLQEIFSNEMAKVDDSFFHRLEESFLVEEDKKHERHPIFGNIVDEVAYHEKYPTIYHLRKKLVDSTDKADLRLIYLALAHMIKFRGHFLIEGDLNPDNSDVDKLFIQLVQTYNQLFEENPINASGVDAKAILSARLSKSRRLENLIAQLPGEKKNGLFGNLIALSLGLTPNFKSNFDLAEDAKLQLSKDTYDDDLDNLLAQIGDQYADLFLAAKNLSDAILLSDILRVNTEITKAPLSASMIKRYDEHHQDLTLLKALVRQQLPEKYKEIFFDQSKNGYAGYIDGGASQEEFYKFIKPILEKMDGTEELLVKLNREDLLRKQRTFDNGSIPHQIHLGELHAILRRQEDFYPFLKDNREKIEKILTFRIPYYVGPLARGNSRFAWMTRKSEETITPWNFEEVVDKGASAQSFIERMTNFDKNLPNEKVLPKHSLLYEYFTVYNELTKVKYVTEGMRKPAFLSGEQKKAIVDLLFKTNRKVTVKQLKEDYFKKIECFDSVEISGVEDRFNASLGTYHDLLKIIKDKDFLDNEENEDILEDIVLTLTLFEDREMIEERLKTYAHLFDDKVMKQLKRRRYTGWGRLSRKLINGIRDKQSGKTILDFLKSDGFANRNFMQLIHDDSLTFKEDIQKAQVSGQGDSLHEHIANLAGSPAIKKGILQTVKVVDELVKVMGRHKPENIVIEMARENQTTQKGQKNSRERMKRIEEGIKELGSQILKEHPVENTQLQNEKLYLYYLQNGRDMYVDQELDINRLSDYDVDHIVPQSFLKDDSIDNKVLTRSDKARGKSDNVPSEEVVKKMKNYWRQLLNAKLITQRKFDNLTKAERGGLSELDKAGFIKRQLVETRQITKHVAQILDSRMNTKYDENDKLIREVKVITLKSKLVSDFRKDFQFYKVREINNYHHAHDAYLNAVVGTALIKKYPKLESEFVYGDYKVYDVRKMIAKSEQEIGKATAKYFFYSNIMNFFKTEITLANGEIRKRPLIETNGETGEIVWDKGRDFATVRKVLSMPQVNIVKKTEVQTGGFSKESILPKRNSDKLIARKKDWDPKKYGGFDSPTVAYSVLVVAKVEKGKSKKLKSVKELLGITIMERSSFEKNPIDFLEAKGYKEVKKDLIIKLPKYSLFELENGRKRMLASAGELQKGNELALPSKYVNFLYLASHYEKLKGSPEDNEQKQLFVEQHKHYLDEIIEQISEFSKRVILADANLDKVLSAYNKHRDKPIREQAENIIHLFTLTNLGAPAAFKYFDTTIDRKRYTSTKEVLDATLIHQSITGLYETRIDLSQLGGDGGGGGGGGTLQLDDEYRLYSPLVKPDQNIQFWLEQFPQAWAETAGMGLAKQVPPQVIQLKASATPVSVRQYPLSKEAQEGIRPHVQRLIQQGILVPVQSPWNTPLLPVRKPGTNDYRPVQDLREVNKRVQDIHPTVPNPYNLLCALPPQRSWYTVLDLKDAFFCLRLHPTSQPLFAFEWRDPGTGRTGQLTWTRLPQGFKNSPTIFDEALHRDLANFRIQHPQVTLLQYVDDLLLAGATKQDCLEGTKALLLELSDLGYRASAKKAQICRREVTYLGYSLRDGQRWLTEARKKTVVQIPAPTTAKQVREFLGTAGFCRLWIPGFATLAAPLYPLTKEKGEFSWAPEHQKAFDAIKKALLSAPALALPDVTKPFTLYVDERKGVARGVLTQTLGPWRRPVAYLSKKLDPVASGWPVCLKAIAAVAILVKDADKLTLGQNITVIAPHALENIVRQPPDRWMTNARMTHYQSLLLTERVTFAPPAALNPATLLPEETDEPVTHDCHQLLIEETGVRKDLTDIPLTGEVLTWFTDGSSYVVEGKRMAGAAVVDGTRTIWASSLPEGTSAQKAELMALTQALRLAEGKSINIYTDSRYAFATAHVHGAIYKQRGLLTSAGREIKNKEEILSLLEALHLPKRLAIIHCPGHQKAKDPISRGNQMADRVAKQAAQGVNLLAGKRTADGSEFEKRTADGSEFESPKKKAKVE

SEQ ID NO: 292 - protein, 2097 aa, synthetic construct
MPAAKRVKLDGGDKKYSIGLDIGTNSVGWAVITDEYKVPSKKFKVLGNTDRHSIKKNLIGALLFDSGETAEATRLKRTARRRYTRRKNRICYLQEIFSNEMAKVDDSFFHRLEESFLVEEDKKHERHPIFGNIVDEVAYHEKYPTIYHLRKKLVDSTDKADLRLIYLALAHMIKFRGHFLIEGDLNPDNSDVDKLFIQLVQTYNQLFEENPINASGVDAKAILSARLSKSRRLENLIAQLPGEKKNGLFGNLIALSLGLTPNFKSNFDLAEDAKLQLSKDTYDDDLDNLLAQIGDQYADLFLAAKNLSDAILLSDILRVNTEITKAPLSASMIKRYDEHHQDLTLLKALVRQQLPEKYKEIFFDQSKNGYAGYIDGGASQEEFYKFIKPILEKMDGTEELLVKLNREDLLRKQRTFDNGSIPHQIHLGELHAILRRQEDFYPFLKDNREKIEKILTFRIPYYVGPLARGNSRFAWMTRKSEETITPWNFEEVVDKGASAQSFIERMTNFDKNLPNEKVLPKHSLLYEYFTVYNELTKVKYVTEGMRKPAFLSGEQKKAIVDLLFKTNRKVTVKQLKEDYFKKIECFDSVEISGVEDRFNASLGTYHDLLKIIKDKDFLDNEENEDILEDIVLTLTLFEDREMIEERLKTYAHLFDDKVMKQLKRRRYTGWGRLSRKLINGIRDKQSGKTILDFLKSDGFANRNFMQLIHDDSLTFKEDIQKAQVSGQGDSLHEHIANLAGSPAIKKGILQTVKVVDELVKVMGRHKPENIVIEMARENQTTQKGQKNSRERMKRIEEGIKELGSQILKEHPVENTQLQNEKLYLYYLQNGRDMYVDQELDINRLSDYDVDHIVPQSFLKDDSIDNKVLTRSDKARGKSDNVPSEEVVKKMKNYWRQLLNAKLITQRKFDNLTKAERGGLSELDKAGFIKRQLVETRQITKHVAQILDSRMNTKYDENDKLIREVKVITLKSKLVSDFRKDFQFYKVREINNYHHAHDAYLNAVVGTALIKKYPKLESEFVYGDYKVYDVRKMIAKSEQEIGKATAKYFFYSNIMNFFKTEITLANGEIRKRPLIETNGETGEIVWDKGRDFATVRKVLSMPQVNIVKKTEVQTGGFSKESILPKRNSDKLIARKKDWDPKKYGGFDSPTVAYSVLVVAKVEKGKSKKLKSVKELLGITIMERSSFEKNPIDFLEAKGYKEVKKDLIIKLPKYSLFELENGRKRMLASAGELQKGNELALPSKYVNFLYLASHYEKLKGSPEDNEQKQLFVEQHKHYLDEIIEQISEFSKRVILADANLDKVLSAYNKHRDKPIREQAENIIHLFTLTNLGAPAAFKYFDTTIDRKRYTSTKEVLDATLIHQSITGLYETRIDLSQLGGDGGGGSGGSGGSGGSGGSGGSGGTLQLDDEYRLYSPLVKPDQNIQFWLEQFPQAWAETAGMGLAKQVPPQVIQLKASATPVSVRQYPLSKEAQEGIRPHVQRLIQQGILVPVQSPWNTPLLPVRKPGTNDYRPVQDLREVNKRVQDIHPTVPNPYNLLCALPPQRSWYTVLDLKDAFFCLRLHPTSQPLFAFEWRDPGTGRTGQLTWTRLPQGFKNSPTIFDEALHRDLANFRIQHPQVTLLQYVDDLLLAGATKQDCLEGTKALLLELSDLGYRASAKKAQICRREVTYLGYSLRDGQRWLTEARKKTVVQIPAPTTAKQVREFLGTAGFCRLWIPGFATLAAPLYPLTKEKGEFSWAPEHQKAFDAIKKALLSAPALALPDVTKPFTLYVDERKGVARGVLTQTLGPWRRPVAYLSKKLDPVASGWPVCLKAIAAVAILVKDADKLTLGQNITVIAPHALENIVRQPPDRWMTNARMTHYQSLLLTERVTFAPPAALNPATLLPEETDEPVTHDCHQLLIEETGVRKDLTDIPLTGEVLTWFTDGSSYVVEGKRMAGAAVVDGTRTIWASSLPEGTSAQKAELMALTQALRLAEGKSINIYTDSRYAFATAHVHGAIYKQRGLLTSAGREIKNKEEILSLLEALHLPKRLAIIHCPGHQKAKDPISRGNQMADRVAKQAAQGVNLLAGKRTADGSEFEKRTADGSEFESPKKKAKVE

SEQ ID NO: 293 - protein, 2087 aa, synthetic construct
MPAAKRVKLDGGDKKYSIGLDIGTNSVGWAVITDEYKVPSKKFKVLGNTDRHSIKKNLIGALLFDSGETAEATRLKRTARRRYTRRKNRICYLQEIFSNEMAKVDDSFFHRLEESFLVEEDKKHERHPIFGNIVDEVAYHEKYPTIYHLRKKLVDSTDKADLRLIYLALAHMIKFRGHFLIEGDLNPDNSDVDKLFIQLVQTYNQLFEENPINASGVDAKAILSARLSKSRRLENLIAQLPGEKKNGLFGNLIALSLGLTPNFKSNFDLAEDAKLQLSKDTYDDDLDNLLAQIGDQYADLFLAAKNLSDAILLSDILRVNTEITKAPLSASMIKRYDEHHQDLTLLKALVRQQLPEKYKEIFFDQSKNGYAGYIDGGASQEEFYKFIKPILEKMDGTEELLVKLNREDLLRKQRTFDNGSIPHQIHLGELHAILRRQEDFYPFLKDNREKIEKILTFRIPYYVGPLARGNSRFAWMTRKSEETITPWNFEEVVDKGASAQSFIERMTNFDKNLPNEKVLPKHSLLYEYFTVYNELTKVKYVTEGMRKPAFLSGEQKKAIVDLLFKTNRKVTVKQLKEDYFKKIECFDSVEISGVEDRFNASLGTYHDLLKIIKDKDFLDNEENEDILEDIVLTLTLFEDREMIEERLKTYAHLFDDKVMKQLKRRRYTGWGRLSRKLINGIRDKQSGKTILDFLKSDGFANRNFMQLIHDDSLTFKEDIQKAQVSGQGDSLHEHIANLAGSPAIKKGILQTVKVVDELVKVMGRHKPENIVIEMARENQTTQKGQKNSRERMKRIEEGIKELGSQILKEHPVENTQLQNEKLYLYYLQNGRDMYVDQELDINRLSDYDVDHIVPQSFLKDDSIDNKVLTRSDKARGKSDNVPSEEVVKKMKNYWRQLLNAKLITQRKFDNLTKAERGGLSELDKAGFIKRQLVETRQITKHVAQILDSRMNTKYDENDKLIREVKVITLKSKLVSDFRKDFQFYKVREINNYHHAHDAYLNAVVGTALIKKYPKLESEFVYGDYKVYDVRKMIAKSEQEIGKATAKYFFYSNIMNFFKTEITLANGEIRKRPLIETNGETGEIVWDKGRDFATVRKVLSMPQVNIVKKTEVQTGGFSKESILPKRNSDKLIARKKDWDPKKYGGFDSPTVAYSVLVVAKVEKGKSKKLKSVKELLGITIMERSSFEKNPIDFLEAKGYKEVKKDLIIKLPKYSLFELENGRKRMLASAGELQKGNELALPSKYVNFLYLASHYEKLKGSPEDNEQKQLFVEQHKHYLDEIIEQISEFSKRVILADANLDKVLSAYNKHRDKPIREQAENIIHLFTLTNLGAPAAFKYFDTTIDRKRYTSTKEVLDATLIHQSITGLYETRIDLSQLGGDGGGSSEAAAKGGTLQLDDEYRLYSPLVKPDQNIQFWLEQFPQAWAETAGMGLAKQVPPQVIQLKASATPVSVRQYPLSKEAQEGIRPHVQRLIQQGILVPVQSPWNTPLLPVRKPGTNDYRPVQDLREVNKRVQDIHPTVPNPYNLLCALPPQRSWYTVLDLKDAFFCLRLHPTSQPLFAFEWRDPGTGRTGQLTWTRLPQGFKNSPTIFDEALHRDLANFRIQHPQVTLLQYVDDLLLAGATKQDCLEGTKALLLELSDLGYRASAKKAQICRREVTYLGYSLRDGQRWLTEARKKTVVQIPAPTTAKQVREFLGTAGFCRLWIPGFATLAAPLYPLTKEKGEFSWAPEHQKAFDAIKKALLSAPALALPDVTKPFTLYVDERKGVARGVLTQTLGPWRRPVAYLSKKLDPVASGWPVCLKAIAAVAILVKDADKLTLGQNITVIAPHALENIVRQPPDRWMTNARMTHYQSLLLTERVTFAPPAALNPATLLPEETDEPVTHDCHQLLIEETGVRKDLTDIPLTGEVLTWFTDGSSYVVEGKRMAGAAVVDGTRTIWASSLPEGTSAQKAELMALTQALRLAEGKSINIYTDSRYAFATAHVHGAIYKQRGLLTSAGREIKNKEEILSLLEALHLPKRLAIIHCPGHQKAKDPISRGNQMADRVAKQAAQGVNLLAGKRTADGSEFEKRTADGSEFESPKKKAKVE

SEQ ID NO: 294 - protein, 2088 aa, synthetic construct
MPAAKRVKLDGGDKKYSIGLDIGTNSVGWAVITDEYKVPSKKFKVLGNTDRHSIKKNLIGALLFDSGETAEATRLKRTARRRYTRRKNRICYLQEIFSNEMAKVDDSFFHRLEESFLVEEDKKHERHPIFGNIVDEVAYHEKYPTIYHLRKKLVDSTDKADLRLIYLALAHMIKFRGHFLIEGDLNPDNSDVDKLFIQLVQTYNQLFEENPINASGVDAKAILSARLSKSRRLENLIAQLPGEKKNGLFGNLIALSLGLTPNFKSNFDLAEDAKLQLSKDTYDDDLDNLLAQIGDQYADLFLAAKNLSDAILLSDILRVNTEITKAPLSASMIKRYDEHHQDLTLLKALVRQQLPEKYKEIFFDQSKNGYAGYIDGGASQEEFYKFIKPILEKMDGTEELLVKLNREDLLRKQRTFDNGSIPHQIHLGELHAILRRQEDFYPFLKDNREKIEKILTFRIPYYVGPLARGNSRFAWMTRKSEETITPWNFEEVVDKGASAQSFIERMTNFDKNLPNEKVLPKHSLLYEYFTVYNELTKVKYVTEGMRKPAFLSGEQKKAIVDLLFKTNRKVTVKQLKEDYFKKIECFDSVEISGVEDRFNASLGTYHDLLKIIKDKDFLDNEENEDILEDIVLTLTLFEDREMIEERLKTYAHLFDDKVMKQLKRRRYTGWGRLSRKLINGIRDKQSGKTILDFLKSDGFANRNFMQLIHDDSLTFKEDIQKAQVSGQGDSLHEHIANLAGSPAIKKGILQTVKVVDELVKVMGRHKPENIVIEMARENQTTQKGQKNSRERMKRIEEGIKELGSQILKEHPVENTQLQNEKLYLYYLQNGRDMYVDQELDINRLSDYDVDHIVPQSFLKDDSIDNKVLTRSDKARGKSDNVPSEEVVKKMKNYWRQLLNAKLITQRKFDNLTKAERGGLSELDKAGFIKRQLVETRQITKHVAQILDSRMNTKYDENDKLIREVKVITLKSKLVSDFRKDFQFYKVREINNYHHAHDAYLNAVVGTALIKKYPKLESEFVYGDYKVYDVRKMIAKSEQEIGKATAKYFFYSNIMNFFKTEITLANGEIRKRPLIETNGETGEIVWDKGRDFATVRKVLSMPQVNIVKKTEVQTGGFSKESILPKRNSDKLIARKKDWDPKKYGGFDSPTVAYSVLVVAKVEKGKSKKLKSVKELLGITIMERSSFEKNPIDFLEAKGYKEVKKDLIIKLPKYSLFELENGRKRMLASAGELQKGNELALPSKYVNFLYLASHYEKLKGSPEDNEQKQLFVEQHKHYLDEIIEQISEFSKRVILADANLDKVLSAYNKHRDKPIREQAENIIHLFTLTNLGAPAAFKYFDTTIDRKRYTSTKEVLDATLIHQSITGLYETRIDLSQLGGDGGGGSGGSGGSGGTLQLDDEYRLYSPLVKPDQNIQFWLEQFPQAWAETAGMGLAKQVPPQVIQLKASATPVSVRQYPLSKEAQEGIRPHVQRLIQQGILVPVQSPWNTPLLPVRKPGTNDYRPVQDLREVNKRVQDIHPTVPNPYNLLCALPPQRSWYTVLDLKDAFFCLRLHPTSQPLFAFEWRDPGTGRTGQLTWTRLPQGFKNSPTIFDEALHRDLANFRIQHPQVTLLQYVDDLLLAGATKQDCLEGTKALLLELSDLGYRASAKKAQICRREVTYLGYSLRDGQRWLTEARKKTVVQIPAPTTAKQVREFLGTAGFCRLWIPGFATLAAPLYPLTKEKGEFSWAPEHQKAFDAIKKALLSAPALALPDVTKPFTLYVDERKGVARGVLTQTLGPWRRPVAYLSKKLDPVASGWPVCLKAIAAVAILVKDADKLTLGQNITVIAPHALENIVRQPPDRWMTNARMTHYQSLLLTERVTFAPPAALNPATLLPEETDEPVTHDCHQLLIEETGVRKDLTDIPLTGEVLTWFTDGSSYVVEGKRMAGAAVVDGTRTIWASSLPEGTSAQKAELMALTQALRLAEGKSINIYTDSRYAFATAHVHGAIYKQRGLLTSAGREIKNKEEILSLLEALHLPKRLAIIHCPGHQKAKDPISRGNQMADRVAKQAAQGVNLLAGKRTADGSEFEKRTADGSEFESPKKKAKVE

SEQ ID NO: 295 - protein, 2088 aa, synthetic construct
MPAAKRVKLDGGDKKYSIGLDIGTNSVGWAVITDEYKVPSKKFKVLGNTDRHSIKKNLIGALLFDSGETAEATRLKRTARRRYTRRKNRICYLQEIFSNEMAKVDDSFFHRLEESFLVEEDKKHERHPIFGNIVDEVAYHEKYPTIYHLRKKLVDSTDKADLRLIYLALAHMIKFRGHFLIEGDLNPDNSDVDKLFIQLVQTYNQLFEENPINASGVDAKAILSARLSKSRRLENLIAQLPGEKKNGLFGNLIALSLGLTPNFKSNFDLAEDAKLQLSKDTYDDDLDNLLAQIGDQYADLFLAAKNLSDAILLSDILRVNTEITKAPLSASMIKRYDEHHQDLTLLKALVRQQLPEKYKEIFFDQSKNGYAGYIDGGASQEEFYKFIKPILEKMDGTEELLVKLNREDLLRKQRTFDNGSIPHQIHLGELHAILRRQEDFYPFLKDNREKIEKILTFRIPYYVGPLARGNSRFAWMTRKSEETITPWNFEEVVDKGASAQSFIERMTNFDKNLPNEKVLPKHSLLYEYFTVYNELTKVKYVTEGMRKPAFLSGEQKKAIVDLLFKTNRKVTVKQLKEDYFKKIECFDSVEISGVEDRFNASLGTYHDLLKIIKDKDFLDNEENEDILEDIVLTLTLFEDREMIEERLKTYAHLFDDKVMKQLKRRRYTGWGRLSRKLINGIRDKQSGKTILDFLKSDGFANRNFMQLIHDDSLTFKEDIQKAQVSGQGDSLHEHIANLAGSPAIKKGILQTVKVVDELVKVMGRHKPENIVIEMARENQTTQKGQKNSRERMKRIEEGIKELGSQILKEHPVENTQLQNEKLYLYYLQNGRDMYVDQELDINRLSDYDVDHIVPQSFLKDDSIDNKVLTRSDKARGKSDNVPSEEVVKKMKNYWRQLLNAKLITQRKFDNLTKAERGGLSELDKAGFIKRQLVETRQITKHVAQILDSRMNTKYDENDKLIREVKVITLKSKLVSDFRKDFQFYKVREINNYHHAHDAYLNAVVGTALIKKYPKLESEFVYGDYKVYDVRKMIAKSEQEIGKATAKYFFYSNIMNFFKTEITLANGEIRKRPLIETNGETGEIVWDKGRDFATVRKVLSMPQVNIVKKTEVQTGGFSKESILPKRNSDKLIARKKDWDPKKYGGFDSPTVAYSVLVVAKVEKGKSKKLKSVKELLGITIMERSSFEKNPIDFLEAKGYKEVKKDLIIKLPKYSLFELENGRKRMLASAGELQKGNELALPSKYVNFLYLASHYEKLKGSPEDNEQKQLFVEQHKHYLDEIIEQISEFSKRVILADANLDKVLSAYNKHRDKPIREQAENIIHLFTLTNLGAPAAFKYFDTTIDRKRYTSTKEVLDATLIHQSITGLYETRIDLSQLGGDGGGSSPAPGGSGGTLQLDDEYRLYSPLVKPDQNIQFWLEQFPQAWAETAGMGLAKQVPPQVIQLKASATPVSVRQYPLSKEAQEGIRPHVQRLIQQGILVPVQSPWNTPLLPVRKPGTNDYRPVQDLREVNKRVQDIHPTVPNPYNLLCALPPQRSWYTVLDLKDAFFCLRLHPTSQPLFAFEWRDPGTGRTGQLTWTRLPQGFKNSPTIFDEALHRDLANFRIQHPQVTLLQYVDDLLLAGATKQDCLEGTKALLLELSDLGYRASAKKAQICRREVTYLGYSLRDGQRWLTEARKKTVVQIPAPTTAKQVREFLGTAGFCRLWIPGFATLAAPLYPLTKEKGEFSWAPEHQKAFDAIKKALLSAPALALPDVTKPFTLYVDERKGVARGVLTQTLGPWRRPVAYLSKKLDPVASGWPVCLKAIAAVAILVKDADKLTLGQNITVIAPHALENIVRQPPDRWMTNARMTHYQSLLLTERVTFAPPAALNPATLLPEETDEPVTHDCHQLLIEETGVRKDLTDIPLTGEVLTWFTDGSSYVVEGKRMAGAAVVDGTRTIWASSLPEGTSAQKAELMALTQALRLAEGKSINIYTDSRYAFATAHVHGAIYKQRGLLTSAGREIKNKEEILSLLEALHLPKRLAIIHCPGHQKAKDPISRGNQMADRVAKQAAQGVNLLAGKRTADGSEFEKRTADGSEFESPKKKAKVE

SEQ ID NO: 296 - protein, 2090 aa, synthetic construct
MPAAKRVKLDGGDKKYSIGLDIGTNSVGWAVITDEYKVPSKKFKVLGNTDRHSIKKNLIGALLFDSGETAEATRLKRTARRRYTRRKNRICYLQEIFSNEMAKVDDSFFHRLEESFLVEEDKKHERHPIFGNIVDEVAYHEKYPTIYHLRKKLVDSTDKADLRLIYLALAHMIKFRGHFLIEGDLNPDNSDVDKLFIQLVQTYNQLFEENPINASGVDAKAILSARLSKSRRLENLIAQLPGEKKNGLFGNLIALSLGLTPNFKSNFDLAEDAKLQLSKDTYDDDLDNLLAQIGDQYADLFLAAKNLSDAILLSDILRVNTEITKAPLSASMIKRYDEHHQDLTLLKALVRQQLPEKYKEIFFDQSKNGYAGYIDGGASQEEFYKFIKPILEKMDGTEELLVKLNREDLLRKQRTFDNGSIPHQIHLGELHAILRRQEDFYPFLKDNREKIEKILTFRIPYYVGPLARGNSRFAWMTRKSEETITPWNFEEVVDKGASAQSFIERMTNFDKNLPNEKVLPKHSLLYEYFTVYNELTKVKYVTEGMRKPAFLSGEQKKAIVDLLFKTNRKVTVKQLKEDYFKKIECFDSVEISGVEDRFNASLGTYHDLLKIIKDKDFLDNEENEDILEDIVLTLTLFEDREMIEERLKTYAHLFDDKVMKQLKRRRYTGWGRLSRKLINGIRDKQSGKTILDFLKSDGFANRNFMQLIHDDSLTFKEDIQKAQVSGQGDSLHEHIANLAGSPAIKKGILQTVKVVDELVKVMGRHKPENIVIEMARENQTTQKGQKNSRERMKRIEEGIKELGSQILKEHPVENTQLQNEKLYLYYLQNGRDMYVDQELDINRLSDYDVDHIVPQSFLKDDSIDNKVLTRSDKARGKSDNVPSEEVVKKMKNYWRQLLNAKLITQRKFDNLTKAERGGLSELDKAGFIKRQLVETRQITKHVAQILDSRMNTKYDENDKLIREVKVITLKSKLVSDFRKDFQFYKVREINNYHHAHDAYLNAVVGTALIKKYPKLESEFVYGDYKVYDVRKMIAKSEQEIGKATAKYFFYSNIMNFFKTEITLANGEIRKRPLIETNGETGEIVWDKGRDFATVRKVLSMPQVNIVKKTEVQTGGFSKESILPKRNSDKLIARKKDWDPKKYGGFDSPTVAYSVLVVAKVEKGKSKKLKSVKELLGITIMERSSFEKNPIDFLEAKGYKEVKKDLIIKLPKYSLFELENGRKRMLASAGELQKGNELALPSKYVNFLYLASHYEKLKGSPEDNEQKQLFVEQHKHYLDEIIEQISEFSKRVILADANLDKVLSAYNKHRDKPIREQAENIIHLFTLTNLGAPAAFKYFDTTIDRKRYTSTKEVLDATLIHQSITGLYETRIDLSQLGGDGGEAAAKGSSGGGGGTLQLDDEYRLYSPLVKPDQNIQFWLEQFPQAWAETAGMGLAKQVPPQVIQLKASATPVSVRQYPLSKEAQEGIRPHVQRLIQQGILVPVQSPWNTPLLPVRKPGTNDYRPVQDLREVNKRVQDIHPTVPNPYNLLCALPPQRSWYTVLDLKDAFFCLRLHPTSQPLFAFEWRDPGTGRTGQLTWTRLPQGFKNSPTIFDEALHRDLANFRIQHPQVTLLQYVDDLLLAGATKQDCLEGTKALLLELSDLGYRASAKKAQICRREVTYLGYSLRDGQRWLTEARKKTVVQIPAPTTAKQVREFLGTAGFCRLWIPGFATLAAPLYPLTKEKGEFSWAPEHQKAFDAIKKALLSAPALALPDVTKPFTLYVDERKGVARGVLTQTLGPWRRPVAYLSKKLDPVASGWPVCLKAIAAVAILVKDADKLTLGQNITVIAPHALENIVRQPPDRWMTNARMTHYQSLLLTERVTFAPPAALNPATLLPEETDEPVTHDCHQLLIEETGVRKDLTDIPLTGEVLTWFTDGSSYVVEGKRMAGAAVVDGTRTIWASSLPEGTSAQKAELMALTQALRLAEGKSINIYTDSRYAFATAHVHGAIYKQRGLLTSAGREIKNKEEILSLLEALHLPKRLAIIHCPGHQKAKDPISRGNQMADRVAKQAAQGVNLLAGKRTADGSEFEKRTADGSEFESPKKKAKVE

SEQ ID NO: 297 - protein, 2087 aa, synthetic construct
MPAAKRVKLDGGDKKYSIGLDIGTNSVGWAVITDEYKVPSKKFKVLGNTDRHSIKKNLIGALLFDSGETAEATRLKRTARRRYTRRKNRICYLQEIFSNEMAKVDDSFFHRLEESFLVEEDKKHERHPIFGNIVDEVAYHEKYPTIYHLRKKLVDSTDKADLRLIYLALAHMIKFRGHFLIEGDLNPDNSDVDKLFIQLVQTYNQLFEENPINASGVDAKAILSARLSKSRRLENLIAQLPGEKKNGLFGNLIALSLGLTPNFKSNFDLAEDAKLQLSKDTYDDDLDNLLAQIGDQYADLFLAAKNLSDAILLSDILRVNTEITKAPLSASMIKRYDEHHQDLTLLKALVRQQLPEKYKEIFFDQSKNGYAGYIDGGASQEEFYKFIKPILEKMDGTEELLVKLNREDLLRKQRTFDNGSIPHQIHLGELHAILRRQEDFYPFLKDNREKIEKILTFRIPYYVGPLARGNSRFAWMTRKSEETITPWNFEEVVDKGASAQSFIERMTNFDKNLPNEKVLPKHSLLYEYFTVYNELTKVKYVTEGMRKPAFLSGEQKKAIVDLLFKTNRKVTVKQLKEDYFKKIECFDSVEISGVEDRFNASLGTYHDLLKIIKDKDFLDNEENEDILEDIVLTLTLFEDREMIEERLKTYAHLFDDKVMKQLKRRRYTGWGRLSRKLINGIRDKQSGKTILDFLKSDGFANRNFMQLIHDDSLTFKEDIQKAQVSGQGDSLHEHIANLAGSPAIKKGILQTVKVVDELVKVMGRHKPENIVIEMARENQTTQKGQKNSRERMKRIEEGIKELGSQILKEHPVENTQLQNEKLYLYYLQNGRDMYVDQELDINRLSDYDVDHIVPQSFLKDDSIDNKVLTRSDKARGKSDNVPSEEVVKKMKNYWRQLLNAKLITQRKFDNLTKAERGGLSELDKAGFIKRQLVETRQITKHVAQILDSRMNTKYDENDKLIREVKVITLKSKLVSDFRKDFQFYKVREINNYHHAHDAYLNAVVGTALIKKYPKLESEFVYGDYKVYDVRKMIAKSEQEIGKATAKYFFYSNIMNFFKTEITLANGEIRKRPLIETNGETGEIVWDKGRDFATVRKVLSMPQVNIVKKTEVQTGGFSKESILPKRNSDKLIARKKDWDPKKYGGFDSPTVAYSVLVVAKVEKGKSKKLKSVKELLGITIMERSSFEKNPIDFLEAKGYKEVKKDLIIKLPKYSLFELENGRKRMLASAGELQKGNELALPSKYVNFLYLASHYEKLKGSPEDNEQKQLFVEQHKHYLDEIIEQISEFSKRVILADANLDKVLSAYNKHRDKPIREQAENIIHLFTLTNLGAPAAFKYFDTTIDRKRYTSTKEVLDATLIHQSITGLYETRIDLSQLGGDGGEAAAKPAPGGTLQLDDEYRLYSPLVKPDQNIQFWLEQFPQAWAETAGMGLAKQVPPQVIQLKASATPVSVRQYPLSKEAQEGIRPHVQRLIQQGILVPVQSPWNTPLLPVRKPGTNDYRPVQDLREVNKRVQDIHPTVPNPYNLLCALPPQRSWYTVLDLKDAFFCLRLHPTSQPLFAFEWRDPGTGRTGQLTWTRLPQGFKNSPTIFDEALHRDLANFRIQHPQVTLLQYVDDLLLAGATKQDCLEGTKALLLELSDLGYRASAKKAQICRREVTYLGYSLRDGQRWLTEARKKTVVQIPAPTTAKQVREFLGTAGFCRLWIPGFATLAAPLYPLTKEKGEFSWAPEHQKAFDAIKKALLSAPALALPDVTKPFTLYVDERKGVARGVLTQTLGPWRRPVAYLSKKLDPVASGWPVCLKAIAAVAILVKDADKLTLGQNITVIAPHALENIVRQPPDRWMTNARMTHYQSLLLTERVTFAPPAALNPATLLPEETDEPVTHDCHQLLIEETGVRKDLTDIPLTGEVLTWFTDGSSYVVEGKRMAGAAVVDGTRTIWASSLPEGTSAQKAELMALTQALRLAEGKSINIYTDSRYAFATAHVHGAIYKQRGLLTSAGREIKNKEEILSLLEALHLPKRLAIIHCPGHQKAKDPISRGNQMADRVAKQAAQGVNLLAGKRTADGSEFEKRTADGSEFESPKKKAKVE

SEQ ID NO: 298 - protein, 2094 aa, synthetic construct
MPAAKRVKLDGGDKKYSIGLDIGTNSVGWAVITDEYKVPSKKFKVLGNTDRHSIKKNLIGALLFDSGETAEATRLKRTARRRYTRRKNRICYLQEIFSNEMAKVDDSFFHRLEESFLVEEDKKHERHPIFGNIVDEVAYHEKYPTIYHLRKKLVDSTDKADLRLIYLALAHMIKFRGHFLIEGDLNPDNSDVDKLFIQLVQTYNQLFEENPINASGVDAKAILSARLSKSRRLENLIAQLPGEKKNGLFGNLIALSLGLTPNFKSNFDLAEDAKLQLSKDTYDDDLDNLLAQIGDQYADLFLAAKNLSDAILLSDILRVNTEITKAPLSASMIKRYDEHHQDLTLLKALVRQQLPEKYKEIFFDQSKNGYAGYIDGGASQEEFYKFIKPILEKMDGTEELLVKLNREDLLRKQRTFDNGSIPHQIHLGELHAILRRQEDFYPFLKDNREKIEKILTFRIPYYVGPLARGNSRFAWMTRKSEETITPWNFEEVVDKGASAQSFIERMTNFDKNLPNEKVLPKHSLLYEYFTVYNELTKVKYVTEGMRKPAFLSGEQKKAIVDLLFKTNRKVTVKQLKEDYFKKIECFDSVEISGVEDRFNASLGTYHDLLKIIKDKDFLDNEENEDILEDIVLTLTLFEDREMIEERLKTYAHLFDDKVMKQLKRRRYTGWGRLSRKLINGIRDKQSGKTILDFLKSDGFANRNFMQLIHDDSLTFKEDIQKAQVSGQGDSLHEHIANLAGSPAIKKGILQTVKVVDELVKVMGRHKPENIVIEMARENQTTQKGQKNSRERMKRIEEGIKELGSQILKEHPVENTQLQNEKLYLYYLQNGRDMYVDQELDINRLSDYDVDHIVPQSFLKDDSIDNKVLTRSDKARGKSDNVPSEEVVKKMKNYWRQLLNAKLITQRKFDNLTKAERGGLSELDKAGFIKRQLVETRQITKHVAQILDSRMNTKYDENDKLIREVKVITLKSKLVSDFRKDFQFYKVREINNYHHAHDAYLNAVVGTALIKKYPKLESEFVYGDYKVYDVRKMIAKSEQEIGKATAKYFFYSNIMNFFKTEITLANGEIRKRPLIETNGETGEIVWDKGRDFATVRKVLSMPQVNIVKKTEVQTGGFSKESILPKRNSDKLIARKKDWDPKKYGGFDSPTVAYSVLVVAKVEKGKSKKLKSVKELLGITIMERSSFEKNPIDFLEAKGYKEVKKDLIIKLPKYSLFELENGRKRMLASAGELQKGNELALPSKYVNFLYLASHYEKLKGSPEDNEQKQLFVEQHKHYLDEIIEQISEFSKRVILADANLDKVLSAYNKHRDKPIREQAENIIHLFTLTNLGAPAAFKYFDTTIDRKRYTSTKEVLDATLIHQSITGLYETRIDLSQLGGDGGEAAAKEAAAKEAAAKGGTLQLDDEYRLYSPLVKPDQNIQFWLEQFPQAWAETAGMGLAKQVPPQVIQLKASATPVSVRQYPLSKEAQEGIRPHVQRLIQQGILVPVQSPWNTPLLPVRKPGTNDYRPVQDLREVNKRVQDIHPTVPNPYNLLCALPPQRSWYTVLDLKDAFFCLRLHPTSQPLFAFEWRDPGTGRTGQLTWTRLPQGFKNSPTIFNEALHRDLANFRIQHPQVTLLQYVDDLLLAGATKQDCLEGTKALLLELSDLGYRASAKKAQICRREVTYLGYSLRDGQRWLTEARKKTVVQIPAPTTAKQVREFLGTAGFCRLWIPGFATLAAPLYPLTKPKGEFSWAPEHQKAFDAIKKALLSAPALALPDVTKPFTLYVDERKGVARGVLTQTLGPWRRPVAYLSKKLDPVASGWPVCLKAIAAVAILVKDADKLTLGQNITVIAPHALENIVRQPPDRWMTNARMTHYQSLLLTERVTFAPPAALNPATLLPEETDEPVTHDCHQLLIEETGVRKDLTDIPLTGEVLTWFTDGSSYVVEGKRMAGAAVVDGTRTIWASSLPEGTSAQKAELMALTQALRLAEGKSINIYTDSRYAFATAHVHGAIYKQRGWLTSAGREIKNKEEILSLLEALHLPKRLAIIHCPGHQKAKDPISRGNQMADRVAKQAAQGVNLLAGKRTADGSEFEKRTADGSEFESPKKKAKVE

SEQ ID NO: 299 - protein, 2090 aa, synthetic construct
MPAAKRVKLDGGDKKYSIGLDIGTNSVGWAVITDEYKVPSKKFKVLGNTDRHSIKKNLIGALLFDSGETAEATRLKRTARRRYTRRKNRICYLQEIFSNEMAKVDDSFFHRLEESFLVEEDKKHERHPIFGNIVDEVAYHEKYPTIYHLRKKLVDSTDKADLRLIYLALAHMIKFRGHFLIEGDLNPDNSDVDKLFIQLVQTYNQLFEENPINASGVDAKAILSARLSKSRRLENLIAQLPGEKKNGLFGNLIALSLGLTPNFKSNFDLAEDAKLQLSKDTYDDDLDNLLAQIGDQYADLFLAAKNLSDAILLSDILRVNTEITKAPLSASMIKRYDEHHQDLTLLKALVRQQLPEKYKEIFFDQSKNGYAGYIDGGASQEEFYKFIKPILEKMDGTEELLVKLNREDLLRKQRTFDNGSIPHQIHLGELHAILRRQEDFYPFLKDNREKIEKILTFRIPYYVGPLARGNSRFAWMTRKSEETITPWNFEEVVDKGASAQSFIERMTNFDKNLPNEKVLPKHSLLYEYFTVYNELTKVKYVTEGMRKPAFLSGEQKKAIVDLLFKTNRKVTVKQLKEDYFKKIECFDSVEISGVEDRFNASLGTYHDLLKIIKDKDFLDNEENEDILEDIVLTLTLFEDREMIEERLKTYAHLFDDKVMKQLKRRRYTGWGRLSRKLINGIRDKQSGKTILDFLKSDGFANRNFMQLIHDDSLTFKEDIQKAQVSGQGDSLHEHIANLAGSPAIKKGILQTVKVVDELVKVMGRHKPENIVIEMARENQTTQKGQKNSRERMKRIEEGIKELGSQILKEHPVENTQLQNEKLYLYYLQNGRDMYVDQELDINRLSDYDVDHIVPQSFLKDDSIDNKVLTRSDKARGKSDNVPSEEVVKKMKNYWRQLLNAKLITQRKFDNLTKAERGGLSELDKAGFIKRQLVETRQITKHVAQILDSRMNTKYDENDKLIREVKVITLKSKLVSDFRKDFQFYKVREINNYHHAHDAYLNAVVGTALIKKYPKLESEFVYGDYKVYDVRKMIAKSEQEIGKATAKYFFYSNIMNFFKTEITLANGEIRKRPLIETNGETGEIVWDKGRDFATVRKVLSMPQVNIVKKTEVQTGGFSKESILPKRNSDKLIARKKDWDPKKYGGFDSPTVAYSVLVVAKVEKGKSKKLKSVKELLGITIMERSSFEKNPIDFLEAKGYKEVKKDLIIKLPKYSLFELENGRKRMLASAGELQKGNELALPSKYVNFLYLASHYEKLKGSPEDNEQKQLFVEQHKHYLDEIIEQISEFSKRVILADANLDKVLSAYNKHRDKPIREQAENIIHLFTLTNLGAPAAFKYFDTTIDRKRYTSTKEVLDATLIHQSITGLYETRIDLSQLGGDGGEAAAKGGSGGGGGTLQLDDEYRLYSPLVKPDQNIQFWLEQFPQAWAETAGMGLAKQVPPQVIQLKASATPVSVRQYPLSKEAQEGIRPHVQRLIQQGILVPVQSPWNTPLLPVRKPGTNDYRPVQDLREVNKRVQDIHPTVPNPYNLLCALPPQRSWYTVLDLKDAFFCLRLHPTSQPLFAFEWRDPGTGRTGQLTWTRLPQGFKNSPTIFNEALHRDLANFRIQHPQVTLLQYVDDLLLAGATKQDCLEGTKALLLELSDLGYRASAKKAQICRREVTYLGYSLRDGQRWLTEARKKTVVQIPAPTTAKQVREFLGTAGFCRLWIPGFATLAAPLYPLTKPKGEFSWAPEHQKAFDAIKKALLSAPALALPDVTKPFTLYVDERKGVARGVLTQTLGPWRRPVAYLSKKLDPVASGWPVCLKAIAAVAILVKDADKLTLGQNITVIAPHALENIVRQPPDRWMTNARMTHYQSLLLTERVTFAPPAALNPATLLPEETDEPVTHDCHQLLIEETGVRKDLTDIPLTGEVLTWFTDGSSYVVEGKRMAGAAVVDGTRTIWASSLPEGTSAQKAELMALTQALRLAEGKSINIYTDSRYAFATAHVHGAIYKQRGWLTSAGREIKNKEEILSLLEALHLPKRLAIIHCPGHQKAKDPISRGNQMADRVAKQAAQGVNLLAGKRTADGSEFEKRTADGSEFESPKKKAKVE

SEQ ID NO: 300 - protein, 2125 aa, synthetic construct; identical to SEQ ID NO: 156

SEQ ID NO: 301 - protein, 2090 aa, synthetic construct
MPAAKRVKLDGGDKKYSIGLDIGTNSVGWAVITDEYKVPSKKFKVLGNTDRHSIKKNLIGALLFDSGETAEATRLKRTARRRYTRRKNRICYLQEIFSNEMAKVDDSFFHRLEESFLVEEDKKHERHPIFGNIVDEVAYHEKYPTIYHLRKKLVDSTDKADLRLIYLALAHMIKFRGHFLIEGDLNPDNSDVDKLFIQLVQTYNQLFEENPINASGVDAKAILSARLSKSRRLENLIAQLPGEKKNGLFGNLIALSLGLTPNFKSNFDLAEDAKLQLSKDTYDDDLDNLLAQIGDQYADLFLAAKNLSDAILLSDILRVNTEITKAPLSASMIKRYDEHHQDLTLLKALVRQQLPEKYKEIFFDQSKNGYAGYIDGGASQEEFYKFIKPILEKMDGTEELLVKLNREDLLRKQRTFDNGSIPHQIHLGELHAILRRQEDFYPFLKDNREKIEKILTFRIPYYVGPLARGNSRFAWMTRKSEETITPWNFEEVVDKGASAQSFIERMTNFDKNLPNEKVLPKHSLLYEYFTVYNELTKVKYVTEGMRKPAFLSGEQKKAIVDLLFKTNRKVTVKQLKEDYFKKIECFDSVEISGVEDRFNASLGTYHDLLKIIKDKDFLDNEENEDILEDIVLTLTLFEDREMIEERLKTYAHLFDDKVMKQLKRRRYTGWGRLSRKLINGIRDKQSGKTILDFLKSDGFANRNFMQLIHDDSLTFKEDIQKAQVSGQGDSLHEHIANLAGSPAIKKGILQTVKVVDELVKVMGRHKPENIVIEMARENQTTQKGQKNSRERMKRIEEGIKELGSQILKEHPVENTQLQNEKLYLYYLQNGRDMYVDQELDINRLSDYDVDHIVPQSFLKDDSIDNKVLTRSDKARGKSDNVPSEEVVKKMKNYWRQLLNAKLITQRKFDNLTKAERGGLSELDKAGFIKRQLVETRQITKHVAQILDSRMNTKYDENDKLIREVKVITLKSKLVSDFRKDFQFYKVREINNYHHAHDAYLNAVVGTALIKKYPKLESEFVYGDYKVYDVRKMIAKSEQEIGKATAKYFFYSNIMNFFKTEITLANGEIRKRPLIETNGETGEIVWDKGRDFATVRKVLSMPQVNIVKKTEVQTGGFSKESILPKRNSDKLIARKKDWDPKKYGGFDSPTVAYSVLVVAKVEKGKSKKLKSVKELLGITIMERSSFEKNPIDFLEAKGYKEVKKDLIIKLPKYSLFELENGRKRMLASAGELQKGNELALPSKYVNFLYLASHYEKLKGSPEDNEQKQLFVEQHKHYLDEIIEQISEFSKRVILADANLDKVLSAYNKHRDKPIREQAENIIHLFTLTNLGAPAAFKYFDTTIDRKRYTSTKEVLDATLIHQSITGLYETRIDLSQLGGDGGGGGEAAAKGSSGGTLQLDDEYRLYSPLVKPDQNIQFWLEQFPQAWAETAGMGLAKQVPPQVIQLKASATPVSVRQYPLSKEAQEGIRPHVQRLIQQGILVPVQSPWNTPLLPVRKPGTNDYRPVQDLREVNKRVQDIHPTVPNPYNLLCALPPQRSWYTVLDLKDAFFCLRLHPTSQPLFAFEWRDPGTGRTGQLTWTRLPQGFKNSPTIFNEALHRDLANFRIQHPQVTLLQYVDDLLLAGATKQDCLEGTKALLLELSDLGYRASAKKAQICRREVTYLGYSLRDGQRWLTEARKKTVVQIPAPTTAKQVREFLGTAGFCRLWIPGFATLAAPLYPLTKPKGEFSWAPEHQKAFDAIKKALLSAPALALPDVTKPFTLYVDERKGVARGVLTQTLGPWRRPVAYLSKKLDPVASGWPVCLKAIAAVAILVKDADKLTLGQNITVIAPHALENIVRQPPDRWMTNARMTHYQSLLLTERVTFAPPAALNPATLLPEETDEPVTHDCHQLLIEETGVRKDLTDIPLTGEVLTWFTDGSSYVVEGKRMAGAAVVDGTRTIWASSLPEGTSAQKAELMALTQALRLAEGKSINIYTDSRYAFATAHVHGAIYKQRGWLTSAGREIKNKEEILSLLEALHLPKRLAIIHCPGHQKAKDPISRGNQMADRVAKQAAQGVNLLAGKRTADGSEFEKRTADGSEFESPKKKAKVE

SEQ ID NO: 302 - protein, 2090 aa, synthetic construct; identical to SEQ ID NO: 164

SEQ ID NO: 303 - protein, 2112 aa, synthetic construct; identical to SEQ ID NO: 140

SEQ ID NO: 304 - protein, 2090 aa, synthetic construct
MPAAKRVKLDGGDKKYSIGLDIGTNSVGWAVITDEYKVPSKKFKVLGNTDRHSIKKNLIGALLFDSGETAEATRLKRTARRRYTRRKNRICYLQEIFSNEMAKVDDSFFHRLEESFLVEEDKKHERHPIFGNIVDEVAYHEKYPTIYHLRKKLVDSTDKADLRLIYLALAHMIKFRGHFLIEGDLNPDNSDVDKLFIQLVQTYNQLFEENPINASGVDAKAILSARLSKSRRLENLIAQLPGEKKNGLFGNLIALSLGLTPNFKSNFDLAEDAKLQLSKDTYDDDLDNLLAQIGDQYADLFLAAKNLSDAILLSDILRVNTEITKAPLSASMIKRYDEHHQDLTLLKALVRQQLPEKYKEIFFDQSKNGYAGYIDGGASQEEFYKFIKPILEKMDGTEELLVKLNREDLLRKQRTFDNGSIPHQIHLGELHAILRRQEDFYPFLKDNREKIEKILTFRIPYYVGPLARGNSRFAWMTRKSEETITPWNFEEVVDKGASAQSFIERMTNFDKNLPNEKVLPKHSLLYEYFTVYNELTKVKYVTEGMRKPAFLSGEQKKAIVDLLFKTNRKVTVKQLKEDYFKKIECFDSVEISGVEDRFNASLGTYHDLLKIIKDKDFLDNEENEDILEDIVLTLTLFEDREMIEERLKTYAHLFDDKVMKQLKRRRYTGWGRLSRKLINGIRDKQSGKTILDFLKSDGFANRNFMQLIHDDSLTFKEDIQKAQVSGQGDSLHEHIANLAGSPAIKKGILQTVKVVDELVKVMGRHKPENIVIEMARENQTTQKGQKNSRERMKRIEEGIKELGSQILKEHPVENTQLQNEKLYLYYLQNGRDMYVDQELDINRLSDYDVDHIVPQSFLKDDSIDNKVLTRSDKARGKSDNVPSEEVVKKMKNYWRQLLNAKLITQRKFDNLTKAERGGLSELDKAGFIKRQLVETRQITKHVAQILDSRMNTKYDENDKLIREVKVITLKSKLVSDFRKDFQFYKVREINNYHHAHDAYLNAVVGTALIKKYPKLESEFVYGDYKVYDVRKMIAKSEQEIGKATAKYFFYSNIMNFFKTEITLANGEIRKRPLIETNGETGEIVWDKGRDFATVRKVLSMPQVNIVKKTEVQTGGFSKESILPKRNSDKLIARKKDWDPKKYGGFDSPTVAYSVLVVAKVEKGKSKKLKSVKELLGITIMERSSFEKNPIDFLEAKGYKEVKKDLIIKLPKYSLFELENGRKRMLASAGELQKGNELALPSKYVNFLYLASHYEKLKGSPEDNEQKQLFVEQHKHYLDEIIEQISEFSKRVILADANLDKVLSAYNKHRDKPIREQAENIIHLFTLTNLGAPAAFKYFDTTIDRKRYTSTKEVLDATLIHQSITGLYETRIDLSQLGGDGGEAAAKPAPGSSGGTLQLDDEYRLYSPLVKPDQNIQFWLEQFPQAWAETAGMGLAKQVPPQVIQLKASATPVSVRQYPLSKEAQEGIRPHVQRLIQQGILVPVQSPWNTPLLPVRKPGTNDYRPVQDLREVNKRVQDIHPTVPNPYNLLCALPPQRSWYTVLDLKDAFFCLRLHPTSQPLFAFEWRDPGTGRTGQLTWTRLPQGFKNSPTIFNEALHRDLANFRIQHPQVTLLQYVDDLLLAGATKQDCLEGTKALLLELSDLGYRASAKKAQICRREVTYLGYSLRDGQRWLTEARKKTVVQIPAPTTAKQVREFLGTAGFCRLWIPGFATLAAPLYPLTKPKGEFSWAPEHQKAFDAIKKALLSAPALALPDVTKPFTLYVDERKGVARGVLTQTLGPWRRPVAYLSKKLDPVASGWPVCLKAIAAVAILVKDADKLTLGQNITVIAPHALENIVRQPPDRWMTNARMTHYQSLLLTERVTFAPPAALNPATLLPEETDEPVTHDCHQLLIEETGVRKDLTDIPLTGEVLTWFTDGSSYVVEGKRMAGAAVVDGTRTIWASSLPEGTSAQKAELMALTQALRLAEGKSINIYTDSRYAFATAHVHGAIYKQRGWLTSAGREIKNKEEILSLLEALHLPKRLAIIHCPGHQKAKDPISRGNQMADRVAKQAAQGVNLLAGKRTADGSEFEKRTADGSEFESPKKKAKVE

SEQ ID NO: 305 - protein, 2090 aa, synthetic construct; identical to SEQ ID NO: 127

SEQ ID NO: 306 - protein, 2087 aa, synthetic construct; identical to SEQ ID NO: 126

SEQ ID NO: 307 - protein, 2088 aa, synthetic construct
MPAAKRVKLDGGDKKYSIGLDIGTNSVGWAVITDEYKVPSKKFKVLGNTDRHSIKKNLIGALLFDSGETAEATRLKRTARRRYTRRKNRICYLQEIFSNEMAKVDDSFFHRLEESFLVEEDKKHERHPIFGNIVDEVAYHEKYPTIYHLRKKLVDSTDKADLRLIYLALAHMIKFRGHFLIEGDLNPDNSDVDKLFIQLVQTYNQLFEENPINASGVDAKAILSARLSKSRRLENLIAQLPGEKKNGLFGNLIALSLGLTPNFKSNFDLAEDAKLQLSKDTYDDDLDNLLAQIGDQYADLFLAAKNLSDAILLSDILRVNTEITKAPLSASMIKRYDEHHQDLTLLKALVRQQLPEKYKEIFFDQSKNGYAGYIDGGASQEEFYKFIKPILEKMDGTEELLVKLNREDLLRKQRTFDNGSIPHQIHLGELHAILRRQEDFYPFLKDNREKIEKILTFRIPYYVGPLARGNSRFAWMTRKSEETITPWNFEEVVDKGASAQSFIERMTNFDKNLPNEKVLPKHSLLYEYFTVYNELTKVKYVTEGMRKPAFLSGEQKKAIVDLLFKTNRKVTVKQLKEDYFKKIECFDSVEISGVEDRFNASLGTYHDLLKIIKDKDFLDNEENEDILEDIVLTLTLFEDREMIEERLKTYAHLFDDKVMKQLKRRRYTGWGRLSRKLINGIRDKQSGKTILDFLKSDGFANRNFMQLIHDDSLTFKEDIQKAQVSGQGDSLHEHIANLAGSPAIKKGILQTVKVVDELVKVMGRHKPENIVIEMARENQTTQKGQKNSRERMKRIEEGIKELGSQILKEHPVENTQLQNEKLYLYYLQNGRDMYVDQELDINRLSDYDVDHIVPQSFLKDDSIDNKVLTRSDKARGKSDNVPSEEVVKKMKNYWRQLLNAKLITQRKFDNLTKAERGGLSELDKAGFIKRQLVETRQITKHVAQILDSRMNTKYDENDKLIREVKVITLKSKLVSDFRKDFQFYKVREINNYHHAHDAYLNAVVGTALIKKYPKLESEFVYGDYKVYDVRKMIAKSEQEIGKATAKYFFYSNIMNFFKTEITLANGEIRKRPLIETNGETGEIVWDKGRDFATVRKVLSMPQVNIVKKTEVQTGGFSKESILPKRNSDKLIARKKDWDPKKYGGFDSPTVAYSVLVVAKVEKGKSKKLKSVKELLGITIMERSSFEKNPIDFLEAKGYKEVKKDLIIKLPKYSLFELENGRKRMLASAGELQKGNELALPSKYVNFLYLASHYEKLKGSPEDNEQKQLFVEQHKHYLDEIIEQISEFSKRVILADANLDKVLSAYNKHRDKPIREQAENIIHLFTLTNLGAPAAFKYFDTTIDRKRYTSTKEVLDATLIHQSITGLYETRIDLSQLGGDGGGGGGSSPAPGGTLQLDDEYRLYSPLVKPDQNIQFWLEQFPQAWAETAGMGLAKQVPPQVIQLKASATPVSVRQYPLSKEAQEGIRPHVQRLIQQGILVPVQSPWNTPLLPVRKPGTNDYRPVQDLREVNKRVQDIHPTVPNPYNLLCALPPQRSWYTVLDLKDAFFCLRLHPTSQPLFAFEWRDPGTGRTGQLTWTRLPQGFKNSPTIFNEALHRDLANFRIQHPQVTLLQYVDDLLLAGATKQDCLEGTKALLLELSDLGYRASAKKAQICRREVTYLGYSLRDGQRWLTEARKKTVVQIPAPTTAKQVREFLGTAGFCRLWIPGFATLAAPLYPLTKPKGEFSWAPEHQKAFDAIKKALLSAPALALPDVTKPFTLYVDERKGVARGVLTQTLGPWRRPVAYLSKKLDPVASGWPVCLKAIAAVAILVKDADKLTLGQNITVIAPHALENIVRQPPDRWMTNARMTHYQSLLLTERVTFAPPAALNPATLLPEETDEPVTHDCHQLLIEETGVRKDLTDIPLTGEVLTWFTDGSSYVVEGKRMAGAAVVDGTRTIWASSLPEGTSAQKAELMALTQALRLAEGKSINIYTDSRYAFATAHVHGAIYKQRGWLTSAGREIKNKEEILSLLEALHLPKRLAIIHCPGHQKAKDPISRGNQMADRVAKQAAQGVNLLAGKRTADGSEFEKRTADGSEFESPKKKAKVE

SEQ ID NO: 308 - protein, 2084 aa, synthetic construct; identical to SEQ ID NO: 151

SEQ ID NO: 309 - protein, 2092 aa, synthetic construct; identical to SEQ ID NO: 157

SEQ ID NO: 310 - protein, 2090 aa, synthetic construct
MPAAKRVKLDGGDKKYSIGLDIGTNSVGWAVITDEYKVPSKKFKVLGNTDRHSIKKNLIGALLFDSGETAEATRLKRTARRRYTRRKNRICYLQEIFSNEMAKVDDSFFHRLEESFLVEEDKKHERHPIFGNIVDEVAYHEKYPTIYHLRKKLVDSTDKADLRLIYLALAHMIKFRGHFLIEGDLNPDNSDVDKLFIQLVQTYNQLFEENPINASGVDAKAILSARLSKSRRLENLIAQLPGEKKNGLFGNLIALSLGLTPNFKSNFDLAEDAKLQLSKDTYDDDLDNLLAQIGDQYADLFLAAKNLSDAILLSDILRVNTEITKAPLSASMIKRYDEHHQDLTLLKALVRQQLPEKYKEIFFDQSKNGYAGYIDGGASQEEFYKFIKPILEKMDGTEELLVKLNREDLLRKQRTFDNGSIPHQIHLGELHAILRRQEDFYPFLKDNREKIEKILTFRIPYYVGPLARGNSRFAWMTRKSEETITPWNFEEVVDKGASAQSFIERMTNFDKNLPNEKVLPKHSLLYEYFTVYNELTKVKYVTEGMRKPAFLSGEQKKAIVDLLFKTNRKVTVKQLKEDYFKKIECFDSVEISGVEDRFNASLGTYHDLLKIIKDKDFLDNEENEDILEDIVLTLTLFEDREMIEERLKTYAHLFDDKVMKQLKRRRYTGWGRLSRKLINGIRDKQSGKTILDFLKSDGFANRNFMQLIHDDSLTFKEDIQKAQVSGQGDSLHEHIANLAGSPAIKKGILQTVKVVDELVKVMGRHKPENIVIEMARENQTTQKGQKNSRERMKRIEEGIKELGSQILKEHPVENTQLQNEKLYLYYLQNGRDMYVDQELDINRLSDYDVDHIVPQSFLKDDSIDNKVLTRSDKARGKSDNVPSEEVVKKMKNYWRQLLNAKLITQRKFDNLTKAERGGLSELDKAGFIKRQLVETRQITKHVAQILDSRMNTKYDENDKLIREVKVITLKSKLVSDFRKDFQFYKVREINNYHHAHDAYLNAVVGTALIKKYPKLESEFVYGDYKVYDVRKMIAKSEQEIGKATAKYFFYSNIMNFFKTEITLANGEIRKRPLIETNGETGEIVWDKGRDFATVRKVLSMPQVNIVKKTEVQTGGFSKESILPKRNSDKLIARKKDWDPKKYGGFDSPTVAYSVLVVAKVEKGKSKKLKSVKELLGITIMERSSFEKNPIDFLEAKGYKEVKKDLIIKLPKYSLFELENGRKRMLASAGELQKGNELALPSKYVNFLYLASHYEKLKGSPEDNEQKQLFVEQHKHYLDEIIEQISEFSKRVILADANLDKVLSAYNKHRDKPIREQAENIIHLFTLTNLGAPAAFKYFDTTIDRKRYTSTKEVLDATLIHQSITGLYETRIDLSQLGGDGGGSSPAPEAAAKGGTLQLDDEYRLYSPLVKPDQNIQFWLEQFPQAWAETAGMGLAKQVPPQVIQLKASATPVSVRQYPLSKEAQEGIRPHVQRLIQQGILVPVQSPWNTPLLPVRKPGTNDYRPVQDLREVNKRVQDIHPTVPNPYNLLCALPPQRSWYTVLDLKDAFFCLRLHPTSQPLFAFEWRDPGTGRTGQLTWTRLPQGFKNSPTIFNEALHRDLANFRIQHPQVTLLQYVDDLLLAGATKQDCLEGTKALLLELSDLGYRASAKKAQICRREVTYLGYSLRDGQRWLTEARKKTVVQIPAPTTAKQVREFLGTAGFCRLWIPGFATLAAPLYPLTKPKGEFSWAPEHQKAFDAIKKALLSAPALALPDVTKPFTLYVDERKGVARGVLTQTLGPWRRPVAYLSKKLDPVASGWPVCLKAIAAVAILVKDADKLTLGQNITVIAPHALENIVRQPPDRWMTNARMTHYQSLLLTERVTFAPPAALNPATLLPEETDEPVTHDCHQLLIEETGVRKDLTDIPLTGEVLTWFTDGSSYVVEGKRMAGAAVVDGTRTIWASSLPEGTSAQKAELMALTQALRLAEGKSINIYTDSRYAFATAHVHGAIYKQRGWLTSAGREIKNKEEILSLLEALHLPKRLAIIHCPGHQKAKDPISRGNQMADRVAKQAAQGVNLLAGKRTADGSEFEKRTADGSEFESPKKKAKVE

SEQ ID NO: 311 - protein, 2090 aa, synthetic construct
MPAAKRVKLDGGDKKYSIGLDIGTNSVGWAVITDEYKVPSKKFKVLGNTDRHSIKKNLIGALLFDSGETAEATRLKRTARRRYTRRKNRICYLQEIFSNEMAKVDDSFFHRLEESFLVEEDKKHERHPIFGNIVDEVAYHEKYPTIYHLRKKLVDSTDKADLRLIYLALAHMIKFRGHFLIEGDLNPDNSDVDKLFIQLVQTYNQLFEENPINASGVDAKAILSARLSKSRRLENLIAQLPGEKKNGLFGNLIALSLGLTPNFKSNFDLAEDAKLQLSKDTYDDDLDNLLAQIGDQYADLFLAAKNLSDAILLSDILRVNTEITKAPLSASMIKRYDEHHQDLTLLKALVRQQLPEKYKEIFFDQSKNGYAGYIDGGASQEEFYKFIKPILEKMDGTEELLVKLNREDLLRKQRTFDNGSIPHQIHLGELHAILRRQEDFYPFLKDNREKIEKILTFRIPYYVGPLARGNSRFAWMTRKSEETITPWNFEEVVDKGASAQSFIERMTNFDKNLPNEKVLPKHSLLYEYFTVYNELTKVKYVTEGMRKPAFLSGEQKKAIVDLLFKTNRKVTVKQLKEDYFKKIECFDSVEISGVEDRFNASLGTYHDLLKIIKDKDFLDNEENEDILEDIVLTLTLFEDREMIEERLKTYAHLFDDKVMKQLKRRRYTGWGRLSRKLINGIRDKQSGKTILDFLKSDGFANRNFMQLIHDDSLTFKEDIQKAQVSGQGDSLHEHIANLAGSPAIKKGILQTVKVVDELVKVMGRHKPENIVIEMARENQTTQKGQKNSRERMKRIEEGIKELGSQILKEHPVENTQLQNEKLYLYYLQNGRDMYVDQELDINRLSDYDVDHIVPQSFLKDDSIDNKVLTRSDKARGKSDNVPSEEVVKKMKNYWRQLLNAKLITQRKFDNLTKAERGGLSELDKAGFIKRQLVETRQITKHVAQILDSRMNTKYDENDKLIREVKVITLKSKLVSDFRKDFQFYKVREINNYHHAHDAYLNAVVGTALIKKYPKLESEFVYGDYKVYDVRKMIAKSEQEIGKATAKYFFYSNIMNFFKTEITLANGEIRKRPLIETNGETGEIVWDKGRDFATVRKVLSMPQVNIVKKTEVQTGGFSKESILPKRNSDKLIARKKDWDPKKYGGFDSPTVAYSVLVVAKVEKGKSKKLKSVKELLGITIMERSSFEKNPIDFLEAKGYKEVKKDLIIKLPKYSLFELENGRKRMLASAGELQKGNELALPSKYVNFLYLASHYEKLKGSPEDNEQKQLFVEQHKHYLDEIIEQISEFSKRVILADANLDKVLSAYNKHRDKPIREQAENIIHLFTLTNLGAPAAFKYFDTTIDRKRYTSTKEVLDATLIHQSITGLYETRIDLSQLGGDGGGGGGGSEAAAKGGTLQLDDEYRLYSPLVKPDQNIQFWLEQFPQAWAETAGMGLAKQVPPQVIQLKASATPVSVRQYPLSKEAQEGIRPHVQRLIQQGILVPVQSPWNTPLLPVRKPGTNDYRPVQDLREVNKRVQDIHPTVPNPYNLLCALPPQRSWYTVLDLKDAFFCLRLHPTSQPLFAFEWRDPGTGRTGQLTWTRLPQGFKNSPTIFNEALHRDLANFRIQHPQVTLLQYVDDLLLAGATKQDCLEGTKALLLELSDLGYRASAKKAQICRREVTYLGYSLRDGQRWLTEARKKTVVQIPAPTTAKQVREFLGTAGFCRLWIPGFATLAAPLYPLTKPKGEFSWAPEHQKAFDAIKKALLSAPALALPDVTKPFTLYVDERKGVARGVLTQTLGPWRRPVAYLSKKLDPVASGWPVCLKAIAAVAILVKDADKLTLGQNITVIAPHALENIVRQPPDRWMTNARMTHYQSLLLTERVTFAPPAALNPATLLPEETDEPVTHDCHQLLIEETGVRKDLTDIPLTGEVLTWFTDGSSYVVEGKRMAGAAVVDGTRTIWASSLPEGTSAQKAELMALTQALRLAEGKSINIYTDSRYAFATAHVHGAIYKQRGWLTSAGREIKNKEEILSLLEALHLPKRLAIIHCPGHQKAKDPISRGNQMADRVAKQAAQGVNLLAGKRTADGSEFEKRTADGSEFESPKKKAKVE

SEQ ID NO: 312 - protein, 2090 aa, synthetic construct; identical to SEQ ID NO: 116

SEQ ID NO: 313 - protein, 2109 aa, synthetic construct; identical to SEQ ID NO: 117

SEQ ID NO: 314 - protein, 2088 aa, synthetic construct
MPAAKRVKLDGGDKKYSIGLDIGTNSVGWAVITDEYKVPSKKFKVLGNTDRHSIKKNLIGALLFDSGETAEATRLKRTARRRYTRRKNRICYLQEIFSNEMAKVDDSFFHRLEESFLVEEDKKHERHPIFGNIVDEVAYHEKYPTIYHLRKKLVDSTDKADLRLIYLALAHMIKFRGHFLIEGDLNPDNSDVDKLFIQLVQTYNQLFEENPINASGVDAKAILSARLSKSRRLENLIAQLPGEKKNGLFGNLIALSLGLTPNFKSNFDLAEDAKLQLSKDTYDDDLDNLLAQIGDQYADLFLAAKNLSDAILLSDILRVNTEITKAPLSASMIKRYDEHHQDLTLLKALVRQQLPEKYKEIFFDQSKNGYAGYIDGGASQEEFYKFIKPILEKMDGTEELLVKLNREDLLRKQRTFDNGSIPHQIHLGELHAILRRQEDFYPFLKDNREKIEKILTFRIPYYVGPLARGNSRFAWMTRKSEETITPWNFEEVVDKGASAQSFIERMTNFDKNLPNEKVLPKHSLLYEYFTVYNELTKVKYVTEGMRKPAFLSGEQKKAIVDLLFKTNRKVTVKQLKEDYFKKIECFDSVEISGVEDRFNASLGTYHDLLKIIKDKDFLDNEENEDILEDIVLTLTLFEDREMIEERLKTYAHLFDDKVMKQLKRRRYTGWGRLSRKLINGIRDKQSGKTILDFLKSDGFANRNFMQLIHDDSLTFKEDIQKAQVSGQGDSLHEHIANLAGSPAIKKGILQTVKVVDELVKVMGRHKPENIVIEMARENQTTQKGQKNSRERMKRIEEGIKELGSQILKEHPVENTQLQNEKLYLYYLQNGRDMYVDQELDINRLSDYDVDHIVPQSFLKDDSIDNKVLTRSDKARGKSDNVPSEEVVKKMKNYWRQLLNAKLITQRKFDNLTKAERGGLSELDKAGFIKRQLVETRQITKHVAQILDSRMNTKYDENDKLIREVKVITLKSKLVSDFRKDFQFYKVREINNYHHAHDAYLNAVVGTALIKKYPKLESEFVYGDYKVYDVRKMIAKSEQEIGKATAKYFFYSNIMNFFKTEITLANGEIRKRPLIETNGETGEIVWDKGRDFATVRKVLSMPQVNIVKKTEVQTGGFSKESILPKRNSDKLIARKKDWDPKKYGGFDSPTVAYSVLVVAKVEKGKSKKLKSVKELLGITIMERSSFEKNPIDFLEAKGYKEVKKDLIIKLPKYSLFELENGRKRMLASAGELQKGNELALPSKYVNFLYLASHYEKLKGSPEDNEQKQLFVEQHKHYLDEIIEQISEFSKRVILADANLDKVLSAYNKHRDKPIREQAENIIHLFTLTNLGAPAAFKYFDTTIDRKRYTSTKEVLDATLIHQSITGLYETRIDLSQLGGDGGGGGPAPGSSGGTLQLDDEYRLYSPLVKPDQNIQFWLEQFPQAWAETAGMGLAKQVPPQVIQLKASATPVSVRQYPLSKEAQEGIRPHVQRLIQQGILVPVQSPWNTPLLPVRKPGTNDYRPVQDLREVNKRVQDIHPTVPNPYNLLCALPPQRSWYTVLDLKDAFFCLRLHPTSQPLFAFEWRDPGTGRTGQLTWTRLPQGFKNSPTIFNEALHRDLANFRIQHPQVTLLQYVDDLLLAGATKQDCLEGTKALLLELSDLGYRASAKKAQICRREVTYLGYSLRDGQRWLTEARKKTVVQIPAPTTAKQVREFLGTAGFCRLWIPGFATLAAPLYPLTKPKGEFSWAPEHQKAFDAIKKALLSAPALALPDVTKPFTLYVDERKGVARGVLTQTLGPWRRPVAYLSKKLDPVASGWPVCLKAIAAVAILVKDADKLTLGQNITVIAPHALENIVRQPPDRWMTNARMTHYQSLLLTERVTFAPPAALNPATLLPEETDEPVTHDCHQLLIEETGVRKDLTDIPLTGEVLTWFTDGSSYVVEGKRMAGAAVVDGTRTIWASSLPEGTSAQKAELMALTQALRLAEGKSINIYTDSRYAFATAHVHGAIYKQRGWLTSAGREIKNKEEILSLLEALHLPKRLAIIHCPGHQKAKDPISRGNQMADRVAKQAAQGVNLLAGKRTADGSEFEKRTADGSEFESPKKKAKVE

SEQ ID NO: 315 - protein, 2082 aa, synthetic construct; identical to SEQ ID NO: 120

SEQ ID NO: 316 - protein, 2097 aa, synthetic construct; identical to SEQ ID NO: 142

SEQ ID NO: 317 - protein, 2090 aa, synthetic construct
MPAAKRVKLDGGDKKYSIGLDIGTNSVGWAVITDEYKVPSKKFKVLGNTDRHSIKKNLIGALLFDSGETAEATRLKRTARRRYTRRKNRICYLQEIFSNEMAKVDDSFFHRLEESFLVEEDKKHERHPIFGNIVDEVAYHEKYPTIYHLRKKLVDSTDKADLRLIYLALAHMIKFRGHFLIEGDLNPDNSDVDKLFIQLVQTYNQLFEENPINASGVDAKAILSARLSKSRRLENLIAQLPGEKKNGLFGNLIALSLGLTPNFKSNFDLAEDAKLQLSKDTYDDDLDNLLAQIGDQYADLFLAAKNLSDAILLSDILRVNTEITKAPLSASMIKRYDEHHQDLTLLKALVRQQLPEKYKEIFFDQSKNGYAGYIDGGASQEEFYKFIKPILEKMDGTEELLVKLNREDLLRKQRTFDNGSIPHQIHLGELHAILRRQEDFYPFLKDNREKIEKILTFRIPYYVGPLARGNSRFAWMTRKSEETITPWNFEEVVDKGASAQSFIERMTNFDKNLPNEKVLPKHSLLYEYFTVYNELTKVKYVTEGMRKPAFLSGEQKKAIVDLLFKTNRKVTVKQLKEDYFKKIECFDSVEISGVEDRFNASLGTYHDLLKIIKDKDFLDNEENEDILEDIVLTLTLFEDREMIEERLKTYAHLFDDKVMKQLKRRRYTGWGRLSRKLINGIRDKQSGKTILDFLKSDGFANRNFMQLIHDDSLTFKEDIQKAQVSGQGDSLHEHIANLAGSPAIKKGILQTVKVVDELVKVMGRHKPENIVIEMARENQTTQKGQKNSRERMKRIEEGIKELGSQILKEHPVENTQLQNEKLYLYYLQNGRDMYVDQELDINRLSDYDVDHIVPQSFLKDDSIDNKVLTRSDKARGKSDNVPSEEVVKKMKNYWRQLLNAKLITQRKFDNLTKAERGGLSELDKAGFIKRQLVETRQITKHVAQILDSRMNTKYDENDKLIREVKVITLKSKLVSDFRKDFQFYKVREINNYHHAHDAYLNAVVGTALIKKYPKLESEFVYGDYKVYDVRKMIAKSEQEIGKATAKYFFYSNIMNFFKTEITLANGEIRKRPLIETNGETGEIVWDKGRDFATVRKVLSMPQVNIVKKTEVQTGGFSKESILPKRNSDKLIARKKDWDPKKYGGFDSPTVAYSVLVVAKVEKGKSKKLKSVKELLGITIMERSSFEKNPIDFLEAKGYKEVKKDLIIKLPKYSLFELENGRKRMLASAGELQKGNELALPSKYVNFLYLASHYEKLKGSPEDNEQKQLFVEQHKHYLDEIIEQISEFSKRVILADANLDKVLSAYNKHRDKPIREQAENIIHLFTLTNLGAPAAFKYFDTTIDRKRYTSTKEVLDATLIHQSITGLYETRIDLSQLGGDGGGSSGGGEAAAKGGTLQLDDEYRLYSPLVKPDQNIQFWLEQFPQAWAETAGMGLAKQVPPQVIQLKASATPVSVRQYPLSKEAQEGIRPHVQRLIQQGILVPVQSPWNTPLLPVRKPGTNDYRPVQDLREVNKRVQDIHPTVPNPYNLLCALPPQRSWYTVLDLKDAFFCLRLHPTSQPLFAFEWRDPGTGRTGQLTWTRLPQGFKNSPTIFNEALHRDLANFRIQHPQVTLLQYVDDLLLAGATKQDCLEGTKALLLELSDLGYRASAKKAQICRREVTYLGYSLRDGQRWLTEARKKTVVQIPAPTTAKQVREFLGTAGFCRLWIPGFATLAAPLYPLTKPKGEFSWAPEHQKAFDAIKKALLSAPALALPDVTKPFTLYVDERKGVARGVLTQTLGPWRRPVAYLSKKLDPVASGWPVCLKAIAAVAILVKDADKLTLGQNITVIAPHALENIVRQPPDRWMTNARMTHYQSLLLTERVTFAPPAALNPATLLPEETDEPVTHDCHQLLIEETGVRKDLTDIPLTGEVLTWFTDGSSYVVEGKRMAGAAVVDGTRTIWASSLPEGTSAQKAELMALTQALRLAEGKSINIYTDSRYAFATAHVHGAIYKQRGWLTSAGREIKNKEEILSLLEALHLPKRLAIIHCPGHQKAKDPISRGNQMADRVAKQAAQGVNLLAGKRTADGSEFEKRTADGSEFESPKKKAKVE

SEQ ID NO: 318 - protein, 2090 aa, synthetic construct; identical to SEQ ID NO: 121

SEQ ID NO: 319 - protein, 2090 aa, synthetic construct; identical to SEQ ID NO: 124

SEQ ID NO: 320 - protein, 2088 aa, synthetic construct
MPAAKRVKLDGGDKKYSIGLDIGTNSVGWAVITDEYKVPSKKFKVLGNTDRHSIKKNLIGALLFDSGETAEATRLKRTARRRYTRRKNRICYLQEIFSNEMAKVDDSFFHRLEESFLVEEDKKHERHPIFGNIVDEVAYHEKYPTIYHLRKKLVDSTDKADLRLIYLALAHMIKFRGHFLIEGDLNPDNSDVDKLFIQLVQTYNQLFEENPINASGVDAKAILSARLSKSRRLENLIAQLPGEKKNGLFGNLIALSLGLTPNFKSNFDLAEDAKLQLSKDTYDDDLDNLLAQIGDQYADLFLAAKNLSDAILLSDILRVNTEITKAPLSASMIKRYDEHHQDLTLLKALVRQQLPEKYKEIFFDQSKNGYAGYIDGGASQEEFYKFIKPILEKMDGTEELLVKLNREDLLRKQRTFDNGSIPHQIHLGELHAILRRQEDFYPFLKDNREKIEKILTFRIPYYVGPLARGNSRFAWMTRKSEETITPWNFEEVVDKGASAQSFIERMTNFDKNLPNEKVLPKHSLLYEYFTVYNELTKVKYVTEGMRKPAFLSGEQKKAIVDLLFKTNRKVTVKQLKEDYFKKIECFDSVEISGVEDRFNASLGTYHDLLKIIKDKDFLDNEENEDILEDIVLTLTLFEDREMIEERLKTYAHLFDDKVMKQLKRRRYTGWGRLSRKLINGIRDKQSGKTILDFLKSDGFANRNFMQLIHDDSLTFKEDIQKAQVSGQGDSLHEHIANLAGSPAIKKGILQTVKVVDELVKVMGRHKPENIVIEMARENQTTQKGQKNSRERMKRIEEGIKELGSQILKEHPVENTQLQNEKLYLYYLQNGRDMYVDQELDINRLSDYDVDHIVPQSFLKDDSIDNKVLTRSDKARGKSDNVPSEEVVKKMKNYWRQLLNAKLITQRKFDNLTKAERGGLSELDKAGFIKRQLVETRQITKHVAQILDSRMNTKYDENDKLIREVKVITLKSKLVSDFRKDFQFYKVREINNYHHAHDAYLNAVVGTALIKKYPKLESEFVYGDYKVYDVRKMIAKSEQEIGKATAKYFFYSNIMNFFKTEITLANGEIRKRPLIETNGETGEIVWDKGRDFATVRKVLSMPQVNIVKKTEVQTGGFSKESILPKRNSDKLIARKKDWDPKKYGGFDSPTVAYSVLVVAKVEKGKSKKLKSVKELLGITIMERSSFEKNPIDFLEAKGYKEVKKDLIIKLPKYSLFELENGRKRMLASAGELQKGNELALPSKYVNFLYLASHYEKLKGSPEDNEQKQLFVEQHKHYLDEIIEQISEFSKRVILADANLDKVLSAYNKHRDKPIREQAENIIHLFTLTNLGAPAAFKYFDTTIDRKRYTSTKEVLDATLIHQSITGLYETRIDLSQLGGDGGGGGGGSGSSGGTLQLDDEYRLYSPLVKPDQNIQFWLEQFPQAWAETAGMGLAKQVPPQVIQLKASATPVSVRQYPLSKEAQEGIRPHVQRLIQQGILVPVQSPWNTPLLPVRKPGTNDYRPVQDLREVNKRVQDIHPTVPNPYNLLCALPPQRSWYTVLDLKDAFFCLRLHPTSQPLFAFEWRDPGTGRTGQLTWTRLPQGFKNSPTIFNEALHRDLANFRIQHPQVTLLQYVDDLLLAGATKQDCLEGTKALLLELSDLGYRASAKKAQICRREVTYLGYSLRDGQRWLTEARKKTVVQIPAPTTAKQVREFLGTAGFCRLWIPGFATLAAPLYPLTKPKGEFSWAPEHQKAFDAIKKALLSAPALALPDVTKPFTLYVDERKGVARGVLTQTLGPWRRPVAYLSKKLDPVASGWPVCLKAIAAVAILVKDADKLTLGQNITVIAPHALENIVRQPPDRWMTNARMTHYQSLLLTERVTFAPPAALNPATLLPEETDEPVTHDCHQLLIEETGVRKDLTDIPLTGEVLTWFTDGSSYVVEGKRMAGAAVVDGTRTIWASSLPEGTSAQKAELMALTQALRLAEGKSINIYTDSRYAFATAHVHGAIYKQRGWLTSAGREIKNKEEILSLLEALHLPKRLAIIHCPGHQKAKDPISRGNQMADRVAKQAAQGVNLLAGKRTADGSEFEKRTADGSEFESPKKKAKVE

SEQ ID NO: 321 - protein, 2090 aa, synthetic construct; identical to SEQ ID NO: 138

SEQ ID NO: 322 - protein, 2090 aa, synthetic construct
MPAAKRVKLDGGDKKYSIGLDIGTNSVGWAVITDEYKVPSKKFKVLGNTDRHSIKKNLIGALLFDSGETAEATRLKRTARRRYTRRKNRICYLQEIFSNEMAKVDDSFFHRLEESFLVEEDKKHERHPIFGNIVDEVAYHEKYPTIYHLRKKLVDSTDKADLRLIYLALAHMIKFRGHFLIEGDLNPDNSDVDKLFIQLVQTYNQLFEENPINASGVDAKAILSARLSKSRRLENLIAQLPGEKKNGLFGNLIALSLGLTPNFKSNFDLAEDAKLQLSKDTYDDDLDNLLAQIGDQYADLFLAAKNLSDAILLSDILRVNTEITKAPLSASMIKRYDEHHQDLTLLKALVRQQLPEKYKEIFFDQSKNGYAGYIDGGASQEEFYKFIKPILEKMDGTEELLVKLNREDLLRKQRTFDNGSIPHQIHLGELHAILRRQEDFYPFLKDNREKIEKILTFRIPYYVGPLARGNSRFAWMTRKSEETITPWNFEEVVDKGASAQSFIERMTNFDKNLPNEKVLPKHSLLYEYFTVYNELTKVKYVTEGMRKPAFLSGEQKKAIVDLLFKTNRKVTVKQLKEDYFKKIECFDSVEISGVEDRFNASLGTYHDLLKIIKDKDFLDNEENEDILEDIVLTLTLFEDREMIEERLKTYAHLFDDKVMKQLKRRRYTGWGRLSRKLINGIRDKQSGKTILDFLKSDGFANRNFMQLIHDDSLTFKEDIQKAQVSGQGDSLHEHIANLAGSPAIKKGILQTVKVVDELVKVMGRHKPENIVIEMARENQTTQKGQKNSRERMKRIEEGIKELGSQILKEHPVENTQLQNEKLYLYYLQNGRDMYVDQELDINRLSDYDVDHIVPQSFLKDDSIDNKVLTRSDKARGKSDNVPSEEVVKKMKNYWRQLLNAKLITQRKFDNLTKAERGGLSELDKAGFIKRQLVETRQITKHVAQILDSRMNTKYDENDKLIREVKVITLKSKLVSDFRKDFQFYKVREINNYHHAHDAYLNAVVGTALIKKYPKLESEFVYGDYKVYDVRKMIAKSEQEIGKATAKYFFYSNIMNFFKTEITLANGEIRKRPLIETNGETGEIVWDKGRDFATVRKVLSMPQVNIVKKTEVQTGGFSKESILPKRNSDKLIARKKDWDPKKYGGFDSPTVAYSVLVVAKVEKGKSKKLKSVKELLGITIMERSSFEKNPIDFLEAKGYKEVKKDLIIKLPKYSLFELENGRKRMLASAGELQKGNELALPSKYVNFLYLASHYEKLKGSPEDNEQKQLFVEQHKHYLDEIIEQISEFSKRVILADANLDKVLSAYNKHRDKPIREQAENIIHLFTLTNLGAPAAFKYFDTTIDRKRYTSTKEVLDATLIHQSITGLYETRIDLSQLGGDGGGGGEAAAKGGSGGTLQLDDEYRLYSPLVKPDQNIQFWLEQFPQAWAETAGMGLAKQVPPQVIQLKASATPVSVRQYPLSKEAQEGIRPHVQRLIQQGILVPVQSPWNTPLLPVRKPGTNDYRPVQDLREVNKRVQDIHPTVPNPYNLLCALPPQRSWYTVLDLKDAFFCLRLHPTSQPLFAFEWRDPGTGRTGQLTWTRLPQGFKNSPTIFNEALHRDLANFRIQHPQVTLLQYVDDLLLAGATKQDCLEGTKALLLELSDLGYRASAKKAQICRREVTYLGYSLRDGQRWLTEARKKTVVQIPAPTTAKQVREFLGTAGFCRLWIPGFATLAAPLYPLTKPKGEFSWAPEHQKAFDAIKKALLSAPALALPDVTKPFTLYVDERKGVARGVLTQTLGPWRRPVAYLSKKLDPVASGWPVCLKAIAAVAILVKDADKLTLGQNITVIAPHALENIVRQPPDRWMTNARMTHYQSLLLTERVTFAPPAALNPATLLPEETDEPVTHDCHQLLIEETGVRKDLTDIPLTGEVLTWFTDGSSYVVEGKRMAGAAVVDGTRTIWASSLPEGTSAQKAELMALTQALRLAEGKSINIYTDSRYAFATAHVHGAIYKQRGWLTSAGREIKNKEEILSLLEALHLPKRLAIIHCPGHQKAKDPISRGNQMADRVAKQAAQGVNLLAGKRTADGSEFEKRTADGSEFESPKKKAKVE

SEQ ID NO: 323 - protein, 2090 aa, synthetic construct
MPAAKRVKLDGGDKKYSIGLDIGTNSVGWAVITDEYKVPSKKFKVLGNTDRHSIKKNLIGALLFDSGETAEATRLKRTARRRYTRRKNRICYLQEIFSNEMAKVDDSFFHRLEESFLVEEDKKHERHPIFGNIVDEVAYHEKYPTIYHLRKKLVDSTDKADLRLIYLALAHMIKFRGHFLIEGDLNPDNSDVDKLFIQLVQTYNQLFEENPINASGVDAKAILSARLSKSRRLENLIAQLPGEKKNGLFGNLIALSLGLTPNFKSNFDLAEDAKLQLSKDTYDDDLDNLLAQIGDQYADLFLAAKNLSDAILLSDILRVNTEITKAPLSASMIKRYDEHHQDLTLLKALVRQQLPEKYKEIFFDQSKNGYAGYIDGGASQEEFYKFIKPILEKMDGTEELLVKLNREDLLRKQRTFDNGSIPHQIHLGELHAILRRQEDFYPFLKDNREKIEKILTFRIPYYVGPLARGNSRFAWMTRKSEETITPWNFEEVVDKGASAQSFIERMTNFDKNLPNEKVLPKHSLLYEYFTVYNELTKVKYVTEGMRKPAFLSGEQKKAIVDLLFKTNRKVTVKQLKEDYFKKIECFDSVEISGVEDRFNASLGTYHDLLKIIKDKDFLDNEENEDILEDIVLTLTLFEDREMIEERLKTYAHLFDDKVMKQLKRRRYTGWGRLSRKLINGIRDKQSGKTILDFLKSDGFANRNFMQLIHDDSLTFKEDIQKAQVSGQGDSLHEHIANLAGSPAIKKGILQTVKVVDELVKVMGRHKPENIVIEMARENQTTQKGQKNSRERMKRIEEGIKELGSQILKEHPVENTQLQNEKLYLYYLQNGRDMYVDQELDINRLSDYDVDHIVPQSFLKDDSIDNKVLTRSDKARGKSDNVPSEEVVKKMKNYWRQLLNAKLITQRKFDNLTKAERGGLSELDKAGFIKRQLVETRQITKHVAQILDSRMNTKYDENDKLIREVKVITLKSKLVSDFRKDFQFYKVREINNYHHAHDAYLNAVVGTALIKKYPKLESEFVYGDYKVYDVRKMIAKSEQEIGKATAKYFFYSNIMNFFKTEITLANGEIRKRPLIETNGETGEIVWDKGRDFATVRKVLSMPQVNIVKKTEVQTGGFSKESILPKRNSDKLIARKKDWDPKKYGGFDSPTVAYSVLVVAKVEKGKSKKLKSVKELLGITIMERSSFEKNPIDFLEAKGYKEVKKDLIIKLPKYSLFELENGRKRMLASAGELQKGNELALPSKYVNFLYLASHYEKLKGSPEDNEQKQLFVEQHKHYLDEIIEQISEFSKRVILADANLDKVLSAYNKHRDKPIREQAENIIHLFTLTNLGAPAAFKYFDTTIDRKRYTSTKEVLDATLIHQSITGLYETRIDLSQLGGDGGGGSEAAAKGSSGGTLQLDDEYRLYSPLVKPDQNIQFWLEQFPQAWAETAGMGLAKQVPPQVIQLKASATPVSVRQYPLSKEAQEGIRPHVQRLIQQGILVPVQSPWNTPLLPVRKPGTNDYRPVQDLREVNKRVQDIHPTVPNPYNLLCALPPQRSWYTVLDLKDAFFCLRLHPTSQPLFAFEWRDPGTGRTGQLTWTRLPQGFKNSPTIFNEALHRDLANFRIQHPQVTLLQYVDDLLLAGATKQDCLEGTKALLLELSDLGYRASAKKAQICRREVTYLGYSLRDGQRWLTEARKKTVVQIPAPTTAKQVREFLGTAGFCRLWIPGFATLAAPLYPLTKPKGEFSWAPEHQKAFDAIKKALLSAPALALPDVTKPFTLYVDERKGVARGVLTQTLGPWRRPVAYLSKKLDPVASGWPVCLKAIAAVAILVKDADKLTLGQNITVIAPHALENIVRQPPDRWMTNARMTHYQSLLLTERVTFAPPAALNPATLLPEETDEPVTHDCHQLLIEETGVRKDLTDIPLTGEVLTWFTDGSSYVVEGKRMAGAAVVDGTRTIWASSLPEGTSAQKAELMALTQALRLAEGKSINIYTDSRYAFATAHVHGAIYKQRGWLTSAGREIKNKEEILSLLEALHLPKRLAIIHCPGHQKAKDPISRGNQMADRVAKQAAQGVNLLAGKRTADGSEFEKRTADGSEFESPKKKAKVE

SEQ ID NO: 324 - protein, 2090 aa, synthetic construct
MPAAKRVKLDGGDKKYSIGLDIGTNSVGWAVITDEYKVPSKKFKVLGNTDRHSIKKNLIGALLFDSGETAEATRLKRTARRRYTRRKNRICYLQEIFSNEMAKVDDSFFHRLEESFLVEEDKKHERHPIFGNIVDEVAYHEKYPTIYHLRKKLVDSTDKADLRLIYLALAHMIKFRGHFLIEGDLNPDNSDVDKLFIQLVQTYNQLFEENPINASGVDAKAILSARLSKSRRLENLIAQLPGEKKNGLFGNLIALSLGLTPNFKSNFDLAEDAKLQLSKDTYDDDLDNLLAQIGDQYADLFLAAKNLSDAILLSDILRVNTEITKAPLSASMIKRYDEHHQDLTLLKALVRQQLPEKYKEIFFDQSKNGYAGYIDGGASQEEFYKFIKPILEKMDGTEELLVKLNREDLLRKQRTFDNGSIPHQIHLGELHAILRRQEDFYPFLKDNREKIEKILTFRIPYYVGPLARGNSRFAWMTRKSEETITPWNFEEVVDKGASAQSFIERMTNFDKNLPNEKVLPKHSLLYEYFTVYNELTKVKYVTEGMRKPAFLSGEQKKAIVDLLFKTNRKVTVKQLKEDYFKKIECFDSVEISGVEDRFNASLGTYHDLLKIIKDKDFLDNEENEDILEDIVLTLTLFEDREMIEERLKTYAHLFDDKVMKQLKRRRYTGWGRLSRKLINGIRDKQSGKTILDFLKSDGFANRNFMQLIHDDSLTFKEDIQKAQVSGQGDSLHEHIANLAGSPAIKKGILQTVKVVDELVKVMGRHKPENIVIEMARENQTTQKGQKNSRERMKRIEEGIKELGSQILKEHPVENTQLQNEKLYLYYLQNGRDMYVDQELDINRLSDYDVDHIVPQSFLKDDSIDNKVLTRSDKARGKSDNVPSEEVVKKMKNYWRQLLNAKLITQRKFDNLTKAERGGLSELDKAGFIKRQLVETRQITKHVAQILDSRMNTKYDENDKLIREVKVITLKSKLVSDFRKDFQFYKVREINNYHHAHDAYLNAVVGTALIKKYPKLESEFVYGDYKVYDVRKMIAKSEQEIGKATAKYFFYSNIMNFFKTEITLANGEIRKRPLIETNGETGEIVWDKGRDFATVRKVLSMPQVNIVKKTEVQTGGFSKESILPKRNSDKLIARKKDWDPKKYGGFDSPTVAYSVLVVAKVEKGKSKKLKSVKELLGITIMERSSFEKNPIDFLEAKGYKEVKKDLIIKLPKYSLFELENGRKRMLASAGELQKGNELALPSKYVNFLYLASHYEKLKGSPEDNEQKQLFVEQHKHYLDEIIEQISEFSKRVILADANLDKVLSAYNKHRDKPIREQAENIIHLFTLTNLGAPAAFKYFDTTIDRKRYTSTKEVLDATLIHQSITGLYETRIDLSQLGGDGGGGGEAAAKPAPGGTLQLDDEYRLYSPLVKPDQNIQFWLEQFPQAWAETAGMGLAKQVPPQVIQLKASATPVSVRQYPLSKEAQEGIRPHVQRLIQQGILVPVQSPWNTPLLPVRKPGTNDYRPVQDLREVNKRVQDIHPTVPNPYNLLCALPPQRSWYTVLDLKDAFFCLRLHPTSQPLFAFEWRDPGTGRTGQLTWTRLPQGFKNSPTIFNEALHRDLANFRIQHPQVTLLQYVDDLLLAGATKQDCLEGTKALLLELSDLGYRASAKKAQICRREVTYLGYSLRDGQRWLTEARKKTVVQIPAPTTAKQVREFLGTAGFCRLWIPGFATLAAPLYPLTKPKGEFSWAPEHQKAFDAIKKALLSAPALALPDVTKPFTLYVDERKGVARGVLTQTLGPWRRPVAYLSKKLDPVASGWPVCLKAIAAVAILVKDADKLTLGQNITVIAPHALENIVRQPPDRWMTNARMTHYQSLLLTERVTFAPPAALNPATLLPEETDEPVTHDCHQLLIEETGVRKDLTDIPLTGEVLTWFTDGSSYVVEGKRMAGAAVVDGTRTIWASSLPEGTSAQKAELMALTQALRLAEGKSINIYTDSRYAFATAHVHGAIYKQRGWLTSAGREIKNKEEILSLLEALHLPKRLAIIHCPGHQKAKDPISRGNQMADRVAKQAAQGVNLLAGKRTADGSEFEKRTADGSEFESPKKKAKVE

SEQ ID NO: 325 - protein, 2087 aa, synthetic construct; identical to SEQ ID NO: 128

SEQ ID NO: 326 - protein, 2082 aa, synthetic construct
MPAAKRVKLDGGDKKYSIGLDIGTNSVGWAVITDEYKVPSKKFKVLGNTDRHSIKKNLIGALLFDSGETAEATRLKRTARRRYTRRKNRICYLQEIFSNEMAKVDDSFFHRLEESFLVEEDKKHERHPIFGNIVDEVAYHEKYPTIYHLRKKLVDSTDKADLRLIYLALAHMIKFRGHFLIEGDLNPDNSDVDKLFIQLVQTYNQLFEENPINASGVDAKAILSARLSKSRRLENLIAQLPGEKKNGLFGNLIALSLGLTPNFKSNFDLAEDAKLQLSKDTYDDDLDNLLAQIGDQYADLFLAAKNLSDAILLSDILRVNTEITKAPLSASMIKRYDEHHQDLTLLKALVRQQLPEKYKEIFFDQSKNGYAGYIDGGASQEEFYKFIKPILEKMDGTEELLVKLNREDLLRKQRTFDNGSIPHQIHLGELHAILRRQEDFYPFLKDNREKIEKILTFRIPYYVGPLARGNSRFAWMTRKSEETITPWNFEEVVDKGASAQSFIERMTNFDKNLPNEKVLPKHSLLYEYFTVYNELTKVKYVTEGMRKPAFLSGEQKKAIVDLLFKTNRKVTVKQLKEDYFKKIECFDSVEISGVEDRFNASLGTYHDLLKIIKDKDFLDNEENEDILEDIVLTLTLFEDREMIEERLKTYAHLFDDKVMKQLKRRRYTGWGRLSRKLINGIRDKQSGKTILDFLKSDGFANRNFMQLIHDDSLTFKEDIQKAQVSGQGDSLHEHIANLAGSPAIKKGILQTVKVVDELVKVMGRHKPENIVIEMARENQTTQKGQKNSRERMKRIEEGIKELGSQILKEHPVENTQLQNEKLYLYYLQNGRDMYVDQELDINRLSDYDVDHIVPQSFLKDDSIDNKVLTRSDKARGKSDNVPSEEVVKKMKNYWRQLLNAKLITQRKFDNLTKAERGGLSELDKAGFIKRQLVETRQITKHVAQILDSRMNTKYDENDKLIREVKVITLKSKLVSDFRKDFQFYKVREINNYHHAHDAYLNAVVGTALIKKYPKLESEFVYGDYKVYDVRKMIAKSEQEIGKATAKYFFYSNIMNFFKTEITLANGEIRKRPLIETNGETGEIVWDKGRDFATVRKVLSMPQVNIVKKTEVQTGGFSKESILPKRNSDKLIARKKDWDPKKYGGFDSPTVAYSVLVVAKVEKGKSKKLKSVKELLGITIMERSSFEKNPIDFLEAKGYKEVKKDLIIKLPKYSLFELENGRKRMLASAGELQKGNELALPSKYVNFLYLASHYEKLKGSPEDNEQKQLFVEQHKHYLDEIIEQISEFSKRVILADANLDKVLSAYNKHRDKPIREQAENIIHLFTLTNLGAPAAFKYFDTTIDRKRYTSTKEVLDATLIHQSITGLYETRIDLSQLGGDGGGGSGGTLQLDDEYRLYSPLVKPDQNIQFWLEQFPQAWAETAGMGLAKQVPPQVIQLKASATPVSVRQYPLSKEAQEGIRPHVQRLIQQGILVPVQSPWNTPLLPVRKPGTNDYRPVQDLREVNKRVQDIHPTVPNPYNLLCALPPQRSWYTVLDLKDAFFCLRLHPTSQPLFAFEWRDPGTGRTGQLTWTRLPQGFKNSPTIFNEALHRDLANFRIQHPQVTLLQYVDDLLLAGATKQDCLEGTKALLLELSDLGYRASAKKAQICRREVTYLGYSLRDGQRWLTEARKKTVVQIPAPTTAKQVREFLGTAGFCRLWIPGFATLAAPLYPLTKPKGEFSWAPEHQKAFDAIKKALLSAPALALPDVTKPFTLYVDERKGVARGVLTQTLGPWRRPVAYLSKKLDPVASGWPVCLKAIAAVAILVKDADKLTLGQNITVIAPHALENIVRQPPDRWMTNARMTHYQSLLLTERVTFAPPAALNPATLLPEETDEPVTHDCHQLLIEETGVRKDLTDIPLTGEVLTWFTDGSSYVVEGKRMAGAAVVDGTRTIWASSLPEGTSAQKAELMALTQALRLAEGKSINIYTDSRYAFATAHVHGAIYKQRGWLTSAGREIKNKEEILSLLEALHLPKRLAIIHCPGHQKAKDPISRGNQMADRVAKQAAQGVNLLAGKRTADGSEFEKRTADGSEFESPKKKAKVE

SEQ ID NO: 327 - protein, 2090 aa, synthetic construct; identical to SEQ ID NO: 132

SEQ ID NO: 328 - protein, 2095 aa, synthetic construct; identical to SEQ ID NO: 122

SEQ ID NO: 329 - protein, 2085 aa, synthetic construct; identical to SEQ ID NO: 143

SEQ ID NO: 330 - protein, 2090 aa, synthetic construct; identical to SEQ ID NO: 160

SEQ ID NO: 331 - protein, 2090 aa, synthetic construct
MPAAKRVKLDGGDKKYSIGLDIGTNSVGWAVITDEYKVPSKKFKVLGNTDRHSIKKNLIGALLFDSGETAEATRLKRTARRRYTRRKNRICYLQEIFSNEMAKVDDSFFHRLEESFLVEEDKKHERHPIFGNIVDEVAYHEKYPTIYHLRKKLVDSTDKADLRLIYLALAHMIKFRGHFLIEGDLNPDNSDVDKLFIQLVQTYNQLFEENPINASGVDAKAILSARLSKSRRLENLIAQLPGEKKNGLFGNLIALSLGLTPNFKSNFDLAEDAKLQLSKDTYDDDLDNLLAQIGDQYADLFLAAKNLSDAILLSDILRVNTEITKAPLSASMIKRYDEHHQDLTLLKALVRQQLPEKYKEIFFDQSKNGYAGYIDGGASQEEFYKFIKPILEKMDGTEELLVKLNREDLLRKQRTFDNGSIPHQIHLGELHAILRRQEDFYPFLKDNREKIEKILTFRIPYYVGPLARGNSRFAWMTRKSEETITPWNFEEVVDKGASAQSFIERMTNFDKNLPNEKVLPKHSLLYEYFTVYNELTKVKYVTEGMRKPAFLSGEQKKAIVDLLFKTNRKVTVKQLKEDYFKKIECFDSVEISGVEDRFNASLGTYHDLLKIIKDKDFLDNEENEDILEDIVLTLTLFEDREMIEERLKTYAHLFDDKVMKQLKRRRYTGWGRLSRKLINGIRDKQSGKTILDFLKSDGFANRNFMQLIHDDSLTFKEDIQKAQVSGQGDSLHEHIANLAGSPAIKKGILQTVKVVDELVKVMGRHKPENIVIEMARENQTTQKGQKNSRERMKRIEEGIKELGSQILKEHPVENTQLQNEKLYLYYLQNGRDMYVDQELDINRLSDYDVDHIVPQSFLKDDSIDNKVLTRSDKARGKSDNVPSEEVVKKMKNYWRQLLNAKLITQRKFDNLTKAERGGLSELDKAGFIKRQLVETRQITKHVAQILDSRMNTKYDENDKLIREVKVITLKSKLVSDFRKDFQFYKVREINNYHHAHDAYLNAVVGTALIKKYPKLESEFVYGDYKVYDVRKMIAKSEQEIGKATAKYFFYSNIMNFFKTEITLANGEIRKRPLIETNGETGEIVWDKGRDFATVRKVLSMPQVNIVKKTEVQTGGFSKESILPKRNSDKLIARKKDWDPKKYGGFDSPTVAYSVLVVAKVEKGKSKKLKSVKELLGITIMERSSFEKNPIDFLEAKGYKEVKKDLIIKLPKYSLFELENGRKRMLASAGELQKGNELALPSKYVNFLYLASHYEKLKGSPEDNEQKQLFVEQHKHYLDEIIEQISEFSKRVILADANLDKVLSAYNKHRDKPIREQAENIIHLFTLTNLGAPAAFKYFDTTIDRKRYTSTKEVLDATLIHQSITGLYETRIDLSQLGGDGGPAPEAAAKGGSGGTLQLDDEYRLYSPLVKPDQNIQFWLEQFPQAWAETAGMGLAKQVPPQVIQLKASATPVSVRQYPLSKEAQEGIRPHVQRLIQQGILVPVQSPWNTPLLPVRKPGTNDYRPVQDLREVNKRVQDIHPTVPNPYNLLCALPPQRSWYTVLDLKDAFFCLRLHPTSQPLFAFEWRDPGTGRTGQLTWTRLPQGFKNSPTIFNEALHRDLANFRIQHPQVTLLQYVDDLLLAGATKQDCLEGTKALLLELSDLGYRASAKKAQICRREVTYLGYSLRDGQRWLTEARKKTVVQIPAPTTAKQVREFLGTAGFCRLWIPGFATLAAPLYPLTKPKGEFSWAPEHQKAFDAIKKALLSAPALALPDVTKPFTLYVDERKGVARGVLTQTLGPWRRPVAYLSKKLDPVASGWPVCLKAIAAVAILVKDADKLTLGQNITVIAPHALENIVRQPPDRWMTNARMTHYQSLLLTERVTFAPPAALNPATLLPEETDEPVTHDCHQLLIEETGVRKDLTDIPLTGEVLTWFTDGSSYVVEGKRMAGAAVVDGTRTIWASSLPEGTSAQKAELMALTQALRLAEGKSINIYTDSRYAFATAHVHGAIYKQRGWLTSAGREIKNKEEILSLLEALHLPKRLAIIHCPGHQKAKDPISRGNQMADRVAKQAAQGVNLLAGKRTADGSEFEKRTADGSEFESPKKKAKVE

SEQ ID NO: 332 - protein, 2085 aa, synthetic construct
MPAAKRVKLDGGDKKYSIGLDIGTNSVGWAVITDEYKVPSKKFKVLGNTDRHSIKKNLIGALLFDSGETAEATRLKRTARRRYTRRKNRICYLQEIFSNEMAKVDDSFFHRLEESFLVEEDKKHERHPIFGNIVDEVAYHEKYPTIYHLRKKLVDSTDKADLRLIYLALAHMIKFRGHFLIEGDLNPDNSDVDKLFIQLVQTYNQLFEENPINASGVDAKAILSARLSKSRRLENLIAQLPGEKKNGLFGNLIALSLGLTPNFKSNFDLAEDAKLQLSKDTYDDDLDNLLAQIGDQYADLFLAAKNLSDAILLSDILRVNTEITKAPLSASMIKRYDEHHQDLTLLKALVRQQLPEKYKEIFFDQSKNGYAGYIDGGASQEEFYKFIKPILEKMDGTEELLVKLNREDLLRKQRTFDNGSIPHQIHLGELHAILRRQEDFYPFLKDNREKIEKILTFRIPYYVGPLARGNSRFAWMTRKSEETITPWNFEEVVDKGASAQSFIERMTNFDKNLPNEKVLPKHSLLYEYFTVYNELTKVKYVTEGMRKPAFLSGEQKKAIVDLLFKTNRKVTVKQLKEDYFKKIECFDSVEISGVEDRFNASLGTYHDLLKIIKDKDFLDNEENEDILEDIVLTLTLFEDREMIEERLKTYAHLFDDKVMKQLKRRRYTGWGRLSRKLINGIRDKQSGKTILDFLKSDGFANRNFMQLIHDDSLTFKEDIQKAQVSGQGDSLHEHIANLAGSPAIKKGILQTVKVVDELVKVMGRHKPENIVIEMARENQTTQKGQKNSRERMKRIEEGIKELGSQILKEHPVENTQLQNEKLYLYYLQNGRDMYVDQELDINRLSDYDVDHIVPQSFLKDDSIDNKVLTRSDKARGKSDNVPSEEVVKKMKNYWRQLLNAKLITQRKFDNLTKAERGGLSELDKAGFIKRQLVETRQITKHVAQILDSRMNTKYDENDKLIREVKVITLKSKLVSDFRKDFQFYKVREINNYHHAHDAYLNAVVGTALIKKYPKLESEFVYGDYKVYDVRKMIAKSEQEIGKATAKYFFYSNIMNFFKTEITLANGEIRKRPLIETNGETGEIVWDKGRDFATVRKVLSMPQVNIVKKTEVQTGGFSKESILPKRNSDKLIARKKDWDPKKYGGFDSPTVAYSVLVVAKVEKGKSKKLKSVKELLGITIMERSSFEKNPIDFLEAKGYKEVKKDLIIKLPKYSLFELENGRKRMLASAGELQKGNELALPSKYVNFLYLASHYEKLKGSPEDNEQKQLFVEQHKHYLDEIIEQISEFSKRVILADANLDKVLSAYNKHRDKPIREQAENIIHLFTLTNLGAPAAFKYFDTTIDRKRYTSTKEVLDATLIHQSITGLYETRIDLSQLGGDGGPAPGGGGGTLQLDDEYRLYSPLVKPDQNIQFWLEQFPQAWAETAGMGLAKQVPPQVIQLKASATPVSVRQYPLSKEAQEGIRPHVQRLIQQGILVPVQSPWNTPLLPVRKPGTNDYRPVQDLREVNKRVQDIHPTVPNPYNLLCALPPQRSWYTVLDLKDAFFCLRLHPTSQPLFAFEWRDPGTGRTGQLTWTRLPQGFKNSPTIFNEALHRDLANFRIQHPQVTLLQYVDDLLLAGATKQDCLEGTKALLLELSDLGYRASAKKAQICRREVTYLGYSLRDGQRWLTEARKKTVVQIPAPTTAKQVREFLGTAGFCRLWIPGFATLAAPLYPLTKPKGEFSWAPEHQKAFDAIKKALLSAPALALPDVTKPFTLYVDERKGVARGVLTQTLGPWRRPVAYLSKKLDPVASGWPVCLKAIAAVAILVKDADKLTLGQNITVIAPHALENIVRQPPDRWMTNARMTHYQSLLLTERVTFAPPAALNPATLLPEETDEPVTHDCHQLLIEETGVRKDLTDIPLTGEVLTWFTDGSSYVVEGKRMAGAAVVDGTRTIWASSLPEGTSAQKAELMALTQALRLAEGKSINIYTDSRYAFATAHVHGAIYKQRGWLTSAGREIKNKEEILSLLEALHLPKRLAIIHCPGHQKAKDPISRGNQMADRVAKQAAQGVNLLAGKRTADGSEFEKRTADGSEFESPKKKAKVE

SEQ ID NO: 333 - protein, 2083 aa, synthetic construct; identical to SEQ ID NO: 149

SEQ ID NO: 334 - protein, 2090 aa, synthetic construct; identical to SEQ ID NO: 146

SEQ ID NO: 335 - protein, 2087 aa, synthetic construct; identical to SEQ ID NO: 158

SEQ ID NO: 336 - protein, 2088 aa, synthetic construct
MPAAKRVKLDGGDKKYSIGLDIGTNSVGWAVITDEYKVPSKKFKVLGNTDRHSIKKNLIGALLFDSGETAEATRLKRTARRRYTRRKNRICYLQEIFSNEMAKVDDSFFHRLEESFLVEEDKKHERHPIFGNIVDEVAYHEKYPTIYHLRKKLVDSTDKADLRLIYLALAHMIKFRGHFLIEGDLNPDNSDVDKLFIQLVQTYNQLFEENPINASGVDAKAILSARLSKSRRLENLIAQLPGEKKNGLFGNLIALSLGLTPNFKSNFDLAEDAKLQLSKDTYDDDLDNLLAQIGDQYADLFLAAKNLSDAILLSDILRVNTEITKAPLSASMIKRYDEHHQDLTLLKALVRQQLPEKYKEIFFDQSKNGYAGYIDGGASQEEFYKFIKPILEKMDGTEELLVKLNREDLLRKQRTFDNGSIPHQIHLGELHAILRRQEDFYPFLKDNREKIEKILTFRIPYYVGPLARGNSRFAWMTRKSEETITPWNFEEVVDKGASAQSFIERMTNFDKNLPNEKVLPKHSLLYEYFTVYNELTKVKYVTEGMRKPAFLSGEQKKAIVDLLFKTNRKVTVKQLKEDYFKKIECFDSVEISGVEDRFNASLGTYHDLLKIIKDKDFLDNEENEDILEDIVLTLTLFEDREMIEERLKTYAHLFDDKVMKQLKRRRYTGWGRLSRKLINGIRDKQSGKTILDFLKSDGFANRNFMQLIHDDSLTFKEDIQKAQVSGQGDSLHEHIANLAGSPAIKKGILQTVKVVDELVKVMGRHKPENIVIEMARENQTTQKGQKNSRERMKRIEEGIKELGSQILKEHPVENTQLQNEKLYLYYLQNGRDMYVDQELDINRLSDYDVDHIVPQSFLKDDSIDNKVLTRSDKARGKSDNVPSEEVVKKMKNYWRQLLNAKLITQRKFDNLTKAERGGLSELDKAGFIKRQLVETRQITKHVAQILDSRMNTKYDENDKLIREVKVITLKSKLVSDFRKDFQFYKVREINNYHHAHDAYLNAVVGTALIKKYPKLESEFVYGDYKVYDVRKMIAKSEQEIGKATAKYFFYSNIMNFFKTEITLANGEIRKRPLIETNGETGEIVWDKGRDFATVRKVLSMPQVNIVKKTEVQTGGFSKESILPKRNSDKLIARKKDWDPKKYGGFDSPTVAYSVLVVAKVEKGKSKKLKSVKELLGITIMERSSFEKNPIDFLEAKGYKEVKKDLIIKLPKYSLFELENGRKRMLASAGELQKGNELALPSKYVNFLYLASHYEKLKGSPEDNEQKQLFVEQHKHYLDEIIEQISEFSKRVILADANLDKVLSAYNKHRDKPIREQAENIIHLFTLTNLGAPAAFKYFDTTIDRKRYTSTKEVLDATLIHQSITGLYETRIDLSQLGGDGGGGSGGGGSSGGTLQLDDEYRLYSPLVKPDQNIQFWLEQFPQAWAETAGMGLAKQVPPQVIQLKASATPVSVRQYPLSKEAQEGIRPHVQRLIQQGILVPVQSPWNTPLLPVRKPGTNDYRPVQDLREVNKRVQDIHPTVPNPYNLLCALPPQRSWYTVLDLKDAFFCLRLHPTSQPLFAFEWRDPGTGRTGQLTWTRLPQGFKNSPTIFNEALHRDLANFRIQHPQVTLLQYVDDLLLAGATKQDCLEGTKALLLELSDLGYRASAKKAQICRREVTYLGYSLRDGQRWLTEARKKTVVQIPAPTTAKQVREFLGTAGFCRLWIPGFATLAAPLYPLTKPKGEFSWAPEHQKAFDAIKKALLSAPALALPDVTKPFTLYVDERKGVARGVLTQTLGPWRRPVAYLSKKLDPVASGWPVCLKAIAAVAILVKDADKLTLGQNITVIAPHALENIVRQPPDRWMTNARMTHYQSLLLTERVTFAPPAALNPATLLPEETDEPVTHDCHQLLIEETGVRKDLTDIPLTGEVLTWFTDGSSYVVEGKRMAGAAVVDGTRTIWASSLPEGTSAQKAELMALTQALRLAEGKSINIYTDSRYAFATAHVHGAIYKQRGWLTSAGREIKNKEEILSLLEALHLPKRLAIIHCPGHQKAKDPISRGNQMADRVAKQAAQGVNLLAGKRTADGSEFEKRTADGSEFESPKKKAKVE

SEQ ID NO: 337 - protein, 2104 aa, synthetic construct; identical to SEQ ID NO: 150

SEQ ID NO: 338 - protein, 2088 aa, synthetic construct; identical to SEQ ID NO: 169

SEQ ID NO: 339 - protein, 2088 aa, synthetic construct; identical to SEQ ID NO: 162

SEQ ID NO: 340 - protein, 2088 aa, synthetic construct; identical to SEQ ID NO: 173

SEQ ID NO: 341 - protein, 2090 aa, synthetic construct; identical to SEQ ID NO: 141

SEQ ID NO: 342 - protein, 2094 aa, synthetic construct
MPAAKRVKLDGGDKKYSIGLDIGTNSVGWAVITDEYKVPSKKFKVLGNTDRHSIKKNLIGALLFDSGETAEATRLKRTARRRYTRRKNRICYLQEIFSNEMAKVDDSFFHRLEESFLVEEDKKHERHPIFGNIVDEVAYHEKYPTIYHLRKKLVDSTDKADLRLIYLALAHMIKFRGHFLIEGDLNPDNSDVDKLFIQLVQTYNQLFEENPINASGVDAKAILSARLSKSRRLENLIAQLPGEKKNGLFGNLIALSLGLTPNFKSNFDLAEDAKLQLSKDTYDDDLDNLLAQIGDQYADLFLAAKNLSDAILLSDILRVNTEITKAPLSASMIKRYDEHHQDLTLLKALVRQQLPEKYKEIFFDQSKNGYAGYIDGGASQEEFYKFIKPILEKMDGTEELLVKLNREDLLRKQRTFDNGSIPHQIHLGELHAILRRQEDFYPFLKDNREKIEKILTFRIPYYVGPLARGNSRFAWMTRKSEETITPWNFEEVVDKGASAQSFIERMTNFDKNLPNEKVLPKHSLLYEYFTVYNELTKVKYVTEGMRKPAFLSGEQKKAIVDLLFKTNRKVTVKQLKEDYFKKIECFDSVEISGVEDRFNASLGTYHDLLKIIKDKDFLDNEENEDILEDIVLTLTLFEDREMIEERLKTYAHLFDDKVMKQLKRRRYTGWGRLSRKLINGIRDKQSGKTILDFLKSDGFANRNFMQLIHDDSLTFKEDIQKAQVSGQGDSLHEHIANLAGSPAIKKGILQTVKVVDELVKVMGRHKPENIVIEMARENQTTQKGQKNSRERMKRIEEGIKELGSQILKEHPVENTQLQNEKLYLYYLQNGRDMYVDQELDINRLSDYDVDHIVPQSFLKDDSIDNKVLTRSDKARGKSDNVPSEEVVKKMKNYWRQLLNAKLITQRKFDNLTKAERGGLSELDKAGFIKRQLVETRQITKHVAQILDSRMNTKYDENDKLIREVKVITLKSKLVSDFRKDFQFYKVREINNYHHAHDAYLNAVVGTALIKKYPKLESEFVYGDYKVYDVRKMIAKSEQEIGKATAKYFFYSNIMNFFKTEITLANGEIRKRPLIETNGETGEIVWDKGRDFATVRKVLSMPQVNIVKKTEVQTGGFSKESILPKRNSDKLIARKKDWDPKKYGGFDSPTVAYSVLVVAKVEKGKSKKLKSVKELLGITIMERSSFEKNPIDFLEAKGYKEVKKDLIIKLPKYSLFELENGRKRMLASAGELQKGNELALPSKYVNFLYLASHYEKLKGSPEDNEQKQLFVEQHKHYLDEIIEQISEFSKRVILADANLDKVLSAYNKHRDKPIREQAENIIHLFTLTNLGAPAAFKYFDTTIDRKRYTSTKEVLDATLIHQSITGLYETRIDLSQLGGDGGEAAAKGGGGSEAAAKGGTLQLDDEYRLYSPLVKPDQNIQFWLEQFPQAWAETAGMGLAKQVPPQVIQLKASATPVSVRQYPLSKEAQEGIRPHVQRLIQQGILVPVQSPWNTPLLPVRKPGTNDYRPVQDLREVNKRVQDIHPTVPNPYNLLCALPPQRSWYTVLDLKDAFFCLRLHPTSQPLFAFEWRDPGTGRTGQLTWTRLPQGFKNSPTIFNEALHRDLANFRIQHPQVTLLQYVDDLLLAGATKQDCLEGTKALLLELSDLGYRASAKKAQICRREVTYLGYSLRDGQRWLTEARKKTVVQIPAPTTAKQVREFLGTAGFCRLWIPGFATLAAPLYPLTKPKGEFSWAPEHQKAFDAIKKALLSAPALALPDVTKPFTLYVDERKGVARGVLTQTLGPWRRPVAYLSKKLDPVASGWPVCLKAIAAVAILVKDADKLTLGQNITVIAPHALENIVRQPPDRWMTNARMTHYQSLLLTERVTFAPPAALNPATLLPEETDEPVTHDCHQLLIEETGVRKDLTDIPLTGEVLTWFTDGSSYVVEGKRMAGAAVVDGTRTIWASSLPEGTSAQKAELMALTQALRLAEGKSINIYTDSRYAFATAHVHGAIYKQRGWLTSAGREIKNKEEILSLLEALHLPKRLAIIHCPGHQKAKDPISRGNQMADRVAKQAAQGVNLLAGKRTADGSEFEKRTADGSEFESPKKKAKVE

SEQ ID NO: 343 - protein, 2087 aa, synthetic construct
MPAAKRVKLDGGDKKYSIGLDIGTNSVGWAVITDEYKVPSKKFKVLGNTDRHSIKKNLIGALLFDSGETAEATRLKRTARRRYTRRKNRICYLQEIFSNEMAKVDDSFFHRLEESFLVEEDKKHERHPIFGNIVDEVAYHEKYPTIYHLRKKLVDSTDKADLRLIYLALAHMIKFRGHFLIEGDLNPDNSDVDKLFIQLVQTYNQLFEENPINASGVDAKAILSARLSKSRRLENLIAQLPGEKKNGLFGNLIALSLGLTPNFKSNFDLAEDAKLQLSKDTYDDDLDNLLAQIGDQYADLFLAAKNLSDAILLSDILRVNTEITKAPLSASMIKRYDEHHQDLTLLKALVRQQLPEKYKEIFFDQSKNGYAGYIDGGASQEEFYKFIKPILEKMDGTEELLVKLNREDLLRKQRTFDNGSIPHQIHLGELHAILRRQEDFYPFLKDNREKIEKILTFRIPYYVGPLARGNSRFAWMTRKSEETITPWNFEEVVDKGASAQSFIERMTNFDKNLPNEKVLPKHSLLYEYFTVYNELTKVKYVTEGMRKPAFLSGEQKKAIVDLLFKTNRKVTVKQLKEDYFKKIECFDSVEISGVEDRFNASLGTYHDLLKIIKDKDFLDNEENEDILEDIVLTLTLFEDREMIEERLKTYAHLFDDKVMKQLKRRRYTGWGRLSRKLINGIRDKQSGKTILDFLKSDGFANRNFMQLIHDDSLTFKEDIQKAQVSGQGDSLHEHIANLAGSPAIKKGILQTVKVVDELVKVMGRHKPENIVIEMARENQTTQKGQKNSRERMKRIEEGIKELGSQILKEHPVENTQLQNEKLYLYYLQNGRDMYVDQELDINRLSDYDVDHIVPQSFLKDDSIDNKVLTRSDKARGKSDNVPSEEVVKKMKNYWRQLLNAKLITQRKFDNLTKAERGGLSELDKAGFIKRQLVETRQITKHVAQILDSRMNTKYDENDKLIREVKVITLKSKLVSDFRKDFQFYKVREINNYHHAHDAYLNAVVGTALIKKYPKLESEFVYGDYKVYDVRKMIAKSEQEIGKATAKYFFYSNIMNFFKTEITLANGEIRKRPLIETNGETGEIVWDKGRDFATVRKVLSMPQVNIVKKTEVQTGGFSKESILPKRNSDKLIARKKDWDPKKYGGFDSPTVAYSVLVVAKVEKGKSKKLKSVKELLGITIMERSSFEKNPIDFLEAKGYKEVKKDLIIKLPKYSLFELENGRKRMLASAGELQKGNELALPSKYVNFLYLASHYEKLKGSPEDNEQKQLFVEQHKHYLDEIIEQISEFSKRVILADANLDKVLSAYNKHRDKPIREQAENIIHLFTLTNLGAPAAFKYFDTTIDRKRYTSTKEVLDATLIHQSITGLYETRIDLSQLGGDGGEAAAKPAPGGTLQLDDEYRLYSPLVKPDQNIQFWLEQFPQAWAETAGMGLAKQVPPQVIQLKASATPVSVRQYPLSKEAQEGIRPHVQRLIQQGILVPVQSPWNTPLLPVRKPGTNDYRPVQDLREVNKRVQDIHPTVPNPYNLLCALPPQRSWYTVLDLKDAFFCLRLHPTSQPLFAFEWRDPGTGRTGQLTWTRLPQGFKNSPTIFNEALHRDLANFRIQHPQVTLLQYVDDLLLAGATKQDCLEGTKALLLELSDLGYRASAKKAQICRREVTYLGYSLRDGQRWLTEARKKTVVQIPAPTTAKQVREFLGTAGFCRLWIPGFATLAAPLYPLTKPKGEFSWAPEHQKAFDAIKKALLSAPALALPDVTKPFTLYVDERKGVARGVLTQTLGPWRRPVAYLSKKLDPVASGWPVCLKAIAAVAILVKDADKLTLGQNITVIAPHALENIVRQPPDRWMTNARMTHYQSLLLTERVTFAPPAALNPATLLPEETDEPVTHDCHQLLIEETGVRKDLTDIPLTGEVLTWFTDGSSYVVEGKRMAGAAVVDGTRTIWASSLPEGTSAQKAELMALTQALRLAEGKSINIYTDSRYAFATAHVHGAIYKQRGWLTSAGREIKNKEEILSLLEALHLPKRLAIIHCPGHQKAKDPISRGNQMADRVAKQAAQGVNLLAGKRTADGSEFEKRTADGSEFESPKKKAKVE

SEQ ID NO: 344 - protein, 2088 aa, synthetic construct; identical to SEQ ID NO: 131

SEQ ID NO: 345 - protein, 2085 aa, synthetic construct
MPAAKRVKLDGGDKKYSIGLDIGTNSVGWAVITDEYKVPSKKFKVLGNTDRHSIKKNLIGALLFDSGETAEATRLKRTARRRYTRRKNRICYLQEIFSNEMAKVDDSFFHRLEESFLVEEDKKHERHPIFGNIVDEVAYHEKYPTIYHLRKKLVDSTDKADLRLIYLALAHMIKFRGHFLIEGDLNPDNSDVDKLFIQLVQTYNQLFEENPINASGVDAKAILSARLSKSRRLENLIAQLPGEKKNGLFGNLIALSLGLTPNFKSNFDLAEDAKLQLSKDTYDDDLDNLLAQIGDQYADLFLAAKNLSDAILLSDILRVNTEITKAPLSASMIKRYDEHHQDLTLLKALVRQQLPEKYKEIFFDQSKNGYAGYIDGGASQEEFYKFIKPILEKMDGTEELLVKLNREDLLRKQRTFDNGSIPHQIHLGELHAILRRQEDFYPFLKDNREKIEKILTFRIPYYVGPLARGNSRFAWMTRKSEETITPWNFEEVVDKGASAQSFIERMTNFDKNLPNEKVLPKHSLLYEYFTVYNELTKVKYVTEGMRKPAFLSGEQKKAIVDLLFKTNRKVTVKQLKEDYFKKIECFDSVEISGVEDRFNASLGTYHDLLKIIKDKDFLDNEENEDILEDIVLTLTLFEDREMIEERLKTYAHLFDDKVMKQLKRRRYTGWGRLSRKLINGIRDKQSGKTILDFLKSDGFANRNFMQLIHDDSLTFKEDIQKAQVSGQGDSLHEHIANLAGSPAIKKGILQTVKVVDELVKVMGRHKPENIVIEMARENQTTQKGQKNSRERMKRIEEGIKELGSQILKEHPVENTQLQNEKLYLYYLQNGRDMYVDQELDINRLSDYDVDHIVPQSFLKDDSIDNKVLTRSDKARGKSDNVPSEEVVKKMKNYWRQLLNAKLITQRKFDNLTKAERGGLSELDKAGFIKRQLVETRQITKHVAQILDSRMNTKYDENDKLIREVKVITLKSKLVSDFRKDFQFYKVREINNYHHAHDAYLNAVVGTALIKKYPKLESEFVYGDYKVYDVRKMIAKSEQEIGKATAKYFFYSNIMNFFKTEITLANGEIRKRPLIETNGETGEIVWDKGRDFATVRKVLSMPQVNIVKKTEVQTGGFSKESILPKRNSDKLIARKKDWDPKKYGGFDSPTVAYSVLVVAKVEKGKSKKLKSVKELLGITIMERSSFEKNPIDFLEAKGYKEVKKDLIIKLPKYSLFELENGRKRMLASAGELQKGNELALPSKYVNFLYLASHYEKLKGSPEDNEQKQLFVEQHKHYLDEIIEQISEFSKRVILADANLDKVLSAYNKHRDKPIREQAENIIHLFTLTNLGAPAAFKYFDTTIDRKRYTSTKEVLDATLIHQSITGLYETRIDLSQLGGDGGGGSPAPGGTLQLDDEYRLYSPLVKPDQNIQFWLEQFPQAWAETAGMGLAKQVPPQVIQLKASATPVSVRQYPLSKEAQEGIRPHVQRLIQQGILVPVQSPWNTPLLPVRKPGTNDYRPVQDLREVNKRVQDIHPTVPNPYNLLCALPPQRSWYTVLDLKDAFFCLRLHPTSQPLFAFEWRDPGTGRTGQLTWTRLPQGFKNSPTIFNEALHRDLANFRIQHPQVTLLQYVDDLLLAGATKQDCLEGTKALLLELSDLGYRASAKKAQICRREVTYLGYSLRDGQRWLTEARKKTVVQIPAPTTAKQVREFLGTAGFCRLWIPGFATLAAPLYPLTKPKGEFSWAPEHQKAFDAIKKALLSAPALALPDVTKPFTLYVDERKGVARGVLTQTLGPWRRPVAYLSKKLDPVASGWPVCLKAIAAVAILVKDADKLTLGQNITVIAPHALENIVRQPPDRWMTNARMTHYQSLLLTERVTFAPPAALNPATLLPEETDEPVTHDCHQLLIEETGVRKDLTDIPLTGEVLTWFTDGSSYVVEGKRMAGAAVVDGTRTIWASSLPEGTSAQKAELMALTQALRLAEGKSINIYTDSRYAFATAHVHGAIYKQRGWLTSAGREIKNKEEILSLLEALHLPKRLAIIHCPGHQKAKDPISRGNQMADRVAKQAAQGVNLLAGKRTADGSEFEKRTADGSEFESPKKKAKVE

SEQ ID NO: 346 - protein, 2090 aa, synthetic construct
MPAAKRVKLDGGDKKYSIGLDIGTNSVGWAVITDEYKVPSKKFKVLGNTDRHSIKKNLIGALLFDSGETAEATRLKRTARRRYTRRKNRICYLQEIFSNEMAKVDDSFFHRLEESFLVEEDKKHERHPIFGNIVDEVAYHEKYPTIYHLRKKLVDSTDKADLRLIYLALAHMIKFRGHFLIEGDLNPDNSDVDKLFIQLVQTYNQLFEENPINASGVDAKAILSARLSKSRRLENLIAQLPGEKKNGLFGNLIALSLGLTPNFKSNFDLAEDAKLQLSKDTYDDDLDNLLAQIGDQYADLFLAAKNLSDAILLSDILRVNTEITKAPLSASMIKRYDEHHQDLTLLKALVRQQLPEKYKEIFFDQSKNGYAGYIDGGASQEEFYKFIKPILEKMDGTEELLVKLNREDLLRKQRTFDNGSIPHQIHLGELHAILRRQEDFYPFLKDNREKIEKILTFRIPYYVGPLARGNSRFAWMTRKSEETITPWNFEEVVDKGASAQSFIERMTNFDKNLPNEKVLPKHSLLYEYFTVYNELTKVKYVTEGMRKPAFLSGEQKKAIVDLLFKTNRKVTVKQLKEDYFKKIECFDSVEISGVEDRFNASLGTYHDLLKIIKDKDFLDNEENEDILEDIVLTLTLFEDREMIEERLKTYAHLFDDKVMKQLKRRRYTGWGRLSRKLINGIRDKQSGKTILDFLKSDGFANRNFMQLIHDDSLTFKEDIQKAQVSGQGDSLHEHIANLAGSPAIKKGILQTVKVVDELVKVMGRHKPENIVIEMARENQTTQKGQKNSRERMKRIEEGIKELGSQILKEHPVENTQLQNEKLYLYYLQNGRDMYVDQELDINRLSDYDVDHIVPQSFLKDDSIDNKVLTRSDKARGKSDNVPSEEVVKKMKNYWRQLLNAKLITQRKFDNLTKAERGGLSELDKAGFIKRQLVETRQITKHVAQILDSRMNTKYDENDKLIREVKVITLKSKLVSDFRKDFQFYKVREINNYHHAHDAYLNAVVGTALIKKYPKLESEFVYGDYKVYDVRKMIAKSEQEIGKATAKYFFYSNIMNFFKTEITLANGEIRKRPLIETNGETGEIVWDKGRDFATVRKVLSMPQVNIVKKTEVQTGGFSKESILPKRNSDKLIARKKDWDPKKYGGFDSPTVAYSVLVVAKVEKGKSKKLKSVKELLGITIMERSSFEKNPIDFLEAKGYKEVKKDLIIKLPKYSLFELENGRKRMLASAGELQKGNELALPSKYVNFLYLASHYEKLKGSPEDNEQKQLFVEQHKHYLDEIIEQISEFSKRVILADANLDKVLSAYNKHRDKPIREQAENIIHLFTLTNLGAPAAFKYFDTTIDRKRYTSTKEVLDATLIHQSITGLYETRIDLSQLGGDGGGGGPAPEAAAKGGTLQLDDEYRLYSPLVKPDQNIQFWLEQFPQAWAETAGMGLAKQVPPQVIQLKASATPVSVRQYPLSKEAQEGIRPHVQRLIQQGILVPVQSPWNTPLLPVRKPGTNDYRPVQDLREVNKRVQDIHPTVPNPYNLLCALPPQRSWYTVLDLKDAFFCLRLHPTSQPLFAFEWRDPGTGRTGQLTWTRLPQGFKNSPTIFNEALHRDLANFRIQHPQVTLLQYVDDLLLAGATKQDCLEGTKALLLELSDLGYRASAKKAQICRREVTYLGYSLRDGQRWLTEARKKTVVQIPAPTTAKQVREFLGTAGFCRLWIPGFATLAAPLYPLTKPKGEFSWAPEHQKAFDAIKKALLSAPALALPDVTKPFTLYVDERKGVARGVLTQTLGPWRRPVAYLSKKLDPVASGWPVCLKAIAAVAILVKDADKLTLGQNITVIAPHALENIVRQPPDRWMTNARMTHYQSLLLTERVTFAPPAALNPATLLPEETDEPVTHDCHQLLIEETGVRKDLTDIPLTGEVLTWFTDGSSYVVEGKRMAGAAVVDGTRTIWASSLPEGTSAQKAELMALTQALRLAEGKSINIYTDSRYAFATAHVHGAIYKQRGWLTSAGREIKNKEEILSLLEALHLPKRLAIIHCPGHQKAKDPISRGNQMADRVAKQAAQGVNLLAGKRTADGSEFEKRTADGSEFESPKKKAKVE

SEQ ID NO: 347 - protein, 2082 aa, synthetic construct; identical to SEQ ID NO: 177

SEQ ID NO: 348 - protein, 2090 aa, synthetic construct
MPAAKRVKLDGGDKKYSIGLDIGTNSVGWAVITDEYKVPSKKFKVLGNTDRHSIKKNLIGALLFDSGETAEATRLKRTARRRYTRRKNRICYLQEIFSNEMAKVDDSFFHRLEESFLVEEDKKHERHPIFGNIVDEVAYHEKYPTIYHLRKKLVDSTDKADLRLIYLALAHMIKFRGHFLIEGDLNPDNSDVDKLFIQLVQTYNQLFEENPINASGVDAKAILSARLSKSRRLENLIAQLPGEKKNGLFGNLIALSLGLTPNFKSNFDLAEDAKLQLSKDTYDDDLDNLLAQIGDQYADLFLAAKNLSDAILLSDILRVNTEITKAPLSASMIKRYDEHHQDLTLLKALVRQQLPEKYKEIFFDQSKNGYAGYIDGGASQEEFYKFIKPILEKMDGTEELLVKLNREDLLRKQRTFDNGSIPHQIHLGELHAILRRQEDFYPFLKDNREKIEKILTFRIPYYVGPLARGNSRFAWMTRKSEETITPWNFEEVVDKGASAQSFIERMTNFDKNLPNEKVLPKHSLLYEYFTVYNELTKVKYVTEGMRKPAFLSGEQKKAIVDLLFKTNRKVTVKQLKEDYFKKIECFDSVEISGVEDRFNASLGTYHDLLKIIKDKDFLDNEENEDILEDIVLTLTLFEDREMIEERLKTYAHLFDDKVMKQLKRRRYTGWGRLSRKLINGIRDKQSGKTILDFLKSDGFANRNFMQLIHDDSLTFKEDIQKAQVSGQGDSLHEHIANLAGSPAIKKGILQTVKVVDELVKVMGRHKPENIVIEMARENQTTQKGQKNSRERMKRIEEGIKELGSQILKEHPVENTQLQNEKLYLYYLQNGRDMYVDQELDINRLSDYDVDHIVPQSFLKDDSIDNKVLTRSDKARGKSDNVPSEEVVKKMKNYWRQLLNAKLITQRKFDNLTKAERGGLSELDKAGFIKRQLVETRQITKHVAQILDSRMNTKYDENDKLIREVKVITLKSKLVSDFRKDFQFYKVREINNYHHAHDAYLNAVVGTALIKKYPKLESEFVYGDYKVYDVRKMIAKSEQEIGKATAKYFFYSNIMNFFKTEITLANGEIRKRPLIETNGETGEIVWDKGRDFATVRKVLSMPQVNIVKKTEVQTGGFSKESILPKRNSDKLIARKKDWDPKKYGGFDSPTVAYSVLVVAKVEKGKSKKLKSVKELLGITIMERSSFEKNPIDFLEAKGYKEVKKDLIIKLPKYSLFELENGRKRMLASAGELQKGNELALPSKYVNFLYLASHYEKLKGSPEDNEQKQLFVEQHKHYLDEIIEQISEFSKRVILADANLDKVLSAYNKHRDKPIREQAENIIHLFTLTNLGAPAAFKYFDTTIDRKRYTSTKEVLDATLIHQSITGLYETRIDLSQLGGDGGEAAAKGGGPAPGGTLQLDDEYRLYSPLVKPDQNIQFWLEQFPQAWAETAGMGLAKQVPPQVIQLKASATPVSVRQYPLSKEAQEGIRPHVQRLIQQGILVPVQSPWNTPLLPVRKPGTNDYRPVQDLREVNKRVQDIHPTVPNPYNLLCALPPQRSWYTVLDLKDAFFCLRLHPTSQPLFAFEWRDPGTGRTGQLTWTRLPQGFKNSPTIFNEALHRDLANFRIQHPQVTLLQYVDDLLLAGATKQDCLEGTKALLLELSDLGYRASAKKAQICRREVTYLGYSLRDGQRWLTEARKKTVVQIPAPTTAKQVREFLGTAGFCRLWIPGFATLAAPLYPLTKPKGEFSWAPEHQKAFDAIKKALLSAPALALPDVTKPFTLYVDERKGVARGVLTQTLGPWRRPVAYLSKKLDPVASGWPVCLKAIAAVAILVKDADKLTLGQNITVIAPHALENIVRQPPDRWMTNARMTHYQSLLLTERVTFAPPAALNPATLLPEETDEPVTHDCHQLLIEETGVRKDLTDIPLTGEVLTWFTDGSSYVVEGKRMAGAAVVDGTRTIWASSLPEGTSAQKAELMALTQALRLAEGKSINIYTDSRYAFATAHVHGAIYKQRGWLTSAGREIKNKEEILSLLEALHLPKRLAIIHCPGHQKAKDPISRGNQMADRVAKQAAQGVNLLAGKRTADGSEFEKRTADGSEFESPKKKAKVE

SEQ ID NO: 349 - protein, 2090 aa, synthetic construct; identical to SEQ ID NO: 136

SEQ ID NO: 350 - protein, 2090 aa, synthetic construct; identical to SEQ ID NO: 115

SEQ ID NO: 351 - protein, 2099 aa, synthetic construct; identical to SEQ ID NO: 137

SEQ ID NO: 352 - protein, 2090 aa, synthetic construct
MPAAKRVKLDGGDKKYSIGLDIGTNSVGWAVITDEYKVPSKKFKVLGNTDRHSIKKNLIGALLFDSGETAEATRLKRTARRRYTRRKNRICYLQEIFSNEMAKVDDSFFHRLEESFLVEEDKKHERHPIFGNIVDEVAYHEKYPTIYHLRKKLVDSTDKADLRLIYLALAHMIKFRGHFLIEGDLNPDNSDVDKLFIQLVQTYNQLFEENPINASGVDAKAILSARLSKSRRLENLIAQLPGEKKNGLFGNLIALSLGLTPNFKSNFDLAEDAKLQLSKDTYDDDLDNLLAQIGDQYADLFLAAKNLSDAILLSDILRVNTEITKAPLSASMIKRYDEHHQDLTLLKALVRQQLPEKYKEIFFDQSKNGYAGYIDGGASQEEFYKFIKPILEKMDGTEELLVKLNREDLLRKQRTFDNGSIPHQIHLGELHAILRRQEDFYPFLKDNREKIEKILTFRIPYYVGPLARGNSRFAWMTRKSEETITPWNFEEVVDKGASAQSFIERMTNFDKNLPNEKVLPKHSLLYEYFTVYNELTKVKYVTEGMRKPAFLSGEQKKAIVDLLFKTNRKVTVKQLKEDYFKKIECFDSVEISGVEDRFNASLGTYHDLLKIIKDKDFLDNEENEDILEDIVLTLTLFEDREMIEERLKTYAHLFDDKVMKQLKRRRYTGWGRLSRKLINGIRDKQSGKTILDFLKSDGFANRNFMQLIHDDSLTFKEDIQKAQVSGQGDSLHEHIANLAGSPAIKKGILQTVKVVDELVKVMGRHKPENIVIEMARENQTTQKGQKNSRERMKRIEEGIKELGSQILKEHPVENTQLQNEKLYLYYLQNGRDMYVDQELDINRLSDYDVDHIVPQSFLKDDSIDNKVLTRSDKARGKSDNVPSEEVVKKMKNYWRQLLNAKLITQRKFDNLTKAERGGLSELDKAGFIKRQLVETRQITKHVAQILDSRMNTKYDENDKLIREVKVITLKSKLVSDFRKDFQFYKVREINNYHHAHDAYLNAVVGTALIKKYPKLESEFVYGDYKVYDVRKMIAKSEQEIGKATAKYFFYSNIMNFFKTEITLANGEIRKRPLIETNGETGEIVWDKGRDFATVRKVLSMPQVNIVKKTEVQTGGFSKESILPKRNSDKLIARKKDWDPKKYGGFDSPTVAYSVLVVAKVEKGKSKKLKSVKELLGITIMERSSFEKNPIDFLEAKGYKEVKKDLIIKLPKYSLFELENGRKRMLASAGELQKGNELALPSKYVNFLYLASHYEKLKGSPEDNEQKQLFVEQHKHYLDEIIEQISEFSKRVILADANLDKVLSAYNKHRDKPIREQAENIIHLFTLTNLGAPAAFKYFDTTIDRKRYTSTKEVLDATLIHQSITGLYETRIDLSQLGGDGGGGSEAAAKGGGGGTLQLDDEYRLYSPLVKPDQNIQFWLEQFPQAWAETAGMGLAKQVPPQVIQLKASATPVSVRQYPLSKEAQEGIRPHVQRLIQQGILVPVQSPWNTPLLPVRKPGTNDYRPVQDLREVNKRVQDIHPTVPNPYNLLCALPPQRSWYTVLDLKDAFFCLRLHPTSQPLFAFEWRDPGTGRTGQLTWTRLPQGFKNSPTIFNEALHRDLANFRIQHPQVTLLQYVDDLLLAGATKQDCLEGTKALLLELSDLGYRASAKKAQICRREVTYLGYSLRDGQRWLTEARKKTVVQIPAPTTAKQVREFLGTAGFCRLWIPGFATLAAPLYPLTKPKGEFSWAPEHQKAFDAIKKALLSAPALALPDVTKPFTLYVDERKGVARGVLTQTLGPWRRPVAYLSKKLDPVASGWPVCLKAIAAVAILVKDADKLTLGQNITVIAPHALENIVRQPPDRWMTNARMTHYQSLLLTERVTFAPPAALNPATLLPEETDEPVTHDCHQLLIEETGVRKDLTDIPLTGEVLTWFTDGSSYVVEGKRMAGAAVVDGTRTIWASSLPEGTSAQKAELMALTQALRLAEGKSINIYTDSRYAFATAHVHGAIYKQRGWLTSAGREIKNKEEILSLLEALHLPKRLAIIHCPGHQKAKDPISRGNQMADRVAKQAAQGVNLLAGKRTADGSEFEKRTADGSEFESPKKKAKVE

SEQ ID NO: 353 - protein, 2085 aa, synthetic construct; identical to SEQ ID NO: 183

SEQ ID NO: 354 - protein, 2090 aa, synthetic construct
MPAAKRVKLDGGDKKYSIGLDIGTNSVGWAVITDEYKVPSKKFKVLGNTDRHSIKKNLIGALLFDSGETAEATRLKRTARRRYTRRKNRICYLQEIFSNEMAKVDDSFFHRLEESFLVEEDKKHERHPIFGNIVDEVAYHEKYPTIYHLRKKLVDSTDKADLRLIYLALAHMIKFRGHFLIEGDLNPDNSDVDKLFIQLVQTYNQLFEENPINASGVDAKAILSARLSKSRRLENLIAQLPGEKKNGLFGNLIALSLGLTPNFKSNFDLAEDAKLQLSKDTYDDDLDNLLAQIGDQYADLFLAAKNLSDAILLSDILRVNTEITKAPLSASMIKRYDEHHQDLTLLKALVRQQLPEKYKEIFFDQSKNGYAGYIDGGASQEEFYKFIKPILEKMDGTEELLVKLNREDLLRKQRTFDNGSIPHQIHLGELHAILRRQEDFYPFLKDNREKIEKILTFRIPYYVGPLARGNSRFAWMTRKSEETITPWNFEEVVDKGASAQSFIERMTNFDKNLPNEKVLPKHSLLYEYFTVYNELTKVKYVTEGMRKPAFLSGEQKKAIVDLLFKTNRKVTVKQLKEDYFKKIECFDSVEISGVEDRFNASLGTYHDLLKIIKDKDFLDNEENEDILEDIVLTLTLFEDREMIEERLKTYAHLFDDKVMKQLKRRRYTGWGRLSRKLINGIRDKQSGKTILDFLKSDGFANRNFMQLIHDDSLTFKEDIQKAQVSGQGDSLHEHIANLAGSPAIKKGILQTVKVVDELVKVMGRHKPENIVIEMARENQTTQKGQKNSRERMKRIEEGIKELGSQILKEHPVENTQLQNEKLYLYYLQNGRDMYVDQELDINRLSDYDVDHIVPQSFLKDDSIDNKVLTRSDKARGKSDNVPSEEVVKKMKNYWRQLLNAKLITQRKFDNLTKAERGGLSELDKAGFIKRQLVETRQITKHVAQILDSRMNTKYDENDKLIREVKVITLKSKLVSDFRKDFQFYKVREINNYHHAHDAYLNAVVGTALIKKYPKLESEFVYGDYKVYDVRKMIAKSEQEIGKATAKYFFYSNIMNFFKTEITLANGEIRKRPLIETNGETGEIVWDKGRDFATVRKVLSMPQVNIVKKTEVQTGGFSKESILPKRNSDKLIARKKDWDPKKYGGFDSPTVAYSVLVVAKVEKGKSKKLKSVKELLGITIMERSSFEKNPIDFLEAKGYKEVKKDLIIKLPKYSLFELENGRKRMLASAGELQKGNELALPSKYVNFLYLASHYEKLKGSPEDNEQKQLFVEQHKHYLDEIIEQISEFSKRVILADANLDKVLSAYNKHRDKPIREQAENIIHLFTLTNLGAPAAFKYFDTTIDRKRYTSTKEVLDATLIHQSITGLYETRIDLSQLGGDGGEAAAKGGGGGSGGTLQLDDEYRLYSPLVKPDQNIQFWLEQFPQAWAETAGMGLAKQVPPQVIQLKASATPVSVRQYPLSKEAQEGIRPHVQRLIQQGILVPVQSPWNTPLLPVRKPGTNDYRPVQDLREVNKRVQDIHPTVPNPYNLLCALPPQRSWYTVLDLKDAFFCLRLHPTSQPLFAFEWRDPGTGRTGQLTWTRLPQGFKNSPTIFNEALHRDLANFRIQHPQVTLLQYVDDLLLAGATKQDCLEGTKALLLELSDLGYRASAKKAQICRREVTYLGYSLRDGQRWLTEARKKTVVQIPAPTTAKQVREFLGTAGFCRLWIPGFATLAAPLYPLTKPKGEFSWAPEHQKAFDAIKKALLSAPALALPDVTKPFTLYVDERKGVARGVLTQTLGPWRRPVAYLSKKLDPVASGWPVCLKAIAAVAILVKDADKLTLGQNITVIAPHALENIVRQPPDRWMTNARMTHYQSLLLTERVTFAPPAALNPATLLPEETDEPVTHDCHQLLIEETGVRKDLTDIPLTGEVLTWFTDGSSYVVEGKRMAGAAVVDGTRTIWASSLPEGTSAQKAELMALTQALRLAEGKSINIYTDSRYAFATAHVHGAIYKQRGWLTSAGREIKNKEEILSLLEALHLPKRLAIIHCPGHQKAKDPISRGNQMADRVAKQAAQGVNLLAGKRTADGSEFEKRTADGSEFESPKKKAKVE

SEQ ID NO: 355 - protein, 2099 aa, synthetic construct
MPAAKRVKLDGGDKKYSIGLDIGTNSVGWAVITDEYKVPSKKFKVLGNTDRHSIKKNLIGALLFDSGETAEATRLKRTARRRYTRRKNRICYLQEIFSNEMAKVDDSFFHRLEESFLVEEDKKHERHPIFGNIVDEVAYHEKYPTIYHLRKKLVDSTDKADLRLIYLALAHMIKFRGHFLIEGDLNPDNSDVDKLFIQLVQTYNQLFEENPINASGVDAKAILSARLSKSRRLENLIAQLPGEKKNGLFGNLIALSLGLTPNFKSNFDLAEDAKLQLSKDTYDDDLDNLLAQIGDQYADLFLAAKNLSDAILLSDILRVNTEITKAPLSASMIKRYDEHHQDLTLLKALVRQQLPEKYKEIFFDQSKNGYAGYIDGGASQEEFYKFIKPILEKMDGTEELLVKLNREDLLRKQRTFDNGSIPHQIHLGELHAILRRQEDFYPFLKDNREKIEKILTFRIPYYVGPLARGNSRFAWMTRKSEETITPWNFEEVVDKGASAQSFIERMTNFDKNLPNEKVLPKHSLLYEYFTVYNELTKVKYVTEGMRKPAFLSGEQKKAIVDLLFKTNRKVTVKQLKEDYFKKIECFDSVEISGVEDRFNASLGTYHDLLKIIKDKDFLDNEENEDILEDIVLTLTLFEDREMIEERLKTYAHLFDDKVMKQLKRRRYTGWGRLSRKLINGIRDKQSGKTILDFLKSDGFANRNFMQLIHDDSLTFKEDIQKAQVSGQGDSLHEHIANLAGSPAIKKGILQTVKVVDELVKVMGRHKPENIVIEMARENQTTQKGQKNSRERMKRIEEGIKELGSQILKEHPVENTQLQNEKLYLYYLQNGRDMYVDQELDINRLSDYDVDHIVPQSFLKDDSIDNKVLTRSDKARGKSDNVPSEEVVKKMKNYWRQLLNAKLITQRKFDNLTKAERGGLSELDKAGFIKRQLVETRQITKHVAQILDSRMNTKYDENDKLIREVKVITLKSKLVSDFRKDFQFYKVREINNYHHAHDAYLNAVVGTALIKKYPKLESEFVYGDYKVYDVRKMIAKSEQEIGKATAKYFFYSNIMNFFKTEITLANGEIRKRPLIETNGETGEIVWDKGRDFATVRKVLSMPQVNIVKKTEVQTGGFSKESILPKRNSDKLIARKKDWDPKKYGGFDSPTVAYSVLVVAKVEKGKSKKLKSVKELLGITIMERSSFEKNPIDFLEAKGYKEVKKDLIIKLPKYSLFELENGRKRMLASAGELQKGNELALPSKYVNFLYLASHYEKLKGSPEDNEQKQLFVEQHKHYLDEIIEQISEFSKRVILADANLDKVLSAYNKHRDKPIREQAENIIHLFTLTNLGAPAAFKYFDTTIDRKRYTSTKEVLDATLIHQSITGLYETRIDLSQLGGDGGGGGGSGGGGSGGGGSGGGGSGGTLQLDDEYRLYSPLVKPDQNIQFWLEQFPQAWAETAGMGLAKQVPPQVIQLKASATPVSVRQYPLSKEAQEGIRPHVQRLIQQGILVPVQSPWNTPLLPVRKPGTNDYRPVQDLREVNKRVQDIHPTVPNPYNLLCALPPQRSWYTVLDLKDAFFCLRLHPTSQPLFAFEWRDPGTGRTGQLTWTRLPQGFKNSPTIFNEALHRDLANFRIQHPQVTLLQYVDDLLLAGATKQDCLEGTKALLLELSDLGYRASAKKAQICRREVTYLGYSLRDGQRWLTEARKKTVVQIPAPTTAKQVREFLGTAGFCRLWIPGFATLAAPLYPLTKPKGEFSWAPEHQKAFDAIKKALLSAPALALPDVTKPFTLYVDERKGVARGVLTQTLGPWRRPVAYLSKKLDPVASGWPVCLKAIAAVAILVKDADKLTLGQNITVIAPHALENIVRQPPDRWMTNARMTHYQSLLLTERVTFAPPAALNPATLLPEETDEPVTHDCHQLLIEETGVRKDLTDIPLTGEVLTWFTDGSSYVVEGKRMAGAAVVDGTRTIWASSLPEGTSAQKAELMALTQALRLAEGKSINIYTDSRYAFATAHVHGAIYKQRGWLTSAGREIKNKEEILSLLEALHLPKRLAIIHCPGHQKAKDPISRGNQMADRVAKQAAQGVNLLAGKRTADGSEFEKRTADGSEFESPKKKAKVE

SEQ ID NO: 356 - protein, 2085 aa, synthetic construct; identical to SEQ ID NO: 125

SEQ ID NO: 357 - protein, 2091 aa, synthetic construct
MPAAKRVKLDGGDKKYSIGLDIGTNSVGWAVITDEYKVPSKKFKVLGNTDRHSIKKNLIGALLFDSGETAEATRLKRTARRRYTRRKNRICYLQEIFSNEMAKVDDSFFHRLEESFLVEEDKKHERHPIFGNIVDEVAYHEKYPTIYHLRKKLVDSTDKADLRLIYLALAHMIKFRGHFLIEGDLNPDNSDVDKLFIQLVQTYNQLFEENPINASGVDAKAILSARLSKSRRLENLIAQLPGEKKNGLFGNLIALSLGLTPNFKSNFDLAEDAKLQLSKDTYDDDLDNLLAQIGDQYADLFLAAKNLSDAILLSDILRVNTEITKAPLSASMIKRYDEHHQDLTLLKALVRQQLPEKYKEIFFDQSKNGYAGYIDGGASQEEFYKFIKPILEKMDGTEELLVKLNREDLLRKQRTFDNGSIPHQIHLGELHAILRRQEDFYPFLKDNREKIEKILTFRIPYYVGPLARGNSRFAWMTRKSEETITPWNFEEVVDKGASAQSFIERMTNFDKNLPNEKVLPKHSLLYEYFTVYNELTKVKYVTEGMRKPAFLSGEQKKAIVDLLFKTNRKVTVKQLKEDYFKKIECFDSVEISGVEDRFNASLGTYHDLLKIIKDKDFLDNEENEDILEDIVLTLTLFEDREMIEERLKTYAHLFDDKVMKQLKRRRYTGWGRLSRKLINGIRDKQSGKTILDFLKSDGFANRNFMQLIHDDSLTFKEDIQKAQVSGQGDSLHEHIANLAGSPAIKKGILQTVKVVDELVKVMGRHKPENIVIEMARENQTTQKGQKNSRERMKRIEEGIKELGSQILKEHPVENTQLQNEKLYLYYLQNGRDMYVDQELDINRLSDYDVDHIVPQSFLKDDSIDNKVLTRSDKARGKSDNVPSEEVVKKMKNYWRQLLNAKLITQRKFDNLTKAERGGLSELDKAGFIKRQLVETRQITKHVAQILDSRMNTKYDENDKLIREVKVITLKSKLVSDFRKDFQFYKVREINNYHHAHDAYLNAVVGTALIKKYPKLESEFVYGDYKVYDVRKMIAKSEQEIGKATAKYFFYSNIMNFFKTEITLANGEIRKRPLIETNGETGEIVWDKGRDFATVRKVLSMPQVNIVKKTEVQTGGFSKESILPKRNSDKLIARKKDWDPKKYGGFDSPTVAYSVLVVAKVEKGKSKKLKSVKELLGITIMERSSFEKNPIDFLEAKGYKEVKKDLIIKLPKYSLFELENGRKRMLASAGELQKGNELALPSKYVNFLYLASHYEKLKGSPEDNEQKQLFVEQHKHYLDEIIEQISEFSKRVILADANLDKVLSAYNKHRDKPIREQAENIIHLFTLTNLGAPAAFKYFDTTIDRKRYTSTKEVLDATLIHQSITGLYETRIDLSQLGGDGGGSSGSSGSSGSSGGTLQLDDEYRLYSPLVKPDQNIQFWLEQFPQAWAETAGMGLAKQVPPQVIQLKASATPVSVRQYPLSKEAQEGIRPHVQRLIQQGILVPVQSPWNTPLLPVRKPGTNDYRPVQDLREVNKRVQDIHPTVPNPYNLLCALPPQRSWYTVLDLKDAFFCLRLHPTSQPLFAFEWRDPGTGRTGQLTWTRLPQGFKNSPTIFNEALHRDLANFRIQHPQVTLLQYVDDLLLAGATKQDCLEGTKALLLELSDLGYRASAKKAQICRREVTYLGYSLRDGQRWLTEARKKTVVQIPAPTTAKQVREFLGTAGFCRLWIPGFATLAAPLYPLTKPKGEFSWAPEHQKAFDAIKKALLSAPALALPDVTKPFTLYVDERKGVARGVLTQTLGPWRRPVAYLSKKLDPVASGWPVCLKAIAAVAILVKDADKLTLGQNITVIAPHALENIVRQPPDRWMTNARMTHYQSLLLTERVTFAPPAALNPATLLPEETDEPVTHDCHQLLIEETGVRKDLTDIPLTGEVLTWFTDGSSYVVEGKRMAGAAVVDGTRTIWASSLPEGTSAQKAELMALTQALRLAEGKSINIYTDSRYAFATAHVHGAIYKQRGWLTSAGREIKNKEEILSLLEALHLPKRLAIIHCPGHQKAKDPISRGNQMADRVAKQAAQGVNLLAGKRTADGSEFEKRTADGSEFESPKKKAKVE

SEQ ID NO: 358 - protein, 2090 aa, synthetic construct
MPAAKRVKLDGGDKKYSIGLDIGTNSVGWAVITDEYKVPSKKFKVLGNTDRHSIKKNLIGALLFDSGETAEATRLKRTARRRYTRRKNRICYLQEIFSNEMAKVDDSFFHRLEESFLVEEDKKHERHPIFGNIVDEVAYHEKYPTIYHLRKKLVDSTDKADLRLIYLALAHMIKFRGHFLIEGDLNPDNSDVDKLFIQLVQTYNQLFEENPINASGVDAKAILSARLSKSRRLENLIAQLPGEKKNGLFGNLIALSLGLTPNFKSNFDLAEDAKLQLSKDTYDDDLDNLLAQIGDQYADLFLAAKNLSDAILLSDILRVNTEITKAPLSASMIKRYDEHHQDLTLLKALVRQQLPEKYKEIFFDQSKNGYAGYIDGGASQEEFYKFIKPILEKMDGTEELLVKLNREDLLRKQRTFDNGSIPHQIHLGELHAILRRQEDFYPFLKDNREKIEKILTFRIPYYVGPLARGNSRFAWMTRKSEETITPWNFEEVVDKGASAQSFIERMTNFDKNLPNEKVLPKHSLLYEYFTVYNELTKVKYVTEGMRKPAFLSGEQKKAIVDLLFKTNRKVTVKQLKEDYFKKIECFDSVEISGVEDRFNASLGTYHDLLKIIKDKDFLDNEENEDILEDIVLTLTLFEDREMIEERLKTYAHLFDDKVMKQLKRRRYTGWGRLSRKLINGIRDKQSGKTILDFLKSDGFANRNFMQLIHDDSLTFKEDIQKAQVSGQGDSLHEHIANLAGSPAIKKGILQTVKVVDELVKVMGRHKPENIVIEMARENQTTQKGQKNSRERMKRIEEGIKELGSQILKEHPVENTQLQNEKLYLYYLQNGRDMYVDQELDINRLSDYDVDHIVPQSFLKDDSIDNKVLTRSDKARGKSDNVPSEEVVKKMKNYWRQLLNAKLITQRKFDNLTKAERGGLSELDKAGFIKRQLVETRQITKHVAQILDSRMNTKYDENDKLIREVKVITLKSKLVSDFRKDFQFYKVREINNYHHAHDAYLNAVVGTALIKKYPKLESEFVYGDYKVYDVRKMIAKSEQEIGKATAKYFFYSNIMNFFKTEITLANGEIRKRPLIETNGETGEIVWDKGRDFATVRKVLSMPQVNIVKKTEVQTGGFSKESILPKRNSDKLIARKKDWDPKKYGGFDSPTVAYSVLVVAKVEKGKSKKLKSVKELLGITIMERSSFEKNPIDFLEAKGYKEVKKDLIIKLPKYSLFELENGRKRMLASAGELQKGNELALPSKYVNFLYLASHYEKLKGSPEDNEQKQLFVEQHKHYLDEIIEQISEFSKRVILADANLDKVLSAYNKHRDKPIREQAENIIHLFTLTNLGAPAAFKYFDTTIDRKRYTSTKEVLDATLIHQSITGLYETRIDLSQLGGDGGEAAAKPAPGGGGGTLQLDDEYRLYSPLVKPDQNIQFWLEQFPQAWAETAGMGLAKQVPPQVIQLKASATPVSVRQYPLSKEAQEGIRPHVQRLIQQGILVPVQSPWNTPLLPVRKPGTNDYRPVQDLREVNKRVQDIHPTVPNPYNLLCALPPQRSWYTVLDLKDAFFCLRLHPTSQPLFAFEWRDPGTGRTGQLTWTRLPQGFKNSPTIFNEALHRDLANFRIQHPQVTLLQYVDDLLLAGATKQDCLEGTKALLLELSDLGYRASAKKAQICRREVTYLGYSLRDGQRWLTEARKKTVVQIPAPTTAKQVREFLGTAGFCRLWIPGFATLAAPLYPLTKPKGEFSWAPEHQKAFDAIKKALLSAPALALPDVTKPFTLYVDERKGVARGVLTQTLGPWRRPVAYLSKKLDPVASGWPVCLKAIAAVAILVKDADKLTLGQNITVIAPHALENIVRQPPDRWMTNARMTHYQSLLLTERVTFAPPAALNPATLLPEETDEPVTHDCHQLLIEETGVRKDLTDIPLTGEVLTWFTDGSSYVVEGKRMAGAAVVDGTRTIWASSLPEGTSAQKAELMALTQALRLAEGKSINIYTDSRYAFATAHVHGAIYKQRGWLTSAGREIKNKEEILSLLEALHLPKRLAIIHCPGHQKAKDPISRGNQMADRVAKQAAQGVNLLAGKRTADGSEFEKRTADGSEFESPKKKAKVE

SEQ ID NO: 359 - protein, 2088 aa, synthetic construct; identical to SEQ ID NO: 175

SEQ ID NO: 360 - protein, 2087 aa, synthetic construct
MPAAKRVKLDGGDKKYSIGLDIGTNSVGWAVITDEYKVPSKKFKVLGNTDRHSIKKNLIGALLFDSGETAEATRLKRTARRRYTRRKNRICYLQEIFSNEMAKVDDSFFHRLEESFLVEEDKKHERHPIFGNIVDEVAYHEKYPTIYHLRKKLVDSTDKADLRLIYLALAHMIKFRGHFLIEGDLNPDNSDVDKLFIQLVQTYNQLFEENPINASGVDAKAILSARLSKSRRLENLIAQLPGEKKNGLFGNLIALSLGLTPNFKSNFDLAEDAKLQLSKDTYDDDLDNLLAQIGDQYADLFLAAKNLSDAILLSDILRVNTEITKAPLSASMIKRYDEHHQDLTLLKALVRQQLPEKYKEIFFDQSKNGYAGYIDGGASQEEFYKFIKPILEKMDGTEELLVKLNREDLLRKQRTFDNGSIPHQIHLGELHAILRRQEDFYPFLKDNREKIEKILTFRIPYYVGPLARGNSRFAWMTRKSEETITPWNFEEVVDKGASAQSFIERMTNFDKNLPNEKVLPKHSLLYEYFTVYNELTKVKYVTEGMRKPAFLSGEQKKAIVDLLFKTNRKVTVKQLKEDYFKKIECFDSVEISGVEDRFNASLGTYHDLLKIIKDKDFLDNEENEDILEDIVLTLTLFEDREMIEERLKTYAHLFDDKVMKQLKRRRYTGWGRLSRKLINGIRDKQSGKTILDFLKSDGFANRNFMQLIHDDSLTFKEDIQKAQVSGQGDSLHEHIANLAGSPAIKKGILQTVKVVDELVKVMGRHKPENIVIEMARENQTTQKGQKNSRERMKRIEEGIKELGSQILKEHPVENTQLQNEKLYLYYLQNGRDMYVDQELDINRLSDYDVDHIVPQSFLKDDSIDNKVLTRSDKARGKSDNVPSEEVVKKMKNYWRQLLNAKLITQRKFDNLTKAERGGLSELDKAGFIKRQLVETRQITKHVAQILDSRMNTKYDENDKLIREVKVITLKSKLVSDFRKDFQFYKVREINNYHHAHDAYLNAVVGTALIKKYPKLESEFVYGDYKVYDVRKMIAKSEQEIGKATAKYFFYSNIMNFFKTEITLANGEIRKRPLIETNGETGEIVWDKGRDFATVRKVLSMPQVNIVKKTEVQTGGFSKESILPKRNSDKLIARKKDWDPKKYGGFDSPTVAYSVLVVAKVEKGKSKKLKSVKELLGITIMERSSFEKNPIDFLEAKGYKEVKKDLIIKLPKYSLFELENGRKRMLASAGELQKGNELALPSKYVNFLYLASHYEKLKGSPEDNEQKQLFVEQHKHYLDEIIEQISEFSKRVILADANLDKVLSAYNKHRDKPIREQAENIIHLFTLTNLGAPAAFKYFDTTIDRKRYTSTKEVLDATLIHQSITGLYETRIDLSQLGGDGGEAAAKGSSGGTLQLDDEYRLYSPLVKPDQNIQFWLEQFPQAWAETAGMGLAKQVPPQVIQLKASATPVSVRQYPLSKEAQEGIRPHVQRLIQQGILVPVQSPWNTPLLPVRKPGTNDYRPVQDLREVNKRVQDIHPTVPNPYNLLCALPPQRSWYTVLDLKDAFFCLRLHPTSQPLFAFEWRDPGTGRTGQLTWTRLPQGFKNSPTIFNEALHRDLANFRIQHPQVTLLQYVDDLLLAGATKQDCLEGTKALLLELSDLGYRASAKKAQICRREVTYLGYSLRDGQRWLTEARKKTVVQIPAPTTAKQVREFLGTAGFCRLWIPGFATLAAPLYPLTKPKGEFSWAPEHQKAFDAIKKALLSAPALALPDVTKPFTLYVDERKGVARGVLTQTLGPWRRPVAYLSKKLDPVASGWPVCLKAIAAVAILVKDADKLTLGQNITVIAPHALENIVRQPPDRWMTNARMTHYQSLLLTERVTFAPPAALNPATLLPEETDEPVTHDCHQLLIEETGVRKDLTDIPLTGEVLTWFTDGSSYVVEGKRMAGAAVVDGTRTIWASSLPEGTSAQKAELMALTQALRLAEGKSINIYTDSRYAFATAHVHGAIYKQRGWLTSAGREIKNKEEILSLLEALHLPKRLAIIHCPGHQKAKDPISRGNQMADRVAKQAAQGVNLLAGKRTADGSEFEKRTADGSEFESPKKKAKVE

SEQ ID NO: 361 - protein, 2090 aa, synthetic construct
MPAAKRVKLDGGDKKYSIGLDIGTNSVGWAVITDEYKVPSKKFKVLGNTDRHSIKKNLIGALLFDSGETAEATRLKRTARRRYTRRKNRICYLQEIFSNEMAKVDDSFFHRLEESFLVEEDKKHERHPIFGNIVDEVAYHEKYPTIYHLRKKLVDSTDKADLRLIYLALAHMIKFRGHFLIEGDLNPDNSDVDKLFIQLVQTYNQLFEENPINASGVDAKAILSARLSKSRRLENLIAQLPGEKKNGLFGNLIALSLGLTPNFKSNFDLAEDAKLQLSKDTYDDDLDNLLAQIGDQYADLFLAAKNLSDAILLSDILRVNTEITKAPLSASMIKRYDEHHQDLTLLKALVRQQLPEKYKEIFFDQSKNGYAGYIDGGASQEEFYKFIKPILEKMDGTEELLVKLNREDLLRKQRTFDNGSIPHQIHLGELHAILRRQEDFYPFLKDNREKIEKILTFRIPYYVGPLARGNSRFAWMTRKSEETITPWNFEEVVDKGASAQSFIERMTNFDKNLPNEKVLPKHSLLYEYFTVYNELTKVKYVTEGMRKPAFLSGEQKKAIVDLLFKTNRKVTVKQLKEDYFKKIECFDSVEISGVEDRFNASLGTYHDLLKIIKDKDFLDNEENEDILEDIVLTLTLFEDREMIEERLKTYAHLFDDKVMKQLKRRRYTGWGRLSRKLINGIRDKQSGKTILDFLKSDGFANRNFMQLIHDDSLTFKEDIQKAQVSGQGDSLHEHIANLAGSPAIKKGILQTVKVVDELVKVMGRHKPENIVIEMARENQTTQKGQKNSRERMKRIEEGIKELGSQILKEHPVENTQLQNEKLYLYYLQNGRDMYVDQELDINRLSDYDVDHIVPQSFLKDDSIDNKVLTRSDKARGKSDNVPSEEVVKKMKNYWRQLLNAKLITQRKFDNLTKAERGGLSELDKAGFIKRQLVETRQITKHVAQILDSRMNTKYDENDKLIREVKVITLKSKLVSDFRKDFQFYKVREINNYHHAHDAYLNAVVGTALIKKYPKLESEFVYGDYKVYDVRKMIAKSEQEIGKATAKYFFYSNIMNFFKTEITLANGEIRKRPLIETNGETGEIVWDKGRDFATVRKVLSMPQVNIVKKTEVQTGGFSKESILPKRNSDKLIARKKDWDPKKYGGFDSPTVAYSVLVVAKVEKGKSKKLKSVKELLGITIMERSSFEKNPIDFLEAKGYKEVKKDLIIKLPKYSLFELENGRKRMLASAGELQKGNELALPSKYVNFLYLASHYEKLKGSPEDNEQKQLFVEQHKHYLDEIIEQISEFSKRVILADANLDKVLSAYNKHRDKPIREQAENIIHLFTLTNLGAPAAFKYFDTTIDRKRYTSTKEVLDATLIHQSITGLYETRIDLSQLGGDGGGSSEAAAKGGSGGTLQLDDEYRLYSPLVKPDQNIQFWLEQFPQAWAETAGMGLAKQVPPQVIQLKASATPVSVRQYPLSKEAQEGIRPHVQRLIQQGILVPVQSPWNTPLLPVRKPGTNDYRPVQDLREVNKRVQDIHPTVPNPYNLLCALPPQRSWYTVLDLKDAFFCLRLHPTSQPLFAFEWRDPGTGRTGQLTWTRLPQGFKNSPTIFNEALHRDLANFRIQHPQVTLLQYVDDLLLAGATKQDCLEGTKALLLELSDLGYRASAKKAQICRREVTYLGYSLRDGQRWLTEARKKTVVQIPAPTTAKQVREFLGTAGFCRLWIPGFATLAAPLYPLTKPKGEFSWAPEHQKAFDAIKKALLSAPALALPDVTKPFTLYVDERKGVARGVLTQTLGPWRRPVAYLSKKLDPVASGWPVCLKAIAAVAILVKDADKLTLGQNITVIAPHALENIVRQPPDRWMTNARMTHYQSLLLTERVTFAPPAALNPATLLPEETDEPVTHDCHQLLIEETGVRKDLTDIPLTGEVLTWFTDGSSYVVEGKRMAGAAVVDGTRTIWASSLPEGTSAQKAELMALTQALRLAEGKSINIYTDSRYAFATAHVHGAIYKQRGWLTSAGREIKNKEEILSLLEALHLPKRLAIIHCPGHQKAKDPISRGNQMADRVAKQAAQGVNLLAGKRTADGSEFEKRTADGSEFESPKKKAKVE

SEQ ID NO: 362 - protein, 2087 aa, synthetic construct; identical to SEQ ID NO: 114

SEQ ID NO: 363 - protein, 2090 aa, synthetic construct; identical to SEQ ID NO: 139

SEQ ID NO: 364 - protein, 2088 aa, synthetic construct; identical to SEQ ID NO: 181

SEQ ID NO: 365 - protein, 2090 aa, synthetic construct; identical to SEQ ID NO: 133

SEQ ID NO: 366 - protein, 2084 aa, synthetic construct; identical to SEQ ID NO: 163

SEQ ID NO: 367 - protein, 2084 aa, synthetic construct; identical to SEQ ID NO: 166

SEQ ID NO: 368 - protein, 2090 aa, synthetic construct; identical to SEQ ID NO: 170

SEQ ID NO: 369 - protein, 2085 aa, synthetic construct; identical to SEQ ID NO: 165

SEQ ID NO: 370 - protein, 2091 aa, synthetic construct; identical to SEQ ID NO: 153

SEQ ID NO: 371 - protein, 2088 aa, synthetic construct
MPAAKRVKLDGGDKKYSIGLDIGTNSVGWAVITDEYKVPSKKFKVLGNTDRHSIKKNLIGALLFDSGETAEATRLKRTARRRYTRRKNRICYLQEIFSNEMAKVDDSFFHRLEESFLVEEDKKHERHPIFGNIVDEVAYHEKYPTIYHLRKKLVDSTDKADLRLIYLALAHMIKFRGHFLIEGDLNPDNSDVDKLFIQLVQTYNQLFEENPINASGVDAKAILSARLSKSRRLENLIAQLPGEKKNGLFGNLIALSLGLTPNFKSNFDLAEDAKLQLSKDTYDDDLDNLLAQIGDQYADLFLAAKNLSDAILLSDILRVNTEITKAPLSASMIKRYDEHHQDLTLLKALVRQQLPEKYKEIFFDQSKNGYAGYIDGGASQEEFYKFIKPILEKMDGTEELLVKLNREDLLRKQRTFDNGSIPHQIHLGELHAILRRQEDFYPFLKDNREKIEKILTFRIPYYVGPLARGNSRFAWMTRKSEETITPWNFEEVVDKGASAQSFIERMTNFDKNLPNEKVLPKHSLLYEYFTVYNELTKVKYVTEGMRKPAFLSGEQKKAIVDLLFKTNRKVTVKQLKEDYFKKIECFDSVEISGVEDRFNASLGTYHDLLKIIKDKDFLDNEENEDILEDIVLTLTLFEDREMIEERLKTYAHLFDDKVMKQLKRRRYTGWGRLSRKLINGIRDKQSGKTILDFLKSDGFANRNFMQLIHDDSLTFKEDIQKAQVSGQGDSLHEHIANLAGSPAIKKGILQTVKVVDELVKVMGRHKPENIVIEMARENQTTQKGQKNSRERMKRIEEGIKELGSQILKEHPVENTQLQNEKLYLYYLQNGRDMYVDQELDINRLSDYDVDHIVPQSFLKDDSIDNKVLTRSDKARGKSDNVPSEEVVKKMKNYWRQLLNAKLITQRKFDNLTKAERGGLSELDKAGFIKRQLVETRQITKHVAQILDSRMNTKYDENDKLIREVKVITLKSKLVSDFRKDFQFYKVREINNYHHAHDAYLNAVVGTALIKKYPKLESEFVYGDYKVYDVRKMIAKSEQEIGKATAKYFFYSNIMNFFKTEITLANGEIRKRPLIETNGETGEIVWDKGRDFATVRKVLSMPQVNIVKKTEVQTGGFSKESILPKRNSDKLIARKKDWDPKKYGGFDSPTVAYSVLVVAKVEKGKSKKLKSVKELLGITIMERSSFEKNPIDFLEAKGYKEVKKDLIIKLPKYSLFELENGRKRMLASAGELQKGNELALPSKYVNFLYLASHYEKLKGSPEDNEQKQLFVEQHKHYLDEIIEQISEFSKRVILADANLDKVLSAYNKHRDKPIREQAENIIHLFTLTNLGAPAAFKYFDTTIDRKRYTSTKEVLDATLIHQSITGLYETRIDLSQLGGDGGPAPGGGGSSGGTLQLDDEYRLYSPLVKPDQNIQFWLEQFPQAWAETAGMGLAKQVPPQVIQLKASATPVSVRQYPLSKEAQEGIRPHVQRLIQQGILVPVQSPWNTPLLPVRKPGTNDYRPVQDLREVNKRVQDIHPTVPNPYNLLCALPPQRSWYTVLDLKDAFFCLRLHPTSQPLFAFEWRDPGTGRTGQLTWTRLPQGFKNSPTIFNEALHRDLANFRIQHPQVTLLQYVDDLLLAGATKQDCLEGTKALLLELSDLGYRASAKKAQICRREVTYLGYSLRDGQRWLTEARKKTVVQIPAPTTAKQVREFLGTAGFCRLWIPGFATLAAPLYPLTKPKGEFSWAPEHQKAFDAIKKALLSAPALALPDVTKPFTLYVDERKGVARGVLTQTLGPWRRPVAYLSKKLDPVASGWPVCLKAIAAVAILVKDADKLTLGQNITVIAPHALENIVRQPPDRWMTNARMTHYQSLLLTERVTFAPPAALNPATLLPEETDEPVTHDCHQLLIEETGVRKDLTDIPLTGEVLTWFTDGSSYVVEGKRMAGAAVVDGTRTIWASSLPEGTSAQKAELMALTQALRLAEGKSINIYTDSRYAFATAHVHGAIYKQRGWLTSAGREIKNKEEILSLLEALHLPKRLAIIHCPGHQKAKDPISRGNQMADRVAKQAAQGVNLLAGKRTADGSEFEKRTADGSEFESPKKKAKVE

SEQ ID NO: 372 - protein, 2090 aa, synthetic construct; identical to SEQ ID NO: 172

SEQ ID NO: 373 - protein, 2088 aa, synthetic construct
MPAAKRVKLDGGDKKYSIGLDIGTNSVGWAVITDEYKVPSKKFKVLGNTDRHSIKKNLIGALLFDSGETAEATRLKRTARRRYTRRKNRICYLQEIFSNEMAKVDDSFFHRLEESFLVEEDKKHERHPIFGNIVDEVAYHEKYPTIYHLRKKLVDSTDKADLRLIYLALAHMIKFRGHFLIEGDLNPDNSDVDKLFIQLVQTYNQLFEENPINASGVDAKAILSARLSKSRRLENLIAQLPGEKKNGLFGNLIALSLGLTPNFKSNFDLAEDAKLQLSKDTYDDDLDNLLAQIGDQYADLFLAAKNLSDAILLSDILRVNTEITKAPLSASMIKRYDEHHQDLTLLKALVRQQLPEKYKEIFFDQSKNGYAGYIDGGASQEEFYKFIKPILEKMDGTEELLVKLNREDLLRKQRTFDNGSIPHQIHLGELHAILRRQEDFYPFLKDNREKIEKILTFRIPYYVGPLARGNSRFAWMTRKSEETITPWNFEEVVDKGASAQSFIERMTNFDKNLPNEKVLPKHSLLYEYFTVYNELTKVKYVTEGMRKPAFLSGEQKKAIVDLLFKTNRKVTVKQLKEDYFKKIECFDSVEISGVEDRFNASLGTYHDLLKIIKDKDFLDNEENEDILEDIVLTLTLFEDREMIEERLKTYAHLFDDKVMKQLKRRRYTGWGRLSRKLINGIRDKQSGKTILDFLKSDGFANRNFMQLIHDDSLTFKEDIQKAQVSGQGDSLHEHIANLAGSPAIKKGILQTVKVVDELVKVMGRHKPENIVIEMARENQTTQKGQKNSRERMKRIEEGIKELGSQILKEHPVENTQLQNEKLYLYYLQNGRDMYVDQELDINRLSDYDVDHIVPQSFLKDDSIDNKVLTRSDKARGKSDNVPSEEVVKKMKNYWRQLLNAKLITQRKFDNLTKAERGGLSELDKAGFIKRQLVETRQITKHVAQILDSRMNTKYDENDKLIREVKVITLKSKLVSDFRKDFQFYKVREINNYHHAHDAYLNAVVGTALIKKYPKLESEFVYGDYKVYDVRKMIAKSEQEIGKATAKYFFYSNIMNFFKTEITLANGEIRKRPLIETNGETGEIVWDKGRDFATVRKVLSMPQVNIVKKTEVQTGGFSKESILPKRNSDKLIARKKDWDPKKYGGFDSPTVAYSVLVVAKVEKGKSKKLKSVKELLGITIMERSSFEKNPIDFLEAKGYKEVKKDLIIKLPKYSLFELENGRKRMLASAGELQKGNELALPSKYVNFLYLASHYEKLKGSPEDNEQKQLFVEQHKHYLDEIIEQISEFSKRVILADANLDKVLSAYNKHRDKPIREQAENIIHLFTLTNLGAPAAFKYFDTTIDRKRYTSTKEVLDATLIHQSITGLYETRIDLSQLGGDGGGGSGGGPAPGGTLQLDDEYRLYSPLVKPDQNIQFWLEQFPQAWAETAGMGLAKQVPPQVIQLKASATPVSVRQYPLSKEAQEGIRPHVQRLIQQGILVPVQSPWNTPLLPVRKPGTNDYRPVQDLREVNKRVQDIHPTVPNPYNLLCALPPQRSWYTVLDLKDAFFCLRLHPTSQPLFAFEWRDPGTGRTGQLTWTRLPQGFKNSPTIFNEALHRDLANFRIQHPQVTLLQYVDDLLLAGATKQDCLEGTKALLLELSDLGYRASAKKAQICRREVTYLGYSLRDGQRWLTEARKKTVVQIPAPTTAKQVREFLGTAGFCRLWIPGFATLAAPLYPLTKPKGEFSWAPEHQKAFDAIKKALLSAPALALPDVTKPFTLYVDERKGVARGVLTQTLGPWRRPVAYLSKKLDPVASGWPVCLKAIAAVAILVKDADKLTLGQNITVIAPHALENIVRQPPDRWMTNARMTHYQSLLLTERVTFAPPAALNPATLLPEETDEPVTHDCHQLLIEETGVRKDLTDIPLTGEVLTWFTDGSSYVVEGKRMAGAAVVDGTRTIWASSLPEGTSAQKAELMALTQALRLAEGKSINIYTDSRYAFATAHVHGAIYKQRGWLTSAGREIKNKEEILSLLEALHLPKRLAIIHCPGHQKAKDPISRGNQMADRVAKQAAQGVNLLAGKRTADGSEFEKRTADGSEFESPKKKAKVE

SEQ ID NO: 374 - protein, 2094 aa, synthetic construct; identical to SEQ ID NO: 118

SEQ ID NO: 375 - protein, 2087 aa, synthetic construct
MPAAKRVKLDGGDKKYSIGLDIGTNSVGWAVITDEYKVPSKKFKVLGNTDRHSIKKNLIGALLFDSGETAEATRLKRTARRRYTRRKNRICYLQEIFSNEMAKVDDSFFHRLEESFLVEEDKKHERHPIFGNIVDEVAYHEKYPTIYHLRKKLVDSTDKADLRLIYLALAHMIKFRGHFLIEGDLNPDNSDVDKLFIQLVQTYNQLFEENPINASGVDAKAILSARLSKSRRLENLIAQLPGEKKNGLFGNLIALSLGLTPNFKSNFDLAEDAKLQLSKDTYDDDLDNLLAQIGDQYADLFLAAKNLSDAILLSDILRVNTEITKAPLSASMIKRYDEHHQDLTLLKALVRQQLPEKYKEIFFDQSKNGYAGYIDGGASQEEFYKFIKPILEKMDGTEELLVKLNREDLLRKQRTFDNGSIPHQIHLGELHAILRRQEDFYPFLKDNREKIEKILTFRIPYYVGPLARGNSRFAWMTRKSEETITPWNFEEVVDKGASAQSFIERMTNFDKNLPNEKVLPKHSLLYEYFTVYNELTKVKYVTEGMRKPAFLSGEQKKAIVDLLFKTNRKVTVKQLKEDYFKKIECFDSVEISGVEDRFNASLGTYHDLLKIIKDKDFLDNEENEDILEDIVLTLTLFEDREMIEERLKTYAHLFDDKVMKQLKRRRYTGWGRLSRKLINGIRDKQSGKTILDFLKSDGFANRNFMQLIHDDSLTFKEDIQKAQVSGQGDSLHEHIANLAGSPAIKKGILQTVKVVDELVKVMGRHKPENIVIEMARENQTTQKGQKNSRERMKRIEEGIKELGSQILKEHPVENTQLQNEKLYLYYLQNGRDMYVDQELDINRLSDYDVDHIVPQSFLKDDSIDNKVLTRSDKARGKSDNVPSEEVVKKMKNYWRQLLNAKLITQRKFDNLTKAERGGLSELDKAGFIKRQLVETRQITKHVAQILDSRMNTKYDENDKLIREVKVITLKSKLVSDFRKDFQFYKVREINNYHHAHDAYLNAVVGTALIKKYPKLESEFVYGDYKVYDVRKMIAKSEQEIGKATAKYFFYSNIMNFFKTEITLANGEIRKRPLIETNGETGEIVWDKGRDFATVRKVLSMPQVNIVKKTEVQTGGFSKESILPKRNSDKLIARKKDWDPKKYGGFDSPTVAYSVLVVAKVEKGKSKKLKSVKELLGITIMERSSFEKNPIDFLEAKGYKEVKKDLIIKLPKYSLFELENGRKRMLASAGELQKGNELALPSKYVNFLYLASHYEKLKGSPEDNEQKQLFVEQHKHYLDEIIEQISEFSKRVILADANLDKVLSAYNKHRDKPIREQAENIIHLFTLTNLGAPAAFKYFDTTIDRKRYTSTKEVLDATLIHQSITGLYETRIDLSQLGGDGGPAPEAAAKGGTLQLDDEYRLYSPLVKPDQNIQFWLEQFPQAWAETAGMGLAKQVPPQVIQLKASATPVSVRQYPLSKEAQEGIRPHVQRLIQQGILVPVQSPWNTPLLPVRKPGTNDYRPVQDLREVNKRVQDIHPTVPNPYNLLCALPPQRSWYTVLDLKDAFFCLRLHPTSQPLFAFEWRDPGTGRTGQLTWTRLPQGFKNSPTIFNEALHRDLANFRIQHPQVTLLQYVDDLLLAGATKQDCLEGTKALLLELSDLGYRASAKKAQICRREVTYLGYSLRDGQRWLTEARKKTVVQIPAPTTAKQVREFLGTAGFCRLWIPGFATLAAPLYPLTKPKGEFSWAPEHQKAFDAIKKALLSAPALALPDVTKPFTLYVDERKGVARGVLTQTLGPWRRPVAYLSKKLDPVASGWPVCLKAIAAVAILVKDADKLTLGQNITVIAPHALENIVRQPPDRWMTNARMTHYQSLLLTERVTFAPPAALNPATLLPEETDEPVTHDCHQLLIEETGVRKDLTDIPLTGEVLTWFTDGSSYVVEGKRMAGAAVVDGTRTIWASSLPEGTSAQKAELMALTQALRLAEGKSINIYTDSRYAFATAHVHGAIYKQRGWLTSAGREIKNKEEILSLLEALHLPKRLAIIHCPGHQKAKDPISRGNQMADRVAKQAAQGVNLLAGKRTADGSEFEKRTADGSEFESPKKKAKVE

SEQ ID NO: 376 - protein, 2090 aa, synthetic construct; identical to SEQ ID NO: 154

SEQ ID NO: 377 - protein, 2091 aa, synthetic construct; identical to SEQ ID NO: 145

SEQ ID NO: 378 - protein, 2089 aa, synthetic construct
MPAAKRVKLDGGDKKYSIGLDIGTNSVGWAVITDEYKVPSKKFKVLGNTDRHSIKKNLIGALLFDSGETAEATRLKRTARRRYTRRKNRICYLQEIFSNEMAKVDDSFFHRLEESFLVEEDKKHERHPIFGNIVDEVAYHEKYPTIYHLRKKLVDSTDKADLRLIYLALAHMIKFRGHFLIEGDLNPDNSDVDKLFIQLVQTYNQLFEENPINASGVDAKAILSARLSKSRRLENLIAQLPGEKKNGLFGNLIALSLGLTPNFKSNFDLAEDAKLQLSKDTYDDDLDNLLAQIGDQYADLFLAAKNLSDAILLSDILRVNTEITKAPLSASMIKRYDEHHQDLTLLKALVRQQLPEKYKEIFFDQSKNGYAGYIDGGASQEEFYKFIKPILEKMDGTEELLVKLNREDLLRKQRTFDNGSIPHQIHLGELHAILRRQEDFYPFLKDNREKIEKILTFRIPYYVGPLARGNSRFAWMTRKSEETITPWNFEEVVDKGASAQSFIERMTNFDKNLPNEKVLPKHSLLYEYFTVYNELTKVKYVTEGMRKPAFLSGEQKKAIVDLLFKTNRKVTVKQLKEDYFKKIECFDSVEISGVEDRFNASLGTYHDLLKIIKDKDFLDNEENEDILEDIVLTLTLFEDREMIEERLKTYAHLFDDKVMKQLKRRRYTGWGRLSRKLINGIRDKQSGKTILDFLKSDGFANRNFMQLIHDDSLTFKEDIQKAQVSGQGDSLHEHIANLAGSPAIKKGILQTVKVVDELVKVMGRHKPENIVIEMARENQTTQKGQKNSRERMKRIEEGIKELGSQILKEHPVENTQLQNEKLYLYYLQNGRDMYVDQELDINRLSDYDVDHIVPQSFLKDDSIDNKVLTRSDKARGKSDNVPSEEVVKKMKNYWRQLLNAKLITQRKFDNLTKAERGGLSELDKAGFIKRQLVETRQITKHVAQILDSRMNTKYDENDKLIREVKVITLKSKLVSDFRKDFQFYKVREINNYHHAHDAYLNAVVGTALIKKYPKLESEFVYGDYKVYDVRKMIAKSEQEIGKATAKYFFYSNIMNFFKTEITLANGEIRKRPLIETNGETGEIVWDKGRDFATVRKVLSMPQVNIVKKTEVQTGGFSKESILPKRNSDKLIARKKDWDPKKYGGFDSPTVAYSVLVVAKVEKGKSKKLKSVKELLGITIMERSSFEKNPIDFLEAKGYKEVKKDLIIKLPKYSLFELENGRKRMLASAGELQKGNELALPSKYVNFLYLASHYEKLKGSPEDNEQKQLFVEQHKHYLDEIIEQISEFSKRVILADANLDKVLSAYNKHRDKPIREQAENIIHLFTLTNLGAPAAFKYFDTTIDRKRYTSTKEVLDATLIHQSITGLYETRIDLSQLGGDGGGGGGSGGGGSGGTLQLDDEYRLYSPLVKPDQNIQFWLEQFPQAWAETAGMGLAKQVPPQVIQLKASATPVSVRQYPLSKEAQEGIRPHVQRLIQQGILVPVQSPWNTPLLPVRKPGTNDYRPVQDLREVNKRVQDIHPTVPNPYNLLCALPPQRSWYTVLDLKDAFFCLRLHPTSQPLFAFEWRDPGTGRTGQLTWTRLPQGFKNSPTIFNEALHRDLANFRIQHPQVTLLQYVDDLLLAGATKQDCLEGTKALLLELSDLGYRASAKKAQICRREVTYLGYSLRDGQRWLTEARKKTVVQIPAPTTAKQVREFLGTAGFCRLWIPGFATLAAPLYPLTKPKGEFSWAPEHQKAFDAIKKALLSAPALALPDVTKPFTLYVDERKGVARGVLTQTLGPWRRPVAYLSKKLDPVASGWPVCLKAIAAVAILVKDADKLTLGQNITVIAPHALENIVRQPPDRWMTNARMTHYQSLLLTERVTFAPPAALNPATLLPEETDEPVTHDCHQLLIEETGVRKDLTDIPLTGEVLTWFTDGSSYVVEGKRMAGAAVVDGTRTIWASSLPEGTSAQKAELMALTQALRLAEGKSINIYTDSRYAFATAHVHGAIYKQRGWLTSAGREIKNKEEILSLLEALHLPKRLAIIHCPGHQKAKDPISRGNQMADRVAKQAAQGVNLLAGKRTADGSEFEKRTADGSEFESPKKKAKVE

SEQ ID NO: 379 - protein, 2088 aa, synthetic construct
MPAAKRVKLDGGDKKYSIGLDIGTNSVGWAVITDEYKVPSKKFKVLGNTDRHSIKKNLIGALLFDSGETAEATRLKRTARRRYTRRKNRICYLQEIFSNEMAKVDDSFFHRLEESFLVEEDKKHERHPIFGNIVDEVAYHEKYPTIYHLRKKLVDSTDKADLRLIYLALAHMIKFRGHFLIEGDLNPDNSDVDKLFIQLVQTYNQLFEENPINASGVDAKAILSARLSKSRRLENLIAQLPGEKKNGLFGNLIALSLGLTPNFKSNFDLAEDAKLQLSKDTYDDDLDNLLAQIGDQYADLFLAAKNLSDAILLSDILRVNTEITKAPLSASMIKRYDEHHQDLTLLKALVRQQLPEKYKEIFFDQSKNGYAGYIDGGASQEEFYKFIKPILEKMDGTEELLVKLNREDLLRKQRTFDNGSIPHQIHLGELHAILRRQEDFYPFLKDNREKIEKILTFRIPYYVGPLARGNSRFAWMTRKSEETITPWNFEEVVDKGASAQSFIERMTNFDKNLPNEKVLPKHSLLYEYFTVYNELTKVKYVTEGMRKPAFLSGEQKKAIVDLLFKTNRKVTVKQLKEDYFKKIECFDSVEISGVEDRFNASLGTYHDLLKIIKDKDFLDNEENEDILEDIVLTLTLFEDREMIEERLKTYAHLFDDKVMKQLKRRRYTGWGRLSRKLINGIRDKQSGKTILDFLKSDGFANRNFMQLIHDDSLTFKEDIQKAQVSGQGDSLHEHIANLAGSPAIKKGILQTVKVVDELVKVMGRHKPENIVIEMARENQTTQKGQKNSRERMKRIEEGIKELGSQILKEHPVENTQLQNEKLYLYYLQNGRDMYVDQELDINRLSDYDVDHIVPQSFLKDDSIDNKVLTRSDKARGKSDNVPSEEVVKKMKNYWRQLLNAKLITQRKFDNLTKAERGGLSELDKAGFIKRQLVETRQITKHVAQILDSRMNTKYDENDKLIREVKVITLKSKLVSDFRKDFQFYKVREINNYHHAHDAYLNAVVGTALIKKYPKLESEFVYGDYKVYDVRKMIAKSEQEIGKATAKYFFYSNIMNFFKTEITLANGEIRKRPLIETNGETGEIVWDKGRDFATVRKVLSMPQVNIVKKTEVQTGGFSKESILPKRNSDKLIARKKDWDPKKYGGFDSPTVAYSVLVVAKVEKGKSKKLKSVKELLGITIMERSSFEKNPIDFLEAKGYKEVKKDLIIKLPKYSLFELENGRKRMLASAGELQKGNELALPSKYVNFLYLASHYEKLKGSPEDNEQKQLFVEQHKHYLDEIIEQISEFSKRVILADANLDKVLSAYNKHRDKPIREQAENIIHLFTLTNLGAPAAFKYFDTTIDRKRYTSTKEVLDATLIHQSITGLYETRIDLSQLGGDGGGSSPAPGGGGGTLQLDDEYRLYSPLVKPDQNIQFWLEQFPQAWAETAGMGLAKQVPPQVIQLKASATPVSVRQYPLSKEAQEGIRPHVQRLIQQGILVPVQSPWNTPLLPVRKPGTNDYRPVQDLREVNKRVQDIHPTVPNPYNLLCALPPQRSWYTVLDLKDAFFCLRLHPTSQPLFAFEWRDPGTGRTGQLTWTRLPQGFKNSPTIFNEALHRDLANFRIQHPQVTLLQYVDDLLLAGATKQDCLEGTKALLLELSDLGYRASAKKAQICRREVTYLGYSLRDGQRWLTEARKKTVVQIPAPTTAKQVREFLGTAGFCRLWIPGFATLAAPLYPLTKPKGEFSWAPEHQKAFDAIKKALLSAPALALPDVTKPFTLYVDERKGVARGVLTQTLGPWRRPVAYLSKKLDPVASGWPVCLKAIAAVAILVKDADKLTLGQNITVIAPHALENIVRQPPDRWMTNARMTHYQSLLLTERVTFAPPAALNPATLLPEETDEPVTHDCHQLLIEETGVRKDLTDIPLTGEVLTWFTDGSSYVVEGKRMAGAAVVDGTRTIWASSLPEGTSAQKAELMALTQALRLAEGKSINIYTDSRYAFATAHVHGAIYKQRGWLTSAGREIKNKEEILSLLEALHLPKRLAIIHCPGHQKAKDPISRGNQMADRVAKQAAQGVNLLAGKRTADGSEFEKRTADGSEFESPKKKAKVE

SEQ ID NO: 380 - protein, 2087 aa, synthetic construct; identical to SEQ ID NO: 185

SEQ ID NO: 381 - protein, 2086 aa, synthetic construct; identical to SEQ ID NO: 152

SEQ ID NO: 382 - protein, 2088 aa, synthetic construct
MPAAKRVKLDGGDKKYSIGLDIGTNSVGWAVITDEYKVPSKKFKVLGNTDRHSIKKNLIGALLFDSGETAEATRLKRTARRRYTRRKNRICYLQEIFSNEMAKVDDSFFHRLEESFLVEEDKKHERHPIFGNIVDEVAYHEKYPTIYHLRKKLVDSTDKADLRLIYLALAHMIKFRGHFLIEGDLNPDNSDVDKLFIQLVQTYNQLFEENPINASGVDAKAILSARLSKSRRLENLIAQLPGEKKNGLFGNLIALSLGLTPNFKSNFDLAEDAKLQLSKDTYDDDLDNLLAQIGDQYADLFLAAKNLSDAILLSDILRVNTEITKAPLSASMIKRYDEHHQDLTLLKALVRQQLPEKYKEIFFDQSKNGYAGYIDGGASQEEFYKFIKPILEKMDGTEELLVKLNREDLLRKQRTFDNGSIPHQIHLGELHAILRRQEDFYPFLKDNREKIEKILTFRIPYYVGPLARGNSRFAWMTRKSEETITPWNFEEVVDKGASAQSFIERMTNFDKNLPNEKVLPKHSLLYEYFTVYNELTKVKYVTEGMRKPAFLSGEQKKAIVDLLFKTNRKVTVKQLKEDYFKKIECFDSVEISGVEDRFNASLGTYHDLLKIIKDKDFLDNEENEDILEDIVLTLTLFEDREMIEERLKTYAHLFDDKVMKQLKRRRYTGWGRLSRKLINGIRDKQSGKTILDFLKSDGFANRNFMQLIHDDSLTFKEDIQKAQVSGQGDSLHEHIANLAGSPAIKKGILQTVKVVDELVKVMGRHKPENIVIEMARENQTTQKGQKNSRERMKRIEEGIKELGSQILKEHPVENTQLQNEKLYLYYLQNGRDMYVDQELDINRLSDYDVDHIVPQSFLKDDSIDNKVLTRSDKARGKSDNVPSEEVVKKMKNYWRQLLNAKLITQRKFDNLTKAERGGLSELDKAGFIKRQLVETRQITKHVAQILDSRMNTKYDENDKLIREVKVITLKSKLVSDFRKDFQFYKVREINNYHHAHDAYLNAVVGTALIKKYPKLESEFVYGDYKVYDVRKMIAKSEQEIGKATAKYFFYSNIMNFFKTEITLANGEIRKRPLIETNGETGEIVWDKGRDFATVRKVLSMPQVNIVKKTEVQTGGFSKESILPKRNSDKLIARKKDWDPKKYGGFDSPTVAYSVLVVAKVEKGKSKKLKSVKELLGITIMERSSFEKNPIDFLEAKGYKEVKKDLIIKLPKYSLFELENGRKRMLASAGELQKGNELALPSKYVNFLYLASHYEKLKGSPEDNEQKQLFVEQHKHYLDEIIEQISEFSKRVILADANLDKVLSAYNKHRDKPIREQAENIIHLFTLTNLGAPAAFKYFDTTIDRKRYTSTKEVLDATLIHQSITGLYETRIDLSQLGGDGGPAPAPAPAPGGTLQLDDEYRLYSPLVKPDQNIQFWLEQFPQAWAETAGMGLAKQVPPQVIQLKASATPVSVRQYPLSKEAQEGIRPHVQRLIQQGILVPVQSPWNTPLLPVRKPGTNDYRPVQDLREVNKRVQDIHPTVPNPYNLLCALPPQRSWYTVLDLKDAFFCLRLHPTSQPLFAFEWRDPGTGRTGQLTWTRLPQGFKNSPTIFNEALHRDLANFRIQHPQVTLLQYVDDLLLAGATKQDCLEGTKALLLELSDLGYRASAKKAQICRREVTYLGYSLRDGQRWLTEARKKTVVQIPAPTTAKQVREFLGTAGFCRLWIPGFATLAAPLYPLTKPKGEFSWAPEHQKAFDAIKKALLSAPALALPDVTKPFTLYVDERKGVARGVLTQTLGPWRRPVAYLSKKLDPVASGWPVCLKAIAAVAILVKDADKLTLGQNITVIAPHALENIVRQPPDRWMTNARMTHYQSLLLTERVTFAPPAALNPATLLPEETDEPVTHDCHQLLIEETGVRKDLTDIPLTGEVLTWFTDGSSYVVEGKRMAGAAVVDGTRTIWASSLPEGTSAQKAELMALTQALRLAEGKSINIYTDSRYAFATAHVHGAIYKQRGWLTSAGREIKNKEEILSLLEALHLPKRLAIIHCPGHQKAKDPISRGNQMADRVAKQAAQGVNLLAGKRTADGSEFEKRTADGSEFESPKKKAKVE

SEQ ID NO: 383 - protein, 2085 aa, synthetic construct; identical to SEQ ID NO: 178

SEQ ID NO: 384 - protein, 2088 aa, synthetic construct; identical to SEQ ID NO: 144

SEQ ID NO: 385 - protein, 2090 aa, synthetic construct
MPAAKRVKLDGGDKKYSIGLDIGTNSVGWAVITDEYKVPSKKFKVLGNTDRHSIKKNLIGALLFDSGETAEATRLKRTARRRYTRRKNRICYLQEIFSNEMAKVDDSFFHRLEESFLVEEDKKHERHPIFGNIVDEVAYHEKYPTIYHLRKKLVDSTDKADLRLIYLALAHMIKFRGHFLIEGDLNPDNSDVDKLFIQLVQTYNQLFEENPINASGVDAKAILSARLSKSRRLENLIAQLPGEKKNGLFGNLIALSLGLTPNFKSNFDLAEDAKLQLSKDTYDDDLDNLLAQIGDQYADLFLAAKNLSDAILLSDILRVNTEITKAPLSASMIKRYDEHHQDLTLLKALVRQQLPEKYKEIFFDQSKNGYAGYIDGGASQEEFYKFIKPILEKMDGTEELLVKLNREDLLRKQRTFDNGSIPHQIHLGELHAILRRQEDFYPFLKDNREKIEKILTFRIPYYVGPLARGNSRFAWMTRKSEETITPWNFEEVVDKGASAQSFIERMTNFDKNLPNEKVLPKHSLLYEYFTVYNELTKVKYVTEGMRKPAFLSGEQKKAIVDLLFKTNRKVTVKQLKEDYFKKIECFDSVEISGVEDRFNASLGTYHDLLKIIKDKDFLDNEENEDILEDIVLTLTLFEDREMIEERLKTYAHLFDDKVMKQLKRRRYTGWGRLSRKLINGIRDKQSGKTILDFLKSDGFANRNFMQLIHDDSLTFKEDIQKAQVSGQGDSLHEHIANLAGSPAIKKGILQTVKVVDELVKVMGRHKPENIVIEMARENQTTQKGQKNSRERMKRIEEGIKELGSQILKEHPVENTQLQNEKLYLYYLQNGRDMYVDQELDINRLSDYDVDHIVPQSFLKDDSIDNKVLTRSDKARGKSDNVPSEEVVKKMKNYWRQLLNAKLITQRKFDNLTKAERGGLSELDKAGFIKRQLVETRQITKHVAQILDSRMNTKYDENDKLIREVKVITLKSKLVSDFRKDFQFYKVREINNYHHAHDAYLNAVVGTALIKKYPKLESEFVYGDYKVYDVRKMIAKSEQEIGKATAKYFFYSNIMNFFKTEITLANGEIRKRPLIETNGETGEIVWDKGRDFATVRKVLSMPQVNIVKKTEVQTGGFSKESILPKRNSDKLIARKKDWDPKKYGGFDSPTVAYSVLVVAKVEKGKSKKLKSVKELLGITIMERSSFEKNPIDFLEAKGYKEVKKDLIIKLPKYSLFELENGRKRMLASAGELQKGNELALPSKYVNFLYLASHYEKLKGSPEDNEQKQLFVEQHKHYLDEIIEQISEFSKRVILADANLDKVLSAYNKHRDKPIREQAENIIHLFTLTNLGAPAAFKYFDTTIDRKRYTSTKEVLDATLIHQSITGLYETRIDLSQLGGDGGPAPGSSEAAAKGGTLQLDDEYRLYSPLVKPDQNIQFWLEQFPQAWAETAGMGLAKQVPPQVIQLKASATPVSVRQYPLSKEAQEGIRPHVQRLIQQGILVPVQSPWNTPLLPVRKPGTNDYRPVQDLREVNKRVQDIHPTVPNPYNLLCALPPQRSWYTVLDLKDAFFCLRLHPTSQPLFAFEWRDPGTGRTGQLTWTRLPQGFKNSPTIFNEALHRDLANFRIQHPQVTLLQYVDDLLLAGATKQDCLEGTKALLLELSDLGYRASAKKAQICRREVTYLGYSLRDGQRWLTEARKKTVVQIPAPTTAKQVREFLGTAGFCRLWIPGFATLAAPLYPLTKPKGEFSWAPEHQKAFDAIKKALLSAPALALPDVTKPFTLYVDERKGVARGVLTQTLGPWRRPVAYLSKKLDPVASGWPVCLKAIAAVAILVKDADKLTLGQNITVIAPHALENIVRQPPDRWMTNARMTHYQSLLLTERVTFAPPAALNPATLLPEETDEPVTHDCHQLLIEETGVRKDLTDIPLTGEVLTWFTDGSSYVVEGKRMAGAAVVDGTRTIWASSLPEGTSAQKAELMALTQALRLAEGKSINIYTDSRYAFATAHVHGAIYKQRGWLTSAGREIKNKEEILSLLEALHLPKRLAIIHCPGHQKAKDPISRGNQMADRVAKQAAQGVNLLAGKRTADGSEFEKRTADGSEFESPKKKAKVE

SEQ ID NO: 386 - protein, 2085 aa, synthetic construct; identical to SEQ ID NO: 123

SEQ ID NO: 387 - protein, 2088 aa, synthetic construct; identical to SEQ ID NO: 155

SEQ ID NO: 388 - protein, 2088 aa, synthetic construct; identical to SEQ ID NO: 134

SEQ ID NO: 389 - protein, 2088 aa, synthetic construct; identical to SEQ ID NO: 171

SEQ ID NO: 390 - protein, 2090 aa, synthetic construct
MPAAKRVKLDGGDKKYSIGLDIGTNSVGWAVITDEYKVPSKKFKVLGNTDRHSIKKNLIGALLFDSGETAEATRLKRTARRRYTRRKNRICYLQEIFSNEMAKVDDSFFHRLEESFLVEEDKKHERHPIFGNIVDEVAYHEKYPTIYHLRKKLVDSTDKADLRLIYLALAHMIKFRGHFLIEGDLNPDNSDVDKLFIQLVQTYNQLFEENPINASGVDAKAILSARLSKSRRLENLIAQLPGEKKNGLFGNLIALSLGLTPNFKSNFDLAEDAKLQLSKDTYDDDLDNLLAQIGDQYADLFLAAKNLSDAILLSDILRVNTEITKAPLSASMIKRYDEHHQDLTLLKALVRQQLPEKYKEIFFDQSKNGYAGYIDGGASQEEFYKFIKPILEKMDGTEELLVKLNREDLLRKQRTFDNGSIPHQIHLGELHAILRRQEDFYPFLKDNREKIEKILTFRIPYYVGPLARGNSRFAWMTRKSEETITPWNFEEVVDKGASAQSFIERMTNFDKNLPNEKVLPKHSLLYEYFTVYNELTKVKYVTEGMRKPAFLSGEQKKAIVDLLFKTNRKVTVKQLKEDYFKKIECFDSVEISGVEDRFNASLGTYHDLLKIIKDKDFLDNEENEDILEDIVLTLTLFEDREMIEERLKTYAHLFDDKVMKQLKRRRYTGWGRLSRKLINGIRDKQSGKTILDFLKSDGFANRNFMQLIHDDSLTFKEDIQKAQVSGQGDSLHEHIANLAGSPAIKKGILQTVKVVDELVKVMGRHKPENIVIEMARENQTTQKGQKNSRERMKRIEEGIKELGSQILKEHPVENTQLQNEKLYLYYLQNGRDMYVDQELDINRLSDYDVDHIVPQSFLKDDSIDNKVLTRSDKARGKSDNVPSEEVVKKMKNYWRQLLNAKLITQRKFDNLTKAERGGLSELDKAGFIKRQLVETRQITKHVAQILDSRMNTKYDENDKLIREVKVITLKSKLVSDFRKDFQFYKVREINNYHHAHDAYLNAVVGTALIKKYPKLESEFVYGDYKVYDVRKMIAKSEQEIGKATAKYFFYSNIMNFFKTEITLANGEIRKRPLIETNGETGEIVWDKGRDFATVRKVLSMPQVNIVKKTEVQTGGFSKESILPKRNSDKLIARKKDWDPKKYGGFDSPTVAYSVLVVAKVEKGKSKKLKSVKELLGITIMERSSFEKNPIDFLEAKGYKEVKKDLIIKLPKYSLFELENGRKRMLASAGELQKGNELALPSKYVNFLYLASHYEKLKGSPEDNEQKQLFVEQHKHYLDEIIEQISEFSKRVILADANLDKVLSAYNKHRDKPIREQAENIIHLFTLTNLGAPAAFKYFDTTIDRKRYTSTKEVLDATLIHQSITGLYETRIDLSQLGGDGGEAAAKGSSPAPGGTLQLDDEYRLYSPLVKPDQNIQFWLEQFPQAWAETAGMGLAKQVPPQVIQLKASATPVSVRQYPLSKEAQEGIRPHVQRLIQQGILVPVQSPWNTPLLPVRKPGTNDYRPVQDLREVNKRVQDIHPTVPNPYNLLCALPPQRSWYTVLDLKDAFFCLRLHPTSQPLFAFEWRDPGTGRTGQLTWTRLPQGFKNSPTIFNEALHRDLANFRIQHPQVTLLQYVDDLLLAGATKQDCLEGTKALLLELSDLGYRASAKKAQICRREVTYLGYSLRDGQRWLTEARKKTVVQIPAPTTAKQVREFLGTAGFCRLWIPGFATLAAPLYPLTKPKGEFSWAPEHQKAFDAIKKALLSAPALALPDVTKPFTLYVDERKGVARGVLTQTLGPWRRPVAYLSKKLDPVASGWPVCLKAIAAVAILVKDADKLTLGQNITVIAPHALENIVRQPPDRWMTNARMTHYQSLLLTERVTFAPPAALNPATLLPEETDEPVTHDCHQLLIEETGVRKDLTDIPLTGEVLTWFTDGSSYVVEGKRMAGAAVVDGTRTIWASSLPEGTSAQKAELMALTQALRLAEGKSINIYTDSRYAFATAHVHGAIYKQRGWLTSAGREIKNKEEILSLLEALHLPKRLAIIHCPGHQKAKDPISRGNQMADRVAKQAAQGVNLLAGKRTADGSEFEKRTADGSEFESPKKKAKVE

SEQ ID NO: 391 - protein, 2094 aa, synthetic construct; identical to SEQ ID NO: 159

SEQ ID NO: 392 - protein, 2084 aa, synthetic construct; identical to SEQ ID NO: 147

SEQ ID NO: 393 - protein, 2085 aa, synthetic construct; identical to SEQ ID NO: 174

SEQ ID NO: 394 - protein, 2087 aa, synthetic construct
MPAAKRVKLDGGDKKYSIGLDIGTNSVGWAVITDEYKVPSKKFKVLGNTDRHSIKKNLIGALLFDSGETAEATRLKRTARRRYTRRKNRICYLQEIFSNEMAKVDDSFFHRLEESFLVEEDKKHERHPIFGNIVDEVAYHEKYPTIYHLRKKLVDSTDKADLRLIYLALAHMIKFRGHFLIEGDLNPDNSDVDKLFIQLVQTYNQLFEENPINASGVDAKAILSARLSKSRRLENLIAQLPGEKKNGLFGNLIALSLGLTPNFKSNFDLAEDAKLQLSKDTYDDDLDNLLAQIGDQYADLFLAAKNLSDAILLSDILRVNTEITKAPLSASMIKRYDEHHQDLTLLKALVRQQLPEKYKEIFFDQSKNGYAGYIDGGASQEEFYKFIKPILEKMDGTEELLVKLNREDLLRKQRTFDNGSIPHQIHLGELHAILRRQEDFYPFLKDNREKIEKILTFRIPYYVGPLARGNSRFAWMTRKSEETITPWNFEEVVDKGASAQSFIERMTNFDKNLPNEKVLPKHSLLYEYFTVYNELTKVKYVTEGMRKPAFLSGEQKKAIVDLLFKTNRKVTVKQLKEDYFKKIECFDSVEISGVEDRFNASLGTYHDLLKIIKDKDFLDNEENEDILEDIVLTLTLFEDREMIEERLKTYAHLFDDKVMKQLKRRRYTGWGRLSRKLINGIRDKQSGKTILDFLKSDGFANRNFMQLIHDDSLTFKEDIQKAQVSGQGDSLHEHIANLAGSPAIKKGILQTVKVVDELVKVMGRHKPENIVIEMARENQTTQKGQKNSRERMKRIEEGIKELGSQILKEHPVENTQLQNEKLYLYYLQNGRDMYVDQELDINRLSDYDVDHIVPQSFLKDDSIDNKVLTRSDKARGKSDNVPSEEVVKKMKNYWRQLLNAKLITQRKFDNLTKAERGGLSELDKAGFIKRQLVETRQITKHVAQILDSRMNTKYDENDKLIREVKVITLKSKLVSDFRKDFQFYKVREINNYHHAHDAYLNAVVGTALIKKYPKLESEFVYGDYKVYDVRKMIAKSEQEIGKATAKYFFYSNIMNFFKTEITLANGEIRKRPLIETNGETGEIVWDKGRDFATVRKVLSMPQVNIVKKTEVQTGGFSKESILPKRNSDKLIARKKDWDPKKYGGFDSPTVAYSVLVVAKVEKGKSKKLKSVKELLGITIMERSSFEKNPIDFLEAKGYKEVKKDLIIKLPKYSLFELENGRKRMLASAGELQKGNELALPSKYVNFLYLASHYEKLKGSPEDNEQKQLFVEQHKHYLDEIIEQISEFSKRVILADANLDKVLSAYNKHRDKPIREQAENIIHLFTLTNLGAPAAFKYFDTTIDRKRYTSTKEVLDATLIHQSITGLYETRIDLSQLGGDGGGGSEAAAKGGTLQLDDEYRLYSPLVKPDQNIQFWLEQFPQAWAETAGMGLAKQVPPQVIQLKASATPVSVRQYPLSKEAQEGIRPHVQRLIQQGILVPVQSPWNTPLLPVRKPGTNDYRPVQDLREVNKRVQDIHPTVPNPYNLLCALPPQRSWYTVLDLKDAFFCLRLHPTSQPLFAFEWRDPGTGRTGQLTWTRLPQGFKNSPTIFNEALHRDLANFRIQHPQVTLLQYVDDLLLAGATKQDCLEGTKALLLELSDLGYRASAKKAQICRREVTYLGYSLRDGQRWLTEARKKTVVQIPAPTTAKQVREFLGTAGFCRLWIPGFATLAAPLYPLTKPKGEFSWAPEHQKAFDAIKKALLSAPALALPDVTKPFTLYVDERKGVARGVLTQTLGPWRRPVAYLSKKLDPVASGWPVCLKAIAAVAILVKDADKLTLGQNITVIAPHALENIVRQPPDRWMTNARMTHYQSLLLTERVTFAPPAALNPATLLPEETDEPVTHDCHQLLIEETGVRKDLTDIPLTGEVLTWFTDGSSYVVEGKRMAGAAVVDGTRTIWASSLPEGTSAQKAELMALTQALRLAEGKSINIYTDSRYAFATAHVHGAIYKQRGWLTSAGREIKNKEEILSLLEALHLPKRLAIIHCPGHQKAKDPISRGNQMADRVAKQAAQGVNLLAGKRTADGSEFEKRTADGSEFESPKKKAKVE

SEQ ID NO: 395 - protein, 2088 aa, synthetic construct; identical to SEQ ID NO: 180

SEQ ID NO: 396 - protein, 2097 aa, synthetic construct; identical to SEQ ID NO: 113

SEQ ID NO: 397 - protein, 2085 aa, synthetic construct; identical to SEQ ID NO: 184

SEQ ID NO: 398 - protein, 2090 aa, synthetic construct; identical to SEQ ID NO: 119

SEQ ID NO: 399 - protein, 2089 aa, synthetic construct
MPAAKRVKLDGGDKKYSIGLDIGTNSVGWAVITDEYKVPSKKFKVLGNTDRHSIKKNLIGALLFDSGETAEATRLKRTARRRYTRRKNRICYLQEIFSNEMAKVDDSFFHRLEESFLVEEDKKHERHPIFGNIVDEVAYHEKYPTIYHLRKKLVDSTDKADLRLIYLALAHMIKFRGHFLIEGDLNPDNSDVDKLFIQLVQTYNQLFEENPINASGVDAKAILSARLSKSRRLENLIAQLPGEKKNGLFGNLIALSLGLTPNFKSNFDLAEDAKLQLSKDTYDDDLDNLLAQIGDQYADLFLAAKNLSDAILLSDILRVNTEITKAPLSASMIKRYDEHHQDLTLLKALVRQQLPEKYKEIFFDQSKNGYAGYIDGGASQEEFYKFIKPILEKMDGTEELLVKLNREDLLRKQRTFDNGSIPHQIHLGELHAILRRQEDFYPFLKDNREKIEKILTFRIPYYVGPLARGNSRFAWMTRKSEETITPWNFEEVVDKGASAQSFIERMTNFDKNLPNEKVLPKHSLLYEYFTVYNELTKVKYVTEGMRKPAFLSGEQKKAIVDLLFKTNRKVTVKQLKEDYFKKIECFDSVEISGVEDRFNASLGTYHDLLKIIKDKDFLDNEENEDILEDIVLTLTLFEDREMIEERLKTYAHLFDDKVMKQLKRRRYTGWGRLSRKLINGIRDKQSGKTILDFLKSDGFANRNFMQLIHDDSLTFKEDIQKAQVSGQGDSLHEHIANLAGSPAIKKGILQTVKVVDELVKVMGRHKPENIVIEMARENQTTQKGQKNSRERMKRIEEGIKELGSQILKEHPVENTQLQNEKLYLYYLQNGRDMYVDQELDINRLSDYDVDHIVPQSFLKDDSIDNKVLTRSDKARGKSDNVPSEEVVKKMKNYWRQLLNAKLITQRKFDNLTKAERGGLSELDKAGFIKRQLVETRQITKHVAQILDSRMNTKYDENDKLIREVKVITLKSKLVSDFRKDFQFYKVREINNYHHAHDAYLNAVVGTALIKKYPKLESEFVYGDYKVYDVRKMIAKSEQEIGKATAKYFFYSNIMNFFKTEITLANGEIRKRPLIETNGETGEIVWDKGRDFATVRKVLSMPQVNIVKKTEVQTGGFSKESILPKRNSDKLIARKKDWDPKKYGGFDSPTVAYSVLVVAKVEKGKSKKLKSVKELLGITIMERSSFEKNPIDFLEAKGYKEVKKDLIIKLPKYSLFELENGRKRMLASAGELQKGNELALPSKYVNFLYLASHYEKLKGSPEDNEQKQLFVEQHKHYLDEIIEQISEFSKRVILADANLDKVLSAYNKHRDKPIREQAENIIHLFTLTNLGAPAAFKYFDTTIDRKRYTSTKEVLDATLIHQSITGLYETRIDLSQLGGDGGEAAAKEAAAKGGTLQLDDEYRLYSPLVKPDQNIQFWLEQFPQAWAETAGMGLAKQVPPQVIQLKASATPVSVRQYPLSKEAQEGIRPHVQRLIQQGILVPVQSPWNTPLLPVRKPGTNDYRPVQDLREVNKRVQDIHPTVPNPYNLLCALPPQRSWYTVLDLKDAFFCLRLHPTSQPLFAFEWRDPGTGRTGQLTWTRLPQGFKNSPTIFNEALHRDLANFRIQHPQVTLLQYVDDLLLAGATKQDCLEGTKALLLELSDLGYRASAKKAQICRREVTYLGYSLRDGQRWLTEARKKTVVQIPAPTTAKQVREFLGTAGFCRLWIPGFATLAAPLYPLTKPKGEFSWAPEHQKAFDAIKKALLSAPALALPDVTKPFTLYVDERKGVARGVLTQTLGPWRRPVAYLSKKLDPVASGWPVCLKAIAAVAILVKDADKLTLGQNITVIAPHALENIVRQPPDRWMTNARMTHYQSLLLTERVTFAPPAALNPATLLPEETDEPVTHDCHQLLIEETGVRKDLTDIPLTGEVLTWFTDGSSYVVEGKRMAGAAVVDGTRTIWASSLPEGTSAQKAELMALTQALRLAEGKSINIYTDSRYAFATAHVHGAIYKQRGWLTSAGREIKNKEEILSLLEALHLPKRLAIIHCPGHQKAKDPISRGNQMADRVAKQAAQGVNLLAGKRTADGSEFEKRTADGSEFESPKKKAKVE

SEQ ID NO: 400 - protein, 2088 aa, synthetic construct; identical to SEQ ID NO: 129

SEQ ID NO: 401 - protein, 2088 aa, synthetic construct
MPAAKRVKLDGGDKKYSIGLDIGTNSVGWAVITDEYKVPSKKFKVLGNTDRHSIKKNLIGALLFDSGETAEATRLKRTARRRYTRRKNRICYLQEIFSNEMAKVDDSFFHRLEESFLVEEDKKHERHPIFGNIVDEVAYHEKYPTIYHLRKKLVDSTDKADLRLIYLALAHMIKFRGHFLIEGDLNPDNSDVDKLFIQLVQTYNQLFEENPINASGVDAKAILSARLSKSRRLENLIAQLPGEKKNGLFGNLIALSLGLTPNFKSNFDLAEDAKLQLSKDTYDDDLDNLLAQIGDQYADLFLAAKNLSDAILLSDILRVNTEITKAPLSASMIKRYDEHHQDLTLLKALVRQQLPEKYKEIFFDQSKNGYAGYIDGGASQEEFYKFIKPILEKMDGTEELLVKLNREDLLRKQRTFDNGSIPHQIHLGELHAILRRQEDFYPFLKDNREKIEKILTFRIPYYVGPLARGNSRFAWMTRKSEETITPWNFEEVVDKGASAQSFIERMTNFDKNLPNEKVLPKHSLLYEYFTVYNELTKVKYVTEGMRKPAFLSGEQKKAIVDLLFKTNRKVTVKQLKEDYFKKIECFDSVEISGVEDRFNASLGTYHDLLKIIKDKDFLDNEENEDILEDIVLTLTLFEDREMIEERLKTYAHLFDDKVMKQLKRRRYTGWGRLSRKLINGIRDKQSGKTILDFLKSDGFANRNFMQLIHDDSLTFKEDIQKAQVSGQGDSLHEHIANLAGSPAIKKGILQTVKVVDELVKVMGRHKPENIVIEMARENQTTQKGQKNSRERMKRIEEGIKELGSQILKEHPVENTQLQNEKLYLYYLQNGRDMYVDQELDINRLSDYDVDHIVPQSFLKDDSIDNKVLTRSDKARGKSDNVPSEEVVKKMKNYWRQLLNAKLITQRKFDNLTKAERGGLSELDKAGFIKRQLVETRQITKHVAQILDSRMNTKYDENDKLIREVKVITLKSKLVSDFRKDFQFYKVREINNYHHAHDAYLNAVVGTALIKKYPKLESEFVYGDYKVYDVRKMIAKSEQEIGKATAKYFFYSNIMNFFKTEITLANGEIRKRPLIETNGETGEIVWDKGRDFATVRKVLSMPQVNIVKKTEVQTGGFSKESILPKRNSDKLIARKKDWDPKKYGGFDSPTVAYSVLVVAKVEKGKSKKLKSVKELLGITIMERSSFEKNPIDFLEAKGYKEVKKDLIIKLPKYSLFELENGRKRMLASAGELQKGNELALPSKYVNFLYLASHYEKLKGSPEDNEQKQLFVEQHKHYLDEIIEQISEFSKRVILADANLDKVLSAYNKHRDKPIREQAENIIHLFTLTNLGAPAAFKYFDTTIDRKRYTSTKEVLDATLIHQSITGLYETRIDLSQLGGDGGGSSGGSPAPGGTLQLDDEYRLYSPLVKPDQNIQFWLEQFPQAWAETAGMGLAKQVPPQVIQLKASATPVSVRQYPLSKEAQEGIRPHVQRLIQQGILVPVQSPWNTPLLPVRKPGTNDYRPVQDLREVNKRVQDIHPTVPNPYNLLCALPPQRSWYTVLDLKDAFFCLRLHPTSQPLFAFEWRDPGTGRTGQLTWTRLPQGFKNSPTIFNEALHRDLANFRIQHPQVTLLQYVDDLLLAGATKQDCLEGTKALLLELSDLGYRASAKKAQICRREVTYLGYSLRDGQRWLTEARKKTVVQIPAPTTAKQVREFLGTAGFCRLWIPGFATLAAPLYPLTKPKGEFSWAPEHQKAFDAIKKALLSAPALALPDVTKPFTLYVDERKGVARGVLTQTLGPWRRPVAYLSKKLDPVASGWPVCLKAIAAVAILVKDADKLTLGQNITVIAPHALENIVRQPPDRWMTNARMTHYQSLLLTERVTFAPPAALNPATLLPEETDEPVTHDCHQLLIEETGVRKDLTDIPLTGEVLTWFTDGSSYVVEGKRMAGAAVVDGTRTIWASSLPEGTSAQKAELMALTQALRLAEGKSINIYTDSRYAFATAHVHGAIYKQRGWLTSAGREIKNKEEILSLLEALHLPKRLAIIHCPGHQKAKDPISRGNQMADRVAKQAAQGVNLLAGKRTADGSEFEKRTADGSEFESPKKKAKVE

SEQ ID NO: 402 - protein, 2088 aa, synthetic construct
MPAAKRVKLDGGDKKYSIGLDIGTNSVGWAVITDEYKVPSKKFKVLGNTDRHSIKKNLIGALLFDSGETAEATRLKRTARRRYTRRKNRICYLQEIFSNEMAKVDDSFFHRLEESFLVEEDKKHERHPIFGNIVDEVAYHEKYPTIYHLRKKLVDSTDKADLRLIYLALAHMIKFRGHFLIEGDLNPDNSDVDKLFIQLVQTYNQLFEENPINASGVDAKAILSARLSKSRRLENLIAQLPGEKKNGLFGNLIALSLGLTPNFKSNFDLAEDAKLQLSKDTYDDDLDNLLAQIGDQYADLFLAAKNLSDAILLSDILRVNTEITKAPLSASMIKRYDEHHQDLTLLKALVRQQLPEKYKEIFFDQSKNGYAGYIDGGASQEEFYKFIKPILEKMDGTEELLVKLNREDLLRKQRTFDNGSIPHQIHLGELHAILRRQEDFYPFLKDNREKIEKILTFRIPYYVGPLARGNSRFAWMTRKSEETITPWNFEEVVDKGASAQSFIERMTNFDKNLPNEKVLPKHSLLYEYFTVYNELTKVKYVTEGMRKPAFLSGEQKKAIVDLLFKTNRKVTVKQLKEDYFKKIECFDSVEISGVEDRFNASLGTYHDLLKIIKDKDFLDNEENEDILEDIVLTLTLFEDREMIEERLKTYAHLFDDKVMKQLKRRRYTGWGRLSRKLINGIRDKQSGKTILDFLKSDGFANRNFMQLIHDDSLTFKEDIQKAQVSGQGDSLHEHIANLAGSPAIKKGILQTVKVVDELVKVMGRHKPENIVIEMARENQTTQKGQKNSRERMKRIEEGIKELGSQILKEHPVENTQLQNEKLYLYYLQNGRDMYVDQELDINRLSDYDVDHIVPQSFLKDDSIDNKVLTRSDKARGKSDNVPSEEVVKKMKNYWRQLLNAKLITQRKFDNLTKAERGGLSELDKAGFIKRQLVETRQITKHVAQILDSRMNTKYDENDKLIREVKVITLKSKLVSDFRKDFQFYKVREINNYHHAHDAYLNAVVGTALIKKYPKLESEFVYGDYKVYDVRKMIAKSEQEIGKATAKYFFYSNIMNFFKTEITLANGEIRKRPLIETNGETGEIVWDKGRDFATVRKVLSMPQVNIVKKTEVQTGGFSKESILPKRNSDKLIARKKDWDPKKYGGFDSPTVAYSVLVVAKVEKGKSKKLKSVKELLGITIMERSSFEKNPIDFLEAKGYKEVKKDLIIKLPKYSLFELENGRKRMLASAGELQKGNELALPSKYVNFLYLASHYEKLKGSPEDNEQKQLFVEQHKHYLDEIIEQISEFSKRVILADANLDKVLSAYNKHRDKPIREQAENIIHLFTLTNLGAPAAFKYFDTTIDRKRYTSTKEVLDATLIHQSITGLYETRIDLSQLGGDGGGGGGGSPAPGGTLQLDDEYRLYSPLVKPDQNIQFWLEQFPQAWAETAGMGLAKQVPPQVIQLKASATPVSVRQYPLSKEAQEGIRPHVQRLIQQGILVPVQSPWNTPLLPVRKPGTNDYRPVQDLREVNKRVQDIHPTVPNPYNLLCALPPQRSWYTVLDLKDAFFCLRLHPTSQPLFAFEWRDPGTGRTGQLTWTRLPQGFKNSPTIFNEALHRDLANFRIQHPQVTLLQYVDDLLLAGATKQDCLEGTKALLLELSDLGYRASAKKAQICRREVTYLGYSLRDGQRWLTEARKKTVVQIPAPTTAKQVREFLGTAGFCRLWIPGFATLAAPLYPLTKPKGEFSWAPEHQKAFDAIKKALLSAPALALPDVTKPFTLYVDERKGVARGVLTQTLGPWRRPVAYLSKKLDPVASGWPVCLKAIAAVAILVKDADKLTLGQNITVIAPHALENIVRQPPDRWMTNARMTHYQSLLLTERVTFAPPAALNPATLLPEETDEPVTHDCHQLLIEETGVRKDLTDIPLTGEVLTWFTDGSSYVVEGKRMAGAAVVDGTRTIWASSLPEGTSAQKAELMALTQALRLAEGKSINIYTDSRYAFATAHVHGAIYKQRGWLTSAGREIKNKEEILSLLEALHLPKRLAIIHCPGHQKAKDPISRGNQMADRVAKQAAQGVNLLAGKRTADGSEFEKRTADGSEFESPKKKAKVE

SEQ ID NO: 403 - protein, 2088 aa, synthetic construct; identical to SEQ ID NO: 130

SEQ ID NO: 404 - protein, 2094 aa, synthetic construct; identical to SEQ ID NO: 161

SEQ ID NO: 405 - protein, 2085 aa, synthetic construct
MPAAKRVKLDGGDKKYSIGLDIGTNSVGWAVITDEYKVPSKKFKVLGNTDRHSIKKNLIGALLFDSGETAEATRLKRTARRRYTRRKNRICYLQEIFSNEMAKVDDSFFHRLEESFLVEEDKKHERHPIFGNIVDEVAYHEKYPTIYHLRKKLVDSTDKADLRLIYLALAHMIKFRGHFLIEGDLNPDNSDVDKLFIQLVQTYNQLFEENPINASGVDAKAILSARLSKSRRLENLIAQLPGEKKNGLFGNLIALSLGLTPNFKSNFDLAEDAKLQLSKDTYDDDLDNLLAQIGDQYADLFLAAKNLSDAILLSDILRVNTEITKAPLSASMIKRYDEHHQDLTLLKALVRQQLPEKYKEIFFDQSKNGYAGYIDGGASQEEFYKFIKPILEKMDGTEELLVKLNREDLLRKQRTFDNGSIPHQIHLGELHAILRRQEDFYPFLKDNREKIEKILTFRIPYYVGPLARGNSRFAWMTRKSEETITPWNFEEVVDKGASAQSFIERMTNFDKNLPNEKVLPKHSLLYEYFTVYNELTKVKYVTEGMRKPAFLSGEQKKAIVDLLFKTNRKVTVKQLKEDYFKKIECFDSVEISGVEDRFNASLGTYHDLLKIIKDKDFLDNEENEDILEDIVLTLTLFEDREMIEERLKTYAHLFDDKVMKQLKRRRYTGWGRLSRKLINGIRDKQSGKTILDFLKSDGFANRNFMQLIHDDSLTFKEDIQKAQVSGQGDSLHEHIANLAGSPAIKKGILQTVKVVDELVKVMGRHKPENIVIEMARENQTTQKGQKNSRERMKRIEEGIKELGSQILKEHPVENTQLQNEKLYLYYLQNGRDMYVDQELDINRLSDYDVDHIVPQSFLKDDSIDNKVLTRSDKARGKSDNVPSEEVVKKMKNYWRQLLNAKLITQRKFDNLTKAERGGLSELDKAGFIKRQLVETRQITKHVAQILDSRMNTKYDENDKLIREVKVITLKSKLVSDFRKDFQFYKVREINNYHHAHDAYLNAVVGTALIKKYPKLESEFVYGDYKVYDVRKMIAKSEQEIGKATAKYFFYSNIMNFFKTEITLANGEIRKRPLIETNGETGEIVWDKGRDFATVRKVLSMPQVNIVKKTEVQTGGFSKESILPKRNSDKLIARKKDWDPKKYGGFDSPTVAYSVLVVAKVEKGKSKKLKSVKELLGITIMERSSFEKNPIDFLEAKGYKEVKKDLIIKLPKYSLFELENGRKRMLASAGELQKGNELALPSKYVNFLYLASHYEKLKGSPEDNEQKQLFVEQHKHYLDEIIEQISEFSKRVILADANLDKVLSAYNKHRDKPIREQAENIIHLFTLTNLGAPAAFKYFDTTIDRKRYTSTKEVLDATLIHQSITGLYETRIDLSQLGGDGGGGGGSSGGTLQLDDEYRLYSPLVKPDQNIQFWLEQFPQAWAETAGMGLAKQVPPQVIQLKASATPVSVRQYPLSKEAQEGIRPHVQRLIQQGILVPVQSPWNTPLLPVRKPGTNDYRPVQDLREVNKRVQDIHPTVPNPYNLLCALPPQRSWYTVLDLKDAFFCLRLHPTSQPLFAFEWRDPGTGRTGQLTWTRLPQGFKNSPTIFNEALHRDLANFRIQHPQVTLLQYVDDLLLAGATKQDCLEGTKALLLELSDLGYRASAKKAQICRREVTYLGYSLRDGQRWLTEARKKTVVQIPAPTTAKQVREFLGTAGFCRLWIPGFATLAAPLYPLTKPKGEFSWAPEHQKAFDAIKKALLSAPALALPDVTKPFTLYVDERKGVARGVLTQTLGPWRRPVAYLSKKLDPVASGWPVCLKAIAAVAILVKDADKLTLGQNITVIAPHALENIVRQPPDRWMTNARMTHYQSLLLTERVTFAPPAALNPATLLPEETDEPVTHDCHQLLIEETGVRKDLTDIPLTGEVLTWFTDGSSYVVEGKRMAGAAVVDGTRTIWASSLPEGTSAQKAELMALTQALRLAEGKSINIYTDSRYAFATAHVHGAIYKQRGWLTSAGREIKNKEEILSLLEALHLPKRLAIIHCPGHQKAKDPISRGNQMADRVAKQAAQGVNLLAGKRTADGSEFEKRTADGSEFESPKKKAKVE

SEQ ID NO: 406 - protein, 2088 aa, synthetic construct; identical to SEQ ID NO: 182

SEQ ID NO: 407 - protein, 2211 aa, synthetic construct
MPAAKRVKLDGGDKKYSIGLDIGTNSVGWAVITDEYKVPSKKFKVLGNTDRHSIKKNLIGALLFDSGETAEATRLKRTARRRYTRRKNRICYLQEIFSNEMAKVDDSFFHRLEESFLVEEDKKHERHPIFGNIVDEVAYHEKYPTIYHLRKKLVDSTDKADLRLIYLALAHMIKFRGHFLIEGDLNPDNSDVDKLFIQLVQTYNQLFEENPINASGVDAKAILSARLSKSRRLENLIAQLPGEKKNGLFGNLIALSLGLTPNFKSNFDLAEDAKLQLSKDTYDDDLDNLLAQIGDQYADLFLAAKNLSDAILLSDILRVNTEITKAPLSASMIKRYDEHHQDLTLLKALVRQQLPEKYKEIFFDQSKNGYAGYIDGGASQEEFYKFIKPILEKMDGTEELLVKLNREDLLRKQRTFDNGSIPHQIHLGELHAILRRQEDFYPFLKDNREKIEKILTFRIPYYVGPLARGNSRFAWMTRKSEETITPWNFEEVVDKGASAQSFIERMTNFDKNLPNEKVLPKHSLLYEYFTVYNELTKVKYVTEGMRKPAFLSGEQKKAIVDLLFKTNRKVTVKQLKEDYFKKIECFDSVEISGVEDRFNASLGTYHDLLKIIKDKDFLDNEENEDILEDIVLTLTLFEDREMIEERLKTYAHLFDDKVMKQLKRRRYTGWGRLSRKLINGIRDKQSGKTILDFLKSDGFANRNFMQLIHDDSLTFKEDIQKAQVSGQGDSLHEHIANLAGSPAIKKGILQTVKVVDELVKVMGRHKPENIVIEMARENQTTQKGQKNSRERMKRIEEGIKELGSQILKEHPVENTQLQNEKLYLYYLQNGRDMYVDQELDINRLSDYDVDHIVPQSFLKDDSIDNKVLTRSDKARGKSDNVPSEEVVKKMKNYWRQLLNAKLITQRKFDNLTKAERGGLSELDKAGFIKRQLVETRQITKHVAQILDSRMNTKYDENDKLIREVKVITLKSKLVSDFRKDFQFYKVREINNYHHAHDAYLNAVVGTALIKKYPKLESEFVYGDYKVYDVRKMIAKSEQEIGKATAKYFFYSNIMNFFKTEITLANGEIRKRPLIETNGETGEIVWDKGRDFATVRKVLSMPQVNIVKKTEVQTGGFSKESILPKRNSDKLIARKKDWDPKKYGGFDSPTVAYSVLVVAKVEKGKSKKLKSVKELLGITIMERSSFEKNPIDFLEAKGYKEVKKDLIIKLPKYSLFELENGRKRMLASAGELQKGNELALPSKYVNFLYLASHYEKLKGSPEDNEQKQLFVEQHKHYLDEIIEQISEFSKRVILADANLDKVLSAYNKHRDKPIREQAENIIHLFTLTNLGAPAAFKYFDTTIDRKRYTSTKEVLDATLIHQSITGLYETRIDLSQLGGDGGAEAAAKEAAAKEAAAKEAAAKALEAEAAAKEAAAKEAAAKEAAAKAGGMDPLQLLQPLEAEIKGTKLKAHWNSGATITCVPEAFLEDERPIQTMLIKTIHGEKQQDVYYLTFKVQGRKVEAEVLASPYDYILLNPSDVPWLMKKPLQLTVLVPLHEYQERLLQQTALPKEQKELLQKLFLKYDALWQHWENQVGHRRIKPHNIATGTLAPRPQKQYPINPKAKPSIQIVIDDLLKQGVLIQQNSTMNTPVYPVPKPDGKWRMVLDYREVNKTIPLIAAQNQHSAGILSSIYRGKYKTTLDLTNGFWAHPITPESYWLTAFTWQGKQYCWTRLPQGFLNSPALFTADVVDLLKEIPNVQAYVDDIYISHDDPQEHLEQLEKIFSILLNAGYVVSLKKSEIAQREVEFLGFNITKEGRGLTDTFKQKLLNITPPKDLKQLQSILGLLNFARNFIPNYSELVKPLYTIVANANGKFISWTEDNSNQLQHIISVLNQADNLEERNPETRLIIKVNSSPSAGYIRYYNEGSKRPIMYVNYIFSKAEAKFTQTEKLLTTMHKGLIKAMDLAMGQEILVYSPIVSMTKIQRTPLPERKALPVRWITWMTYLEDPRIQFHYDKSLPELQQIPNVTEDVIAKTKHPSEFAMVFYTDGSAIKHPDVNKSHSAGMGIAQVQFIPEYKIVHQWSIPLGDHTAQLAEIAAVEFACKKALKISGPVLIVTDSFYVAESANKELPYWKSNGFLNNKKKPLRHVSKWKSIAECLQLKPDIIIMHEKGHQQPMTTLHTEGNNLADKLATQGSYVVHAGKRTADGSEFEKRTADGSEFESPKKKAKVE

SEQ ID NO: 408 - protein, 2198 aa, synthetic construct
MPAAKRVKLDGGDKKYSIGLDIGTNSVGWAVITDEYKVPSKKFKVLGNTDRHSIKKNLIGALLFDSGETAEATRLKRTARRRYTRRKNRICYLQEIFSNEMAKVDDSFFHRLEESFLVEEDKKHERHPIFGNIVDEVAYHEKYPTIYHLRKKLVDSTDKADLRLIYLALAHMIKFRGHFLIEGDLNPDNSDVDKLFIQLVQTYNQLFEENPINASGVDAKAILSARLSKSRRLENLIAQLPGEKKNGLFGNLIALSLGLTPNFKSNFDLAEDAKLQLSKDTYDDDLDNLLAQIGDQYADLFLAAKNLSDAILLSDILRVNTEITKAPLSASMIKRYDEHHQDLTLLKALVRQQLPEKYKEIFFDQSKNGYAGYIDGGASQEEFYKFIKPILEKMDGTEELLVKLNREDLLRKQRTFDNGSIPHQIHLGELHAILRRQEDFYPFLKDNREKIEKILTFRIPYYVGPLARGNSRFAWMTRKSEETITPWNFEEVVDKGASAQSFIERMTNFDKNLPNEKVLPKHSLLYEYFTVYNELTKVKYVTEGMRKPAFLSGEQKKAIVDLLFKTNRKVTVKQLKEDYFKKIECFDSVEISGVEDRFNASLGTYHDLLKIIKDKDFLDNEENEDILEDIVLTLTLFEDREMIEERLKTYAHLFDDKVMKQLKRRRYTGWGRLSRKLINGIRDKQSGKTILDFLKSDGFANRNFMQLIHDDSLTFKEDIQKAQVSGQGDSLHEHIANLAGSPAIKKGILQTVKVVDELVKVMGRHKPENIVIEMARENQTTQKGQKNSRERMKRIEEGIKELGSQILKEHPVENTQLQNEKLYLYYLQNGRDMYVDQELDINRLSDYDVDHIVPQSFLKDDSIDNKVLTRSDKARGKSDNVPSEEVVKKMKNYWRQLLNAKLITQRKFDNLTKAERGGLSELDKAGFIKRQLVETRQITKHVAQILDSRMNTKYDENDKLIREVKVITLKSKLVSDFRKDFQFYKVREINNYHHAHDAYLNAVVGTALIKKYPKLESEFVYGDYKVYDVRKMIAKSEQEIGKATAKYFFYSNIMNFFKTEITLANGEIRKRPLIETNGETGEIVWDKGRDFATVRKVLSMPQVNIVKKTEVQTGGFSKESILPKRNSDKLIARKKDWDPKKYGGFDSPTVAYSVLVVAKVEKGKSKKLKSVKELLGITIMERSSFEKNPIDFLEAKGYKEVKKDLIIKLPKYSLFELENGRKRMLASAGELQKGNELALPSKYVNFLYLASHYEKLKGSPEDNEQKQLFVEQHKHYLDEIIEQISEFSKRVILADANLDKVLSAYNKHRDKPIREQAENIIHLFTLTNLGAPAAFKYFDTTIDRKRYTSTKEVLDATLIHQSITGLYETRIDLSQLGGDGGSGGSSGGSSGSETPGTSESATPESSGGSSGGSSGGMDPLQLLQPLEAEIKGTKLKAHWNSGATITCVPEAFLEDERPIQTMLIKTIHGEKQQDVYYLTFKVQGRKVEAEVLASPYDYILLNPSDVPWLMKKPLQLTVLVPLHEYQERLLQQTALPKEQKELLQKLFLKYDALWQHWENQVGHRRIKPHNIATGTLAPRPQKQYPINPKAKPSIQIVIDDLLKQGVLIQQNSTMNTPVYPVPKPDGKWRMVLDYREVNKTIPLIAAQNQHSAGILSSIYRGKYKTTLDLTNGFWAHPITPESYWLTAFTWQGKQYCWTRLPQGFLNSPALFTADVVDLLKEIPNVQAYVDDIYISHDDPQEHLEQLEKIFSILLNAGYVVSLKKSEIAQREVEFLGFNITKEGRGLTDTFKQKLLNITPPKDLKQLQSILGLLNFARNFIPNYSELVKPLYTIVANANGKFISWTEDNSNQLQHIISVLNQADNLEERNPETRLIIKVNSSPSAGYIRYYNEGSKRPIMYVNYIFSKAEAKFTQTEKLLTTMHKGLIKAMDLAMGQEILVYSPIVSMTKIQRTPLPERKALPVRWITWMTYLEDPRIQFHYDKSLPELQQIPNVTEDVIAKTKHPSEFAMVFYTDGSAIKHPDVNKSHSAGMGIAQVQFIPEYKIVHQWSIPLGDHTAQLAEIAAVEFACKKALKISGPVLIVTDSFYVAESANKELPYWKSNGFLNNKKKPLRHVSKWKSIAECLQLKPDIIIMHEKGHQQPMTTLHTEGNNLADKLATQGSYVVHAGKRTADGSEFEKRTADGSEFESPKKKAKVE

SEQ ID NO: 409 - protein, 2176 aa, synthetic construct
MPAAKRVKLDGGDKKYSIGLDIGTNSVGWAVITDEYKVPSKKFKVLGNTDRHSIKKNLIGALLFDSGETAEATRLKRTARRRYTRRKNRICYLQEIFSNEMAKVDDSFFHRLEESFLVEEDKKHERHPIFGNIVDEVAYHEKYPTIYHLRKKLVDSTDKADLRLIYLALAHMIKFRGHFLIEGDLNPDNSDVDKLFIQLVQTYNQLFEENPINASGVDAKAILSARLSKSRRLENLIAQLPGEKKNGLFGNLIALSLGLTPNFKSNFDLAEDAKLQLSKDTYDDDLDNLLAQIGDQYADLFLAAKNLSDAILLSDILRVNTEITKAPLSASMIKRYDEHHQDLTLLKALVRQQLPEKYKEIFFDQSKNGYAGYIDGGASQEEFYKFIKPILEKMDGTEELLVKLNREDLLRKQRTFDNGSIPHQIHLGELHAILRRQEDFYPFLKDNREKIEKILTFRIPYYVGPLARGNSRFAWMTRKSEETITPWNFEEVVDKGASAQSFIERMTNFDKNLPNEKVLPKHSLLYEYFTVYNELTKVKYVTEGMRKPAFLSGEQKKAIVDLLFKTNRKVTVKQLKEDYFKKIECFDSVEISGVEDRFNASLGTYHDLLKIIKDKDFLDNEENEDILEDIVLTLTLFEDREMIEERLKTYAHLFDDKVMKQLKRRRYTGWGRLSRKLINGIRDKQSGKTILDFLKSDGFANRNFMQLIHDDSLTFKEDIQKAQVSGQGDSLHEHIANLAGSPAIKKGILQTVKVVDELVKVMGRHKPENIVIEMARENQTTQKGQKNSRERMKRIEEGIKELGSQILKEHPVENTQLQNEKLYLYYLQNGRDMYVDQELDINRLSDYDVDHIVPQSFLKDDSIDNKVLTRSDKARGKSDNVPSEEVVKKMKNYWRQLLNAKLITQRKFDNLTKAERGGLSELDKAGFIKRQLVETRQITKHVAQILDSRMNTKYDENDKLIREVKVITLKSKLVSDFRKDFQFYKVREINNYHHAHDAYLNAVVGTALIKKYPKLESEFVYGDYKVYDVRKMIAKSEQEIGKATAKYFFYSNIMNFFKTEITLANGEIRKRPLIETNGETGEIVWDKGRDFATVRKVLSMPQVNIVKKTEVQTGGFSKESILPKRNSDKLIARKKDWDPKKYGGFDSPTVAYSVLVVAKVEKGKSKKLKSVKELLGITIMERSSFEKNPIDFLEAKGYKEVKKDLIIKLPKYSLFELENGRKRMLASAGELQKGNELALPSKYVNFLYLASHYEKLKGSPEDNEQKQLFVEQHKHYLDEIIEQISEFSKRVILADANLDKVLSAYNKHRDKPIREQAENIIHLFTLTNLGAPAAFKYFDTTIDRKRYTSTKEVLDATLIHQSITGLYETRIDLSQLGGDGGGSSEAAAKPAPGGMDPLQLLQPLEAEIKGTKLKAHWNSGATITCVPEAFLEDERPIQTMLIKTIHGEKQQDVYYLTFKVQGRKVEAEVLASPYDYILLNPSDVPWLMKKPLQLTVLVPLHEYQERLLQQTALPKEQKELLQKLFLKYDALWQHWENQVGHRRIKPHNIATGTLAPRPQKQYPINPKAKPSIQIVIDDLLKQGVLIQQNSTMNTPVYPVPKPDGKWRMVLDYREVNKTIPLIAAQNQHSAGILSSIYRGKYKTTLDLTNGFWAHPITPESYWLTAFTWQGKQYCWTRLPQGFLNSPALFTADVVDLLKEIPNVQAYVDDIYISHDDPQEHLEQLEKIFSILLNAGYVVSLKKSEIAQREVEFLGFNITKEGRGLTDTFKQKLLNITPPKDLKQLQSILGLLNFARNFIPNYSELVKPLYTIVANANGKFISWTEDNSNQLQHIISVLNQADNLEERNPETRLIIKVNSSPSAGYIRYYNEGSKRPIMYVNYIFSKAEAKFTQTEKLLTTMHKGLIKAMDLAMGQEILVYSPIVSMTKIQRTPLPERKALPVRWITWMTYLEDPRIQFHYDKSLPELQQIPNVTEDVIAKTKHPSEFAMVFYTDGSAIKHPDVNKSHSAGMGIAQVQFIPEYKIVHQWSIPLGDHTAQLAEIAAVEFACKKALKISGPVLIVTDSFYVAESANKELPYWKSNGFLNNKKKPLRHVSKWKSIAECLQLKPDIIIMHEKGHQQPMTTLHTEGNNLADKLATQGSYVVHAGKRTADGSEFEKRTADGSEFESPKKKAKVE

SEQ ID NO: 410 - protein, 2181 aa, synthetic construct
MPAAKRVKLDGGDKKYSIGLDIGTNSVGWAVITDEYKVPSKKFKVLGNTDRHSIKKNLIGALLFDSGETAEATRLKRTARRRYTRRKNRICYLQEIFSNEMAKVDDSFFHRLEESFLVEEDKKHERHPIFGNIVDEVAYHEKYPTIYHLRKKLVDSTDKADLRLIYLALAHMIKFRGHFLIEGDLNPDNSDVDKLFIQLVQTYNQLFEENPINASGVDAKAILSARLSKSRRLENLIAQLPGEKKNGLFGNLIALSLGLTPNFKSNFDLAEDAKLQLSKDTYDDDLDNLLAQIGDQYADLFLAAKNLSDAILLSDILRVNTEITKAPLSASMIKRYDEHHQDLTLLKALVRQQLPEKYKEIFFDQSKNGYAGYIDGGASQEEFYKFIKPILEKMDGTEELLVKLNREDLLRKQRTFDNGSIPHQIHLGELHAILRRQEDFYPFLKDNREKIEKILTFRIPYYVGPLARGNSRFAWMTRKSEETITPWNFEEVVDKGASAQSFIERMTNFDKNLPNEKVLPKHSLLYEYFTVYNELTKVKYVTEGMRKPAFLSGEQKKAIVDLLFKTNRKVTVKQLKEDYFKKIECFDSVEISGVEDRFNASLGTYHDLLKIIKDKDFLDNEENEDILEDIVLTLTLFEDREMIEERLKTYAHLFDDKVMKQLKRRRYTGWGRLSRKLINGIRDKQSGKTILDFLKSDGFANRNFMQLIHDDSLTFKEDIQKAQVSGQGDSLHEHIANLAGSPAIKKGILQTVKVVDELVKVMGRHKPENIVIEMARENQTTQKGQKNSRERMKRIEEGIKELGSQILKEHPVENTQLQNEKLYLYYLQNGRDMYVDQELDINRLSDYDVDHIVPQSFLKDDSIDNKVLTRSDKARGKSDNVPSEEVVKKMKNYWRQLLNAKLITQRKFDNLTKAERGGLSELDKAGFIKRQLVETRQITKHVAQILDSRMNTKYDENDKLIREVKVITLKSKLVSDFRKDFQFYKVREINNYHHAHDAYLNAVVGTALIKKYPKLESEFVYGDYKVYDVRKMIAKSEQEIGKATAKYFFYSNIMNFFKTEITLANGEIRKRPLIETNGETGEIVWDKGRDFATVRKVLSMPQVNIVKKTEVQTGGFSKESILPKRNSDKLIARKKDWDPKKYGGFDSPTVAYSVLVVAKVEKGKSKKLKSVKELLGITIMERSSFEKNPIDFLEAKGYKEVKKDLIIKLPKYSLFELENGRKRMLASAGELQKGNELALPSKYVNFLYLASHYEKLKGSPEDNEQKQLFVEQHKHYLDEIIEQISEFSKRVILADANLDKVLSAYNKHRDKPIREQAENIIHLFTLTNLGAPAAFKYFDTTIDRKRYTSTKEVLDATLIHQSITGLYETRIDLSQLGGDGGSGSETPGTSESATPESGGMDPLQLLQPLEAEIKGTKLKAHWNSGATITCVPEAFLEDERPIQTMLIKTIHGEKQQDVYYLTFKVQGRKVEAEVLASPYDYILLNPSDVPWLMKKPLQLTVLVPLHEYQERLLQQTALPKEQKELLQKLFLKYDALWQHWENQVGHRRIKPHNIATGTLAPRPQKQYPINPKAKPSIQIVIDDLLKQGVLIQQNSTMNTPVYPVPKPDGKWRMVLDYREVNKTIPLIAAQNQHSAGILSSIYRGKYKTTLDLTNGFWAHPITPESYWLTAFTWQGKQYCWTRLPQGFLNSPALFTADVVDLLKEIPNVQAYVDDIYISHDDPQEHLEQLEKIFSILLNAGYVVSLKKSEIAQREVEFLGFNITKEGRGLTDTFKQKLLNITPPKDLKQLQSILGLLNFARNFIPNYSELVKPLYTIVANANGKFISWTEDNSNQLQHIISVLNQADNLEERNPETRLIIKVNSSPSAGYIRYYNEGSKRPIMYVNYIFSKAEAKFTQTEKLLTTMHKGLIKAMDLAMGQEILVYSPIVSMTKIQRTPLPERKALPVRWITWMTYLEDPRIQFHYDKSLPELQQIPNVTEDVIAKTKHPSEFAMVFYTDGSAIKHPDVNKSHSAGMGIAQVQFIPEYKIVHQWSIPLGDHTAQLAEIAAVEFACKKALKISGPVLIVTDSFYVAESANKELPYWKSNGFLNNKKKPLRHVSKWKSIAECLQLKPDIIIMHEKGHQQPMTTLHTEGNNLADKLATQGSYVVHAGKRTADGSEFEKRTADGSEFESPKKKAKVE

SEQ ID NO: 411 - protein, 2178 aa, synthetic construct
MPAAKRVKLDGGDKKYSIGLDIGTNSVGWAVITDEYKVPSKKFKVLGNTDRHSIKKNLIGALLFDSGETAEATRLKRTARRRYTRRKNRICYLQEIFSNEMAKVDDSFFHRLEESFLVEEDKKHERHPIFGNIVDEVAYHEKYPTIYHLRKKLVDSTDKADLRLIYLALAHMIKFRGHFLIEGDLNPDNSDVDKLFIQLVQTYNQLFEENPINASGVDAKAILSARLSKSRRLENLIAQLPGEKKNGLFGNLIALSLGLTPNFKSNFDLAEDAKLQLSKDTYDDDLDNLLAQIGDQYADLFLAAKNLSDAILLSDILRVNTEITKAPLSASMIKRYDEHHQDLTLLKALVRQQLPEKYKEIFFDQSKNGYAGYIDGGASQEEFYKFIKPILEKMDGTEELLVKLNREDLLRKQRTFDNGSIPHQIHLGELHAILRRQEDFYPFLKDNREKIEKILTFRIPYYVGPLARGNSRFAWMTRKSEETITPWNFEEVVDKGASAQSFIERMTNFDKNLPNEKVLPKHSLLYEYFTVYNELTKVKYVTEGMRKPAFLSGEQKKAIVDLLFKTNRKVTVKQLKEDYFKKIECFDSVEISGVEDRFNASLGTYHDLLKIIKDKDFLDNEENEDILEDIVLTLTLFEDREMIEERLKTYAHLFDDKVMKQLKRRRYTGWGRLSRKLINGIRDKQSGKTILDFLKSDGFANRNFMQLIHDDSLTFKEDIQKAQVSGQGDSLHEHIANLAGSPAIKKGILQTVKVVDELVKVMGRHKPENIVIEMARENQTTQKGQKNSRERMKRIEEGIKELGSQILKEHPVENTQLQNEKLYLYYLQNGRDMYVDQELDINRLSDYDVDHIVPQSFLKDDSIDNKVLTRSDKARGKSDNVPSEEVVKKMKNYWRQLLNAKLITQRKFDNLTKAERGGLSELDKAGFIKRQLVETRQITKHVAQILDSRMNTKYDENDKLIREVKVITLKSKLVSDFRKDFQFYKVREINNYHHAHDAYLNAVVGTALIKKYPKLESEFVYGDYKVYDVRKMIAKSEQEIGKATAKYFFYSNIMNFFKTEITLANGEIRKRPLIETNGETGEIVWDKGRDFATVRKVLSMPQVNIVKKTEVQTGGFSKESILPKRNSDKLIARKKDWDPKKYGGFDSPTVAYSVLVVAKVEKGKSKKLKSVKELLGITIMERSSFEKNPIDFLEAKGYKEVKKDLIIKLPKYSLFELENGRKRMLASAGELQKGNELALPSKYVNFLYLASHYEKLKGSPEDNEQKQLFVEQHKHYLDEIIEQISEFSKRVILADANLDKVLSAYNKHRDKPIREQAENIIHLFTLTNLGAPAAFKYFDTTIDRKRYTSTKEVLDATLIHQSITGLYETRIDLSQLGGDGGPAPAPAPAPAPAPGGMDPLQLLQPLEAEIKGTKLKAHWNSGATITCVPEAFLEDERPIQTMLIKTIHGEKQQDVYYLTFKVQGRKVEAEVLASPYDYILLNPSDVPWLMKKPLQLTVLVPLHEYQERLLQQTALPKEQKELLQKLFLKYDALWQHWENQVGHRRIKPHNIATGTLAPRPQKQYPINPKAKPSIQIVIDDLLKQGVLIQQNSTMNTPVYPVPKPDGKWRMVLDYREVNKTIPLIAAQNQHSAGILSSIYRGKYKTTLDLTNGFWAHPITPESYWLTAFTWQGKQYCWTRLPQGFLNSPALFTADVVDLLKEIPNVQAYVDDIYISHDDPQEHLEQLEKIFSILLNAGYVVSLKKSEIAQREVEFLGFNITKEGRGLTDTFKQKLLNITPPKDLKQLQSILGLLNFARNFIPNYSELVKPLYTIVANANGKFISWTEDNSNQLQHIISVLNQADNLEERNPETRLIIKVNSSPSAGYIRYYNEGSKRPIMYVNYIFSKAEAKFTQTEKLLTTMHKGLIKAMDLAMGQEILVYSPIVSMTKIQRTPLPERKALPVRWITWMTYLEDPRIQFHYDKSLPELQQIPNVTEDVIAKTKHPSEFAMVFYTDGSAIKHPDVNKSHSAGMGIAQVQFIPEYKIVHQWSIPLGDHTAQLAEIAAVEFACKKALKISGPVLIVTDSFYVAESANKELPYWKSNGFLNNKKKPLRHVSKWKSIAECLQLKPDIIIMHEKGHQQPMTTLHTEGNNLADKLATQGSYVVHAGKRTADGSEFEKRTADGSEFESPKKKAKVE

SEQ ID NO: 412 - protein, 2176 aa, synthetic construct
MPAAKRVKLDGGDKKYSIGLDIGTNSVGWAVITDEYKVPSKKFKVLGNTDRHSIKKNLIGALLFDSGETAEATRLKRTARRRYTRRKNRICYLQEIFSNEMAKVDDSFFHRLEESFLVEEDKKHERHPIFGNIVDEVAYHEKYPTIYHLRKKLVDSTDKADLRLIYLALAHMIKFRGHFLIEGDLNPDNSDVDKLFIQLVQTYNQLFEENPINASGVDAKAILSARLSKSRRLENLIAQLPGEKKNGLFGNLIALSLGLTPNFKSNFDLAEDAKLQLSKDTYDDDLDNLLAQIGDQYADLFLAAKNLSDAILLSDILRVNTEITKAPLSASMIKRYDEHHQDLTLLKALVRQQLPEKYKEIFFDQSKNGYAGYIDGGASQEEFYKFIKPILEKMDGTEELLVKLNREDLLRKQRTFDNGSIPHQIHLGELHAILRRQEDFYPFLKDNREKIEKILTFRIPYYVGPLARGNSRFAWMTRKSEETITPWNFEEVVDKGASAQSFIERMTNFDKNLPNEKVLPKHSLLYEYFTVYNELTKVKYVTEGMRKPAFLSGEQKKAIVDLLFKTNRKVTVKQLKEDYFKKIECFDSVEISGVEDRFNASLGTYHDLLKIIKDKDFLDNEENEDILEDIVLTLTLFEDREMIEERLKTYAHLFDDKVMKQLKRRRYTGWGRLSRKLINGIRDKQSGKTILDFLKSDGFANRNFMQLIHDDSLTFKEDIQKAQVSGQGDSLHEHIANLAGSPAIKKGILQTVKVVDELVKVMGRHKPENIVIEMARENQTTQKGQKNSRERMKRIEEGIKELGSQILKEHPVENTQLQNEKLYLYYLQNGRDMYVDQELDINRLSDYDVDHIVPQSFLKDDSIDNKVLTRSDKARGKSDNVPSEEVVKKMKNYWRQLLNAKLITQRKFDNLTKAERGGLSELDKAGFIKRQLVETRQITKHVAQILDSRMNTKYDENDKLIREVKVITLKSKLVSDFRKDFQFYKVREINNYHHAHDAYLNAVVGTALIKKYPKLESEFVYGDYKVYDVRKMIAKSEQEIGKATAKYFFYSNIMNFFKTEITLANGEIRKRPLIETNGETGEIVWDKGRDFATVRKVLSMPQVNIVKKTEVQTGGFSKESILPKRNSDKLIARKKDWDPKKYGGFDSPTVAYSVLVVAKVEKGKSKKLKSVKELLGITIMERSSFEKNPIDFLEAKGYKEVKKDLIIKLPKYSLFELENGRKRMLASAGELQKGNELALPSKYVNFLYLASHYEKLKGSPEDNEQKQLFVEQHKHYLDEIIEQISEFSKRVILADANLDKVLSAYNKHRDKPIREQAENIIHLFTLTNLGAPAAFKYFDTTIDRKRYTSTKEVLDATLIHQSITGLYETRIDLSQLGGDGGPAPEAAAKGSSGGMDPLQLLQPLEAEIKGTKLKAHWNSGATITCVPEAFLEDERPIQTMLIKTIHGEKQQDVYYLTFKVQGRKVEAEVLASPYDYILLNPSDVPWLMKKPLQLTVLVPLHEYQERLLQQTALPKEQKELLQKLFLKYDALWQHWENQVGHRRIKPHNIATGTLAPRPQKQYPINPKAKPSIQIVIDDLLKQGVLIQQNSTMNTPVYPVPKPDGKWRMVLDYREVNKTIPLIAAQNQHSAGILSSIYRGKYKTTLDLTNGFWAHPITPESYWLTAFTWQGKQYCWTRLPQGFLNSPALFTADVVDLLKEIPNVQAYVDDIYISHDDPQEHLEQLEKIFSILLNAGYVVSLKKSEIAQREVEFLGFNITKEGRGLTDTFKQKLLNITPPKDLKQLQSILGLLNFARNFIPNYSELVKPLYTIVANANGKFISWTEDNSNQLQHIISVLNQADNLEERNPETRLIIKVNSSPSAGYIRYYNEGSKRPIMYVNYIFSKAEAKFTQTEKLLTTMHKGLIKAMDLAMGQEILVYSPIVSMTKIQRTPLPERKALPVRWITWMTYLEDPRIQFHYDKSLPELQQIPNVTEDVIAKTKHPSEFAMVFYTDGSAIKHPDVNKSHSAGMGIAQVQFIPEYKIVHQWSIPLGDHTAQLAEIAAVEFACKKALKISGPVLIVTDSFYVAESANKELPYWKSNGFLNNKKKPLRHVSKWKSIAECLQLKPDIIIMHEKGHQQPMTTLHTEGNNLADKLATQGSYVVHAGKRTADGSEFEKRTADGSEFESPKKKAKVE

SEQ ID NO: 413 - protein, 2180 aa, synthetic construct
MPAAKRVKLDGGDKKYSIGLDIGTNSVGWAVITDEYKVPSKKFKVLGNTDRHSIKKNLIGALLFDSGETAEATRLKRTARRRYTRRKNRICYLQEIFSNEMAKVDDSFFHRLEESFLVEEDKKHERHPIFGNIVDEVAYHEKYPTIYHLRKKLVDSTDKADLRLIYLALAHMIKFRGHFLIEGDLNPDNSDVDKLFIQLVQTYNQLFEENPINASGVDAKAILSARLSKSRRLENLIAQLPGEKKNGLFGNLIALSLGLTPNFKSNFDLAEDAKLQLSKDTYDDDLDNLLAQIGDQYADLFLAAKNLSDAILLSDILRVNTEITKAPLSASMIKRYDEHHQDLTLLKALVRQQLPEKYKEIFFDQSKNGYAGYIDGGASQEEFYKFIKPILEKMDGTEELLVKLNREDLLRKQRTFDNGSIPHQIHLGELHAILRRQEDFYPFLKDNREKIEKILTFRIPYYVGPLARGNSRFAWMTRKSEETITPWNFEEVVDKGASAQSFIERMTNFDKNLPNEKVLPKHSLLYEYFTVYNELTKVKYVTEGMRKPAFLSGEQKKAIVDLLFKTNRKVTVKQLKEDYFKKIECFDSVEISGVEDRFNASLGTYHDLLKIIKDKDFLDNEENEDILEDIVLTLTLFEDREMIEERLKTYAHLFDDKVMKQLKRRRYTGWGRLSRKLINGIRDKQSGKTILDFLKSDGFANRNFMQLIHDDSLTFKEDIQKAQVSGQGDSLHEHIANLAGSPAIKKGILQTVKVVDELVKVMGRHKPENIVIEMARENQTTQKGQKNSRERMKRIEEGIKELGSQILKEHPVENTQLQNEKLYLYYLQNGRDMYVDQELDINRLSDYDVDHIVPQSFLKDDSIDNKVLTRSDKARGKSDNVPSEEVVKKMKNYWRQLLNAKLITQRKFDNLTKAERGGLSELDKAGFIKRQLVETRQITKHVAQILDSRMNTKYDENDKLIREVKVITLKSKLVSDFRKDFQFYKVREINNYHHAHDAYLNAVVGTALIKKYPKLESEFVYGDYKVYDVRKMIAKSEQEIGKATAKYFFYSNIMNFFKTEITLANGEIRKRPLIETNGETGEIVWDKGRDFATVRKVLSMPQVNIVKKTEVQTGGFSKESILPKRNSDKLIARKKDWDPKKYGGFDSPTVAYSVLVVAKVEKGKSKKLKSVKELLGITIMERSSFEKNPIDFLEAKGYKEVKKDLIIKLPKYSLFELENGRKRMLASAGELQKGNELALPSKYVNFLYLASHYEKLKGSPEDNEQKQLFVEQHKHYLDEIIEQISEFSKRVILADANLDKVLSAYNKHRDKPIREQAENIIHLFTLTNLGAPAAFKYFDTTIDRKRYTSTKEVLDATLIHQSITGLYETRIDLSQLGGDGGEAAAKEAAAKEAAAKGGMDPLQLLQPLEAEIKGTKLKAHWNSGATITCVPEAFLEDERPIQTMLIKTIHGEKQQDVYYLTFKVQGRKVEAEVLASPYDYILLNPSDVPWLMKKPLQLTVLVPLHEYQERLLQQTALPKEQKELLQKLFLKYDALWQHWENQVGHRRIKPHNIATGTLAPRPQKQYPINPKAKPSIQIVIDDLLKQGVLIQQNSTMNTPVYPVPKPDGKWRMVLDYREVNKTIPLIAAQNQHSAGILSSIYRGKYKTTLDLTNGFWAHPITPESYWLTAFTWQGKQYCWTRLPQGFLNSPALFTADVVDLLKEIPNVQAYVDDIYISHDDPQEHLEQLEKIFSILLNAGYVVSLKKSEIAQREVEFLGFNITKEGRGLTDTFKQKLLNITPPKDLKQLQSILGLLNFARNFIPNYSELVKPLYTIVANANGKFISWTEDNSNQLQHIISVLNQADNLEERNPETRLIIKVNSSPSAGYIRYYNEGSKRPIMYVNYIFSKAEAKFTQTEKLLTTMHKGLIKAMDLAMGQEILVYSPIVSMTKIQRTPLPERKALPVRWITWMTYLEDPRIQFHYDKSLPELQQIPNVTEDVIAKTKHPSEFAMVFYTDGSAIKHPDVNKSHSAGMGIAQVQFIPEYKIVHQWSIPLGDHTAQLAEIAAVEFACKKALKISGPVLIVTDSFYVAESANKELPYWKSNGFLNNKKKPLRHVSKWKSIAECLQLKPDIIIMHEKGHQQPMTTLHTEGNNLADKLATQGSYVVHAGKRTADGSEFEKRTADGSEFESPKKKAKVE

SEQ ID NO: 414 - protein, 2176 aa, synthetic construct
MPAAKRVKLDGGDKKYSIGLDIGTNSVGWAVITDEYKVPSKKFKVLGNTDRHSIKKNLIGALLFDSGETAEATRLKRTARRRYTRRKNRICYLQEIFSNEMAKVDDSFFHRLEESFLVEEDKKHERHPIFGNIVDEVAYHEKYPTIYHLRKKLVDSTDKADLRLIYLALAHMIKFRGHFLIEGDLNPDNSDVDKLFIQLVQTYNQLFEENPINASGVDAKAILSARLSKSRRLENLIAQLPGEKKNGLFGNLIALSLGLTPNFKSNFDLAEDAKLQLSKDTYDDDLDNLLAQIGDQYADLFLAAKNLSDAILLSDILRVNTEITKAPLSASMIKRYDEHHQDLTLLKALVRQQLPEKYKEIFFDQSKNGYAGYIDGGASQEEFYKFIKPILEKMDGTEELLVKLNREDLLRKQRTFDNGSIPHQIHLGELHAILRRQEDFYPFLKDNREKIEKILTFRIPYYVGPLARGNSRFAWMTRKSEETITPWNFEEVVDKGASAQSFIERMTNFDKNLPNEKVLPKHSLLYEYFTVYNELTKVKYVTEGMRKPAFLSGEQKKAIVDLLFKTNRKVTVKQLKEDYFKKIECFDSVEISGVEDRFNASLGTYHDLLKIIKDKDFLDNEENEDILEDIVLTLTLFEDREMIEERLKTYAHLFDDKVMKQLKRRRYTGWGRLSRKLINGIRDKQSGKTILDFLKSDGFANRNFMQLIHDDSLTFKEDIQKAQVSGQGDSLHEHIANLAGSPAIKKGILQTVKVVDELVKVMGRHKPENIVIEMARENQTTQKGQKNSRERMKRIEEGIKELGSQILKEHPVENTQLQNEKLYLYYLQNGRDMYVDQELDINRLSDYDVDHIVPQSFLKDDSIDNKVLTRSDKARGKSDNVPSEEVVKKMKNYWRQLLNAKLITQRKFDNLTKAERGGLSELDKAGFIKRQLVETRQITKHVAQILDSRMNTKYDENDKLIREVKVITLKSKLVSDFRKDFQFYKVREINNYHHAHDAYLNAVVGTALIKKYPKLESEFVYGDYKVYDVRKMIAKSEQEIGKATAKYFFYSNIMNFFKTEITLANGEIRKRPLIETNGETGEIVWDKGRDFATVRKVLSMPQVNIVKKTEVQTGGFSKESILPKRNSDKLIARKKDWDPKKYGGFDSPTVAYSVLVVAKVEKGKSKKLKSVKELLGITIMERSSFEKNPIDFLEAKGYKEVKKDLIIKLPKYSLFELENGRKRMLASAGELQKGNELALPSKYVNFLYLASHYEKLKGSPEDNEQKQLFVEQHKHYLDEIIEQISEFSKRVILADANLDKVLSAYNKHRDKPIREQAENIIHLFTLTNLGAPAAFKYFDTTIDRKRYTSTKEVLDATLIHQSITGLYETRIDLSQLGGDGGEAAAKGSSPAPGGMDPLQLLQPLEAEIKGTKLKAHWNSGATITCVPEAFLEDERPIQTMLIKTIHGEKQQDVYYLTFKVQGRKVEAEVLASPYDYILLNPSDVPWLMKKPLQLTVLVPLHEYQERLLQQTALPKEQKELLQKLFLKYDALWQHWENQVGHRRIKPHNIATGTLAPRPQKQYPINPKAKPSIQIVIDDLLKQGVLIQQNSTMNTPVYPVPKPDGKWRMVLDYREVNKTIPLIAAQNQHSAGILSSIYRGKYKTTLDLTNGFWAHPITPESYWLTAFTWQGKQYCWTRLPQGFLNSPALFTADVVDLLKEIPNVQAYVDDIYISHDDPQEHLEQLEKIFSILLNAGYVVSLKKSEIAQREVEFLGFNITKEGRGLTDTFKQKLLNITPPKDLKQLQSILGLLNFARNFIPNYSELVKPLYTIVANANGKFISWTEDNSNQLQHIISVLNQADNLEERNPETRLIIKVNSSPSAGYIRYYNEGSKRPIMYVNYIFSKAEAKFTQTEKLLTTMHKGLIKAMDLAMGQEILVYSPIVSMTKIQRTPLPERKALPVRWITWMTYLEDPRIQFHYDKSLPELQQIPNVTEDVIAKTKHPSEFAMVFYTDGSAIKHPDVNKSHSAGMGIAQVQFIPEYKIVHQWSIPLGDHTAQLAEIAAVEFACKKALKISGPVLIVTDSFYVAESANKELPYWKSNGFLNNKKKPLRHVSKWKSIAECLQLKPDIIIMHEKGHQQPMTTLHTEGNNLADKLATQGSYVVHAGKRTADGSEFEKRTADGSEFESPKKKAKVE

SEQ ID NO: 415 - protein, 2174 aa, synthetic construct
MPAAKRVKLDGGDKKYSIGLDIGTNSVGWAVITDEYKVPSKKFKVLGNTDRHSIKKNLIGALLFDSGETAEATRLKRTARRRYTRRKNRICYLQEIFSNEMAKVDDSFFHRLEESFLVEEDKKHERHPIFGNIVDEVAYHEKYPTIYHLRKKLVDSTDKADLRLIYLALAHMIKFRGHFLIEGDLNPDNSDVDKLFIQLVQTYNQLFEENPINASGVDAKAILSARLSKSRRLENLIAQLPGEKKNGLFGNLIALSLGLTPNFKSNFDLAEDAKLQLSKDTYDDDLDNLLAQIGDQYADLFLAAKNLSDAILLSDILRVNTEITKAPLSASMIKRYDEHHQDLTLLKALVRQQLPEKYKEIFFDQSKNGYAGYIDGGASQEEFYKFIKPILEKMDGTEELLVKLNREDLLRKQRTFDNGSIPHQIHLGELHAILRRQEDFYPFLKDNREKIEKILTFRIPYYVGPLARGNSRFAWMTRKSEETITPWNFEEVVDKGASAQSFIERMTNFDKNLPNEKVLPKHSLLYEYFTVYNELTKVKYVTEGMRKPAFLSGEQKKAIVDLLFKTNRKVTVKQLKEDYFKKIECFDSVEISGVEDRFNASLGTYHDLLKIIKDKDFLDNEENEDILEDIVLTLTLFEDREMIEERLKTYAHLFDDKVMKQLKRRRYTGWGRLSRKLINGIRDKQSGKTILDFLKSDGFANRNFMQLIHDDSLTFKEDIQKAQVSGQGDSLHEHIANLAGSPAIKKGILQTVKVVDELVKVMGRHKPENIVIEMARENQTTQKGQKNSRERMKRIEEGIKELGSQILKEHPVENTQLQNEKLYLYYLQNGRDMYVDQELDINRLSDYDVDHIVPQSFLKDDSIDNKVLTRSDKARGKSDNVPSEEVVKKMKNYWRQLLNAKLITQRKFDNLTKAERGGLSELDKAGFIKRQLVETRQITKHVAQILDSRMNTKYDENDKLIREVKVITLKSKLVSDFRKDFQFYKVREINNYHHAHDAYLNAVVGTALIKKYPKLESEFVYGDYKVYDVRKMIAKSEQEIGKATAKYFFYSNIMNFFKTEITLANGEIRKRPLIETNGETGEIVWDKGRDFATVRKVLSMPQVNIVKKTEVQTGGFSKESILPKRNSDKLIARKKDWDPKKYGGFDSPTVAYSVLVVAKVEKGKSKKLKSVKELLGITIMERSSFEKNPIDFLEAKGYKEVKKDLIIKLPKYSLFELENGRKRMLASAGELQKGNELALPSKYVNFLYLASHYEKLKGSPEDNEQKQLFVEQHKHYLDEIIEQISEFSKRVILADANLDKVLSAYNKHRDKPIREQAENIIHLFTLTNLGAPAAFKYFDTTIDRKRYTSTKEVLDATLIHQSITGLYETRIDLSQLGGDGGGGGPAPGSSGGMDPLQLLQPLEAEIKGTKLKAHWNSGATITCVPEAFLEDERPIQTMLIKTIHGEKQQDVYYLTFKVQGRKVEAEVLASPYDYILLNPSDVPWLMKKPLQLTVLVPLHEYQERLLQQTALPKEQKELLQKLFLKYDALWQHWENQVGHRRIKPHNIATGTLAPRPQKQYPINPKAKPSIQIVIDDLLKQGVLIQQNSTMNTPVYPVPKPDGKWRMVLDYREVNKTIPLIAAQNQHSAGILSSIYRGKYKTTLDLTNGFWAHPITPESYWLTAFTWQGKQYCWTRLPQGFLNSPALFTADVVDLLKEIPNVQAYVDDIYISHDDPQEHLEQLEKIFSILLNAGYVVSLKKSEIAQREVEFLGFNITKEGRGLTDTFKQKLLNITPPKDLKQLQSILGLLNFARNFIPNYSELVKPLYTIVANANGKFISWTEDNSNQLQHIISVLNQADNLEERNPETRLIIKVNSSPSAGYIRYYNEGSKRPIMYVNYIFSKAEAKFTQTEKLLTTMHKGLIKAMDLAMGQEILVYSPIVSMTKIQRTPLPERKALPVRWITWMTYLEDPRIQFHYDKSLPELQQIPNVTEDVIAKTKHPSEFAMVFYTDGSAIKHPDVNKSHSAGMGIAQVQFIPEYKIVHQWSIPLGDHTAQLAEIAAVEFACKKALKISGPVLIVTDSFYVAESANKELPYWKSNGFLNNKKKPLRHVSKWKSIAECLQLKPDIIIMHEKGHQQPMTTLHTEGNNLADKLATQGSYVVHAGKRTADGSEFEKRTADGSEFESPKKKAKVE

SEQ ID NO: 416 - protein, 2173 aa, synthetic construct
MPAAKRVKLDGGDKKYSIGLDIGTNSVGWAVITDEYKVPSKKFKVLGNTDRHSIKKNLIGALLFDSGETAEATRLKRTARRRYTRRKNRICYLQEIFSNEMAKVDDSFFHRLEESFLVEEDKKHERHPIFGNIVDEVAYHEKYPTIYHLRKKLVDSTDKADLRLIYLALAHMIKFRGHFLIEGDLNPDNSDVDKLFIQLVQTYNQLFEENPINASGVDAKAILSARLSKSRRLENLIAQLPGEKKNGLFGNLIALSLGLTPNFKSNFDLAEDAKLQLSKDTYDDDLDNLLAQIGDQYADLFLAAKNLSDAILLSDILRVNTEITKAPLSASMIKRYDEHHQDLTLLKALVRQQLPEKYKEIFFDQSKNGYAGYIDGGASQEEFYKFIKPILEKMDGTEELLVKLNREDLLRKQRTFDNGSIPHQIHLGELHAILRRQEDFYPFLKDNREKIEKILTFRIPYYVGPLARGNSRFAWMTRKSEETITPWNFEEVVDKGASAQSFIERMTNFDKNLPNEKVLPKHSLLYEYFTVYNELTKVKYVTEGMRKPAFLSGEQKKAIVDLLFKTNRKVTVKQLKEDYFKKIECFDSVEISGVEDRFNASLGTYHDLLKIIKDKDFLDNEENEDILEDIVLTLTLFEDREMIEERLKTYAHLFDDKVMKQLKRRRYTGWGRLSRKLINGIRDKQSGKTILDFLKSDGFANRNFMQLIHDDSLTFKEDIQKAQVSGQGDSLHEHIANLAGSPAIKKGILQTVKVVDELVKVMGRHKPENIVIEMARENQTTQKGQKNSRERMKRIEEGIKELGSQILKEHPVENTQLQNEKLYLYYLQNGRDMYVDQELDINRLSDYDVDHIVPQSFLKDDSIDNKVLTRSDKARGKSDNVPSEEVVKKMKNYWRQLLNAKLITQRKFDNLTKAERGGLSELDKAGFIKRQLVETRQITKHVAQILDSRMNTKYDENDKLIREVKVITLKSKLVSDFRKDFQFYKVREINNYHHAHDAYLNAVVGTALIKKYPKLESEFVYGDYKVYDVRKMIAKSEQEIGKATAKYFFYSNIMNFFKTEITLANGEIRKRPLIETNGETGEIVWDKGRDFATVRKVLSMPQVNIVKKTEVQTGGFSKESILPKRNSDKLIARKKDWDPKKYGGFDSPTVAYSVLVVAKVEKGKSKKLKSVKELLGITIMERSSFEKNPIDFLEAKGYKEVKKDLIIKLPKYSLFELENGRKRMLASAGELQKGNELALPSKYVNFLYLASHYEKLKGSPEDNEQKQLFVEQHKHYLDEIIEQISEFSKRVILADANLDKVLSAYNKHRDKPIREQAENIIHLFTLTNLGAPAAFKYFDTTIDRKRYTSTKEVLDATLIHQSITGLYETRIDLSQLGGDGGGGGEAAAKGGMDPLQLLQPLEAEIKGTKLKAHWNSGATITCVPEAFLEDERPIQTMLIKTIHGEKQQDVYYLTFKVQGRKVEAEVLASPYDYILLNPSDVPWLMKKPLQLTVLVPLHEYQERLLQQTALPKEQKELLQKLFLKYDALWQHWENQVGHRRIKPHNIATGTLAPRPQKQYPINPKAKPSIQIVIDDLLKQGVLIQQNSTMNTPVYPVPKPDGKWRMVLDYREVNKTIPLIAAQNQHSAGILSSIYRGKYKTTLDLTNGFWAHPITPESYWLTAFTWQGKQYCWTRLPQGFLNSPALFTADVVDLLKEIPNVQAYVDDIYISHDDPQEHLEQLEKIFSILLNAGYVVSLKKSEIAQREVEFLGFNITKEGRGLTDTFKQKLLNITPPKDLKQLQSILGLLNFARNFIPNYSELVKPLYTIVANANGKFISWTEDNSNQLQHIISVLNQADNLEERNPETRLIIKVNSSPSAGYIRYYNEGSKRPIMYVNYIFSKAEAKFTQTEKLLTTMHKGLIKAMDLAMGQEILVYSPIVSMTKIQRTPLPERKALPVRWITWMTYLEDPRIQFHYDKSLPELQQIPNVTEDVIAKTKHPSEFAMVFYTDGSAIKHPDVNKSHSAGMGIAQVQFIPEYKIVHQWSIPLGDHTAQLAEIAAVEFACKKALKISGPVLIVTDSFYVAESANKELPYWKSNGFLNNKKKPLRHVSKWKSIAECLQLKPDIIIMHEKGHQQPMTTLHTEGNNLADKLATQGSYVVHAGKRTADGSEFEKRTADGSEFESPKKKAKVE

SEQ ID NO: 417 - protein, 2176 aa, synthetic construct
MPAAKRVKLDGGDKKYSIGLDIGTNSVGWAVITDEYKVPSKKFKVLGNTDRHSIKKNLIGALLFDSGETAEATRLKRTARRRYTRRKNRICYLQEIFSNEMAKVDDSFFHRLEESFLVEEDKKHERHPIFGNIVDEVAYHEKYPTIYHLRKKLVDSTDKADLRLIYLALAHMIKFRGHFLIEGDLNPDNSDVDKLFIQLVQTYNQLFEENPINASGVDAKAILSARLSKSRRLENLIAQLPGEKKNGLFGNLIALSLGLTPNFKSNFDLAEDAKLQLSKDTYDDDLDNLLAQIGDQYADLFLAAKNLSDAILLSDILRVNTEITKAPLSASMIKRYDEHHQDLTLLKALVRQQLPEKYKEIFFDQSKNGYAGYIDGGASQEEFYKFIKPILEKMDGTEELLVKLNREDLLRKQRTFDNGSIPHQIHLGELHAILRRQEDFYPFLKDNREKIEKILTFRIPYYVGPLARGNSRFAWMTRKSEETITPWNFEEVVDKGASAQSFIERMTNFDKNLPNEKVLPKHSLLYEYFTVYNELTKVKYVTEGMRKPAFLSGEQKKAIVDLLFKTNRKVTVKQLKEDYFKKIECFDSVEISGVEDRFNASLGTYHDLLKIIKDKDFLDNEENEDILEDIVLTLTLFEDREMIEERLKTYAHLFDDKVMKQLKRRRYTGWGRLSRKLINGIRDKQSGKTILDFLKSDGFANRNFMQLIHDDSLTFKEDIQKAQVSGQGDSLHEHIANLAGSPAIKKGILQTVKVVDELVKVMGRHKPENIVIEMARENQTTQKGQKNSRERMKRIEEGIKELGSQILKEHPVENTQLQNEKLYLYYLQNGRDMYVDQELDINRLSDYDVDHIVPQSFLKDDSIDNKVLTRSDKARGKSDNVPSEEVVKKMKNYWRQLLNAKLITQRKFDNLTKAERGGLSELDKAGFIKRQLVETRQITKHVAQILDSRMNTKYDENDKLIREVKVITLKSKLVSDFRKDFQFYKVREINNYHHAHDAYLNAVVGTALIKKYPKLESEFVYGDYKVYDVRKMIAKSEQEIGKATAKYFFYSNIMNFFKTEITLANGEIRKRPLIETNGETGEIVWDKGRDFATVRKVLSMPQVNIVKKTEVQTGGFSKESILPKRNSDKLIARKKDWDPKKYGGFDSPTVAYSVLVVAKVEKGKSKKLKSVKELLGITIMERSSFEKNPIDFLEAKGYKEVKKDLIIKLPKYSLFELENGRKRMLASAGELQKGNELALPSKYVNFLYLASHYEKLKGSPEDNEQKQLFVEQHKHYLDEIIEQISEFSKRVILADANLDKVLSAYNKHRDKPIREQAENIIHLFTLTNLGAPAAFKYFDTTIDRKRYTSTKEVLDATLIHQSITGLYETRIDLSQLGGDGGGGSEAAAKPAPGGMDPLQLLQPLEAEIKGTKLKAHWNSGATITCVPEAFLEDERPIQTMLIKTIHGEKQQDVYYLTFKVQGRKVEAEVLASPYDYILLNPSDVPWLMKKPLQLTVLVPLHEYQERLLQQTALPKEQKELLQKLFLKYDALWQHWENQVGHRRIKPHNIATGTLAPRPQKQYPINPKAKPSIQIVIDDLLKQGVLIQQNSTMNTPVYPVPKPDGKWRMVLDYREVNKTIPLIAAQNQHSAGILSSIYRGKYKTTLDLTNGFWAHPITPESYWLTAFTWQGKQYCWTRLPQGFLNSPALFTADVVDLLKEIPNVQAYVDDIYISHDDPQEHLEQLEKIFSILLNAGYVVSLKKSEIAQREVEFLGFNITKEGRGLTDTFKQKLLNITPPKDLKQLQSILGLLNFARNFIPNYSELVKPLYTIVANANGKFISWTEDNSNQLQHIISVLNQADNLEERNPETRLIIKVNSSPSAGYIRYYNEGSKRPIMYVNYIFSKAEAKFTQTEKLLTTMHKGLIKAMDLAMGQEILVYSPIVSMTKIQRTPLPERKALPVRWITWMTYLEDPRIQFHYDKSLPELQQIPNVTEDVIAKTKHPSEFAMVFYTDGSAIKHPDVNKSHSAGMGIAQVQFIPEYKIVHQWSIPLGDHTAQLAEIAAVEFACKKALKISGPVLIVTDSFYVAESANKELPYWKSNGFLNNKKKPLRHVSKWKSIAECLQLKPDIIIMHEKGHQQPMTTLHTEGNNLADKLATQGSYVVHAGKRTADGSEFEKRTADGSEFESPKKKAKVE

SEQ ID NO: 418 - protein, 2177 aa, synthetic construct
MPAAKRVKLDGGDKKYSIGLDIGTNSVGWAVITDEYKVPSKKFKVLGNTDRHSIKKNLIGALLFDSGETAEATRLKRTARRRYTRRKNRICYLQEIFSNEMAKVDDSFFHRLEESFLVEEDKKHERHPIFGNIVDEVAYHEKYPTIYHLRKKLVDSTDKADLRLIYLALAHMIKFRGHFLIEGDLNPDNSDVDKLFIQLVQTYNQLFEENPINASGVDAKAILSARLSKSRRLENLIAQLPGEKKNGLFGNLIALSLGLTPNFKSNFDLAEDAKLQLSKDTYDDDLDNLLAQIGDQYADLFLAAKNLSDAILLSDILRVNTEITKAPLSASMIKRYDEHHQDLTLLKALVRQQLPEKYKEIFFDQSKNGYAGYIDGGASQEEFYKFIKPILEKMDGTEELLVKLNREDLLRKQRTFDNGSIPHQIHLGELHAILRRQEDFYPFLKDNREKIEKILTFRIPYYVGPLARGNSRFAWMTRKSEETITPWNFEEVVDKGASAQSFIERMTNFDKNLPNEKVLPKHSLLYEYFTVYNELTKVKYVTEGMRKPAFLSGEQKKAIVDLLFKTNRKVTVKQLKEDYFKKIECFDSVEISGVEDRFNASLGTYHDLLKIIKDKDFLDNEENEDILEDIVLTLTLFEDREMIEERLKTYAHLFDDKVMKQLKRRRYTGWGRLSRKLINGIRDKQSGKTILDFLKSDGFANRNFMQLIHDDSLTFKEDIQKAQVSGQGDSLHEHIANLAGSPAIKKGILQTVKVVDELVKVMGRHKPENIVIEMARENQTTQKGQKNSRERMKRIEEGIKELGSQILKEHPVENTQLQNEKLYLYYLQNGRDMYVDQELDINRLSDYDVDHIVPQSFLKDDSIDNKVLTRSDKARGKSDNVPSEEVVKKMKNYWRQLLNAKLITQRKFDNLTKAERGGLSELDKAGFIKRQLVETRQITKHVAQILDSRMNTKYDENDKLIREVKVITLKSKLVSDFRKDFQFYKVREINNYHHAHDAYLNAVVGTALIKKYPKLESEFVYGDYKVYDVRKMIAKSEQEIGKATAKYFFYSNIMNFFKTEITLANGEIRKRPLIETNGETGEIVWDKGRDFATVRKVLSMPQVNIVKKTEVQTGGFSKESILPKRNSDKLIARKKDWDPKKYGGFDSPTVAYSVLVVAKVEKGKSKKLKSVKELLGITIMERSSFEKNPIDFLEAKGYKEVKKDLIIKLPKYSLFELENGRKRMLASAGELQKGNELALPSKYVNFLYLASHYEKLKGSPEDNEQKQLFVEQHKHYLDEIIEQISEFSKRVILADANLDKVLSAYNKHRDKPIREQAENIIHLFTLTNLGAPAAFKYFDTTIDRKRYTSTKEVLDATLIHQSITGLYETRIDLSQLGGDGGGSSGSSGSSGSSGGMDPLQLLQPLEAEIKGTKLKAHWNSGATITCVPEAFLEDERPIQTMLIKTIHGEKQQDVYYLTFKVQGRKVEAEVLASPYDYILLNPSDVPWLMKKPLQLTVLVPLHEYQERLLQQTALPKEQKELLQKLFLKYDALWQHWENQVGHRRIKPHNIATGTLAPRPQKQYPINPKAKPSIQIVIDDLLKQGVLIQQNSTMNTPVYPVPKPDGKWRMVLDYREVNKTIPLIAAQNQHSAGILSSIYRGKYKTTLDLTNGFWAHPITPESYWLTAFTWQGKQYCWTRLPQGFLNSPALFTADVVDLLKEIPNVQAYVDDIYISHDDPQEHLEQLEKIFSILLNAGYVVSLKKSEIAQREVEFLGFNITKEGRGLTDTFKQKLLNITPPKDLKQLQSILGLLNFARNFIPNYSELVKPLYTIVANANGKFISWTEDNSNQLQHIISVLNQADNLEERNPETRLIIKVNSSPSAGYIRYYNEGSKRPIMYVNYIFSKAEAKFTQTEKLLTTMHKGLIKAMDLAMGQEILVYSPIVSMTKIQRTPLPERKALPVRWITWMTYLEDPRIQFHYDKSLPELQQIPNVTEDVIAKTKHPSEFAMVFYTDGSAIKHPDVNKSHSAGMGIAQVQFIPEYKIVHQWSIPLGDHTAQLAEIAAVEFACKKALKISGPVLIVTDSFYVAESANKELPYWKSNGFLNNKKKPLRHVSKWKSIAECLQLKPDIIIMHEKGHQQPMTTLHTEGNNLADKLATQGSYVVHAGKRTADGSEFEKRTADGSEFESPKKKAKVE

SEQ ID NO: 419 - protein, 2174 aa, synthetic construct
MPAAKRVKLDGGDKKYSIGLDIGTNSVGWAVITDEYKVPSKKFKVLGNTDRHSIKKNLIGALLFDSGETAEATRLKRTARRRYTRRKNRICYLQEIFSNEMAKVDDSFFHRLEESFLVEEDKKHERHPIFGNIVDEVAYHEKYPTIYHLRKKLVDSTDKADLRLIYLALAHMIKFRGHFLIEGDLNPDNSDVDKLFIQLVQTYNQLFEENPINASGVDAKAILSARLSKSRRLENLIAQLPGEKKNGLFGNLIALSLGLTPNFKSNFDLAEDAKLQLSKDTYDDDLDNLLAQIGDQYADLFLAAKNLSDAILLSDILRVNTEITKAPLSASMIKRYDEHHQDLTLLKALVRQQLPEKYKEIFFDQSKNGYAGYIDGGASQEEFYKFIKPILEKMDGTEELLVKLNREDLLRKQRTFDNGSIPHQIHLGELHAILRRQEDFYPFLKDNREKIEKILTFRIPYYVGPLARGNSRFAWMTRKSEETITPWNFEEVVDKGASAQSFIERMTNFDKNLPNEKVLPKHSLLYEYFTVYNELTKVKYVTEGMRKPAFLSGEQKKAIVDLLFKTNRKVTVKQLKEDYFKKIECFDSVEISGVEDRFNASLGTYHDLLKIIKDKDFLDNEENEDILEDIVLTLTLFEDREMIEERLKTYAHLFDDKVMKQLKRRRYTGWGRLSRKLINGIRDKQSGKTILDFLKSDGFANRNFMQLIHDDSLTFKEDIQKAQVSGQGDSLHEHIANLAGSPAIKKGILQTVKVVDELVKVMGRHKPENIVIEMARENQTTQKGQKNSRERMKRIEEGIKELGSQILKEHPVENTQLQNEKLYLYYLQNGRDMYVDQELDINRLSDYDVDHIVPQSFLKDDSIDNKVLTRSDKARGKSDNVPSEEVVKKMKNYWRQLLNAKLITQRKFDNLTKAERGGLSELDKAGFIKRQLVETRQITKHVAQILDSRMNTKYDENDKLIREVKVITLKSKLVSDFRKDFQFYKVREINNYHHAHDAYLNAVVGTALIKKYPKLESEFVYGDYKVYDVRKMIAKSEQEIGKATAKYFFYSNIMNFFKTEITLANGEIRKRPLIETNGETGEIVWDKGRDFATVRKVLSMPQVNIVKKTEVQTGGFSKESILPKRNSDKLIARKKDWDPKKYGGFDSPTVAYSVLVVAKVEKGKSKKLKSVKELLGITIMERSSFEKNPIDFLEAKGYKEVKKDLIIKLPKYSLFELENGRKRMLASAGELQKGNELALPSKYVNFLYLASHYEKLKGSPEDNEQKQLFVEQHKHYLDEIIEQISEFSKRVILADANLDKVLSAYNKHRDKPIREQAENIIHLFTLTNLGAPAAFKYFDTTIDRKRYTSTKEVLDATLIHQSITGLYETRIDLSQLGGDGGGGGGSSPAPGGMDPLQLLQPLEAEIKGTKLKAHWNSGATITCVPEAFLEDERPIQTMLIKTIHGEKQQDVYYLTFKVQGRKVEAEVLASPYDYILLNPSDVPWLMKKPLQLTVLVPLHEYQERLLQQTALPKEQKELLQKLFLKYDALWQHWENQVGHRRIKPHNIATGTLAPRPQKQYPINPKAKPSIQIVIDDLLKQGVLIQQNSTMNTPVYPVPKPDGKWRMVLDYREVNKTIPLIAAQNQHSAGILSSIYRGKYKTTLDLTNGFWAHPITPESYWLTAFTWQGKQYCWTRLPQGFLNSPALFTADVVDLLKEIPNVQAYVDDIYISHDDPQEHLEQLEKIFSILLNAGYVVSLKKSEIAQREVEFLGFNITKEGRGLTDTFKQKLLNITPPKDLKQLQSILGLLNFARNFIPNYSELVKPLYTIVANANGKFISWTEDNSNQLQHIISVLNQADNLEERNPETRLIIKVNSSPSAGYIRYYNEGSKRPIMYVNYIFSKAEAKFTQTEKLLTTMHKGLIKAMDLAMGQEILVYSPIVSMTKIQRTPLPERKALPVRWITWMTYLEDPRIQFHYDKSLPELQQIPNVTEDVIAKTKHPSEFAMVFYTDGSAIKHPDVNKSHSAGMGIAQVQFIPEYKIVHQWSIPLGDHTAQLAEIAAVEFACKKALKISGPVLIVTDSFYVAESANKELPYWKSNGFLNNKKKPLRHVSKWKSIAECLQLKPDIIIMHEKGHQQPMTTLHTEGNNLADKLATQGSYVVHAGKRTADGSEFEKRTADGSEFESPKKKAKVE

SEQ ID NO: 420 - protein, 2176 aa, synthetic construct
MPAAKRVKLDGGDKKYSIGLDIGTNSVGWAVITDEYKVPSKKFKVLGNTDRHSIKKNLIGALLFDSGETAEATRLKRTARRRYTRRKNRICYLQEIFSNEMAKVDDSFFHRLEESFLVEEDKKHERHPIFGNIVDEVAYHEKYPTIYHLRKKLVDSTDKADLRLIYLALAHMIKFRGHFLIEGDLNPDNSDVDKLFIQLVQTYNQLFEENPINASGVDAKAILSARLSKSRRLENLIAQLPGEKKNGLFGNLIALSLGLTPNFKSNFDLAEDAKLQLSKDTYDDDLDNLLAQIGDQYADLFLAAKNLSDAILLSDILRVNTEITKAPLSASMIKRYDEHHQDLTLLKALVRQQLPEKYKEIFFDQSKNGYAGYIDGGASQEEFYKFIKPILEKMDGTEELLVKLNREDLLRKQRTFDNGSIPHQIHLGELHAILRRQEDFYPFLKDNREKIEKILTFRIPYYVGPLARGNSRFAWMTRKSEETITPWNFEEVVDKGASAQSFIERMTNFDKNLPNEKVLPKHSLLYEYFTVYNELTKVKYVTEGMRKPAFLSGEQKKAIVDLLFKTNRKVTVKQLKEDYFKKIECFDSVEISGVEDRFNASLGTYHDLLKIIKDKDFLDNEENEDILEDIVLTLTLFEDREMIEERLKTYAHLFDDKVMKQLKRRRYTGWGRLSRKLINGIRDKQSGKTILDFLKSDGFANRNFMQLIHDDSLTFKEDIQKAQVSGQGDSLHEHIANLAGSPAIKKGILQTVKVVDELVKVMGRHKPENIVIEMARENQTTQKGQKNSRERMKRIEEGIKELGSQILKEHPVENTQLQNEKLYLYYLQNGRDMYVDQELDINRLSDYDVDHIVPQSFLKDDSIDNKVLTRSDKARGKSDNVPSEEVVKKMKNYWRQLLNAKLITQRKFDNLTKAERGGLSELDKAGFIKRQLVETRQITKHVAQILDSRMNTKYDENDKLIREVKVITLKSKLVSDFRKDFQFYKVREINNYHHAHDAYLNAVVGTALIKKYPKLESEFVYGDYKVYDVRKMIAKSEQEIGKATAKYFFYSNIMNFFKTEITLANGEIRKRPLIETNGETGEIVWDKGRDFATVRKVLSMPQVNIVKKTEVQTGGFSKESILPKRNSDKLIARKKDWDPKKYGGFDSPTVAYSVLVVAKVEKGKSKKLKSVKELLGITIMERSSFEKNPIDFLEAKGYKEVKKDLIIKLPKYSLFELENGRKRMLASAGELQKGNELALPSKYVNFLYLASHYEKLKGSPEDNEQKQLFVEQHKHYLDEIIEQISEFSKRVILADANLDKVLSAYNKHRDKPIREQAENIIHLFTLTNLGAPAAFKYFDTTIDRKRYTSTKEVLDATLIHQSITGLYETRIDLSQLGGDGGGGGGSSEAAAKGGMDPLQLLQPLEAEIKGTKLKAHWNSGATITCVPEAFLEDERPIQTMLIKTIHGEKQQDVYYLTFKVQGRKVEAEVLASPYDYILLNPSDVPWLMKKPLQLTVLVPLHEYQERLLQQTALPKEQKELLQKLFLKYDALWQHWENQVGHRRIKPHNIATGTLAPRPQKQYPINPKAKPSIQIVIDDLLKQGVLIQQNSTMNTPVYPVPKPDGKWRMVLDYREVNKTIPLIAAQNQHSAGILSSIYRGKYKTTLDLTNGFWAHPITPESYWLTAFTWQGKQYCWTRLPQGFLNSPALFTADVVDLLKEIPNVQAYVDDIYISHDDPQEHLEQLEKIFSILLNAGYVVSLKKSEIAQREVEFLGFNITKEGRGLTDTFKQKLLNITPPKDLKQLQSILGLLNFARNFIPNYSELVKPLYTIVANANGKFISWTEDNSNQLQHIISVLNQADNLEERNPETRLIIKVNSSPSAGYIRYYNEGSKRPIMYVNYIFSKAEAKFTQTEKLLTTMHKGLIKAMDLAMGQEILVYSPIVSMTKIQRTPLPERKALPVRWITWMTYLEDPRIQFHYDKSLPELQQIPNVTEDVIAKTKHPSEFAMVFYTDGSAIKHPDVNKSHSAGMGIAQVQFIPEYKIVHQWSIPLGDHTAQLAEIAAVEFACKKALKISGPVLIVTDSFYVAESANKELPYWKSNGFLNNKKKPLRHVSKWKSIAECLQLKPDIIIMHEKGHQQPMTTLHTEGNNLADKLATQGSYVVHAGKRTADGSEFEKRTADGSEFESPKKKAKVE

SEQ ID NO: 421 - protein, 2180 aa, synthetic construct
MPAAKRVKLDGGDKKYSIGLDIGTNSVGWAVITDEYKVPSKKFKVLGNTDRHSIKKNLIGALLFDSGETAEATRLKRTARRRYTRRKNRICYLQEIFSNEMAKVDDSFFHRLEESFLVEEDKKHERHPIFGNIVDEVAYHEKYPTIYHLRKKLVDSTDKADLRLIYLALAHMIKFRGHFLIEGDLNPDNSDVDKLFIQLVQTYNQLFEENPINASGVDAKAILSARLSKSRRLENLIAQLPGEKKNGLFGNLIALSLGLTPNFKSNFDLAEDAKLQLSKDTYDDDLDNLLAQIGDQYADLFLAAKNLSDAILLSDILRVNTEITKAPLSASMIKRYDEHHQDLTLLKALVRQQLPEKYKEIFFDQSKNGYAGYIDGGASQEEFYKFIKPILEKMDGTEELLVKLNREDLLRKQRTFDNGSIPHQIHLGELHAILRRQEDFYPFLKDNREKIEKILTFRIPYYVGPLARGNSRFAWMTRKSEETITPWNFEEVVDKGASAQSFIERMTNFDKNLPNEKVLPKHSLLYEYFTVYNELTKVKYVTEGMRKPAFLSGEQKKAIVDLLFKTNRKVTVKQLKEDYFKKIECFDSVEISGVEDRFNASLGTYHDLLKIIKDKDFLDNEENEDILEDIVLTLTLFEDREMIEERLKTYAHLFDDKVMKQLKRRRYTGWGRLSRKLINGIRDKQSGKTILDFLKSDGFANRNFMQLIHDDSLTFKEDIQKAQVSGQGDSLHEHIANLAGSPAIKKGILQTVKVVDELVKVMGRHKPENIVIEMARENQTTQKGQKNSRERMKRIEEGIKELGSQILKEHPVENTQLQNEKLYLYYLQNGRDMYVDQELDINRLSDYDVDHIVPQSFLKDDSIDNKVLTRSDKARGKSDNVPSEEVVKKMKNYWRQLLNAKLITQRKFDNLTKAERGGLSELDKAGFIKRQLVETRQITKHVAQILDSRMNTKYDENDKLIREVKVITLKSKLVSDFRKDFQFYKVREINNYHHAHDAYLNAVVGTALIKKYPKLESEFVYGDYKVYDVRKMIAKSEQEIGKATAKYFFYSNIMNFFKTEITLANGEIRKRPLIETNGETGEIVWDKGRDFATVRKVLSMPQVNIVKKTEVQTGGFSKESILPKRNSDKLIARKKDWDPKKYGGFDSPTVAYSVLVVAKVEKGKSKKLKSVKELLGITIMERSSFEKNPIDFLEAKGYKEVKKDLIIKLPKYSLFELENGRKRMLASAGELQKGNELALPSKYVNFLYLASHYEKLKGSPEDNEQKQLFVEQHKHYLDEIIEQISEFSKRVILADANLDKVLSAYNKHRDKPIREQAENIIHLFTLTNLGAPAAFKYFDTTIDRKRYTSTKEVLDATLIHQSITGLYETRIDLSQLGGDGGGGGGSEAAAKGGGGSGGMDPLQLLQPLEAEIKGTKLKAHWNSGATITCVPEAFLEDERPIQTMLIKTIHGEKQQDVYYLTFKVQGRKVEAEVLASPYDYILLNPSDVPWLMKKPLQLTVLVPLHEYQERLLQQTALPKEQKELLQKLFLKYDALWQHWENQVGHRRIKPHNIATGTLAPRPQKQYPINPKAKPSIQIVIDDLLKQGVLIQQNSTMNTPVYPVPKPDGKWRMVLDYREVNKTIPLIAAQNQHSAGILSSIYRGKYKTTLDLTNGFWAHPITPESYWLTAFTWQGKQYCWTRLPQGFLNSPALFTADVVDLLKEIPNVQAYVDDIYISHDDPQEHLEQLEKIFSILLNAGYVVSLKKSEIAQREVEFLGFNITKEGRGLTDTFKQKLLNITPPKDLKQLQSILGLLNFARNFIPNYSELVKPLYTIVANANGKFISWTEDNSNQLQHIISVLNQADNLEERNPETRLIIKVNSSPSAGYIRYYNEGSKRPIMYVNYIFSKAEAKFTQTEKLLTTMHKGLIKAMDLAMGQEILVYSPIVSMTKIQRTPLPERKALPVRWITWMTYLEDPRIQFHYDKSLPELQQIPNVTEDVIAKTKHPSEFAMVFYTDGSAIKHPDVNKSHSAGMGIAQVQFIPEYKIVHQWSIPLGDHTAQLAEIAAVEFACKKALKISGPVLIVTDSFYVAESANKELPYWKSNGFLNNKKKPLRHVSKWKSIAECLQLKPDIIIMHEKGHQQPMTTLHTEGNNLADKLATQGSYVVHAGKRTADGSEFEKRTADGSEFESPKKKAKVE

SEQ ID NO: 422 - protein, 2176 aa, synthetic construct
MPAAKRVKLDGGDKKYSIGLDIGTNSVGWAVITDEYKVPSKKFKVLGNTDRHSIKKNLIGALLFDSGETAEATRLKRTARRRYTRRKNRICYLQEIFSNEMAKVDDSFFHRLEESFLVEEDKKHERHPIFGNIVDEVAYHEKYPTIYHLRKKLVDSTDKADLRLIYLALAHMIKFRGHFLIEGDLNPDNSDVDKLFIQLVQTYNQLFEENPINASGVDAKAILSARLSKSRRLENLIAQLPGEKKNGLFGNLIALSLGLTPNFKSNFDLAEDAKLQLSKDTYDDDLDNLLAQIGDQYADLFLAAKNLSDAILLSDILRVNTEITKAPLSASMIKRYDEHHQDLTLLKALVRQQLPEKYKEIFFDQSKNGYAGYIDGGASQEEFYKFIKPILEKMDGTEELLVKLNREDLLRKQRTFDNGSIPHQIHLGELHAILRRQEDFYPFLKDNREKIEKILTFRIPYYVGPLARGNSRFAWMTRKSEETITPWNFEEVVDKGASAQSFIERMTNFDKNLPNEKVLPKHSLLYEYFTVYNELTKVKYVTEGMRKPAFLSGEQKKAIVDLLFKTNRKVTVKQLKEDYFKKIECFDSVEISGVEDRFNASLGTYHDLLKIIKDKDFLDNEENEDILEDIVLTLTLFEDREMIEERLKTYAHLFDDKVMKQLKRRRYTGWGRLSRKLINGIRDKQSGKTILDFLKSDGFANRNFMQLIHDDSLTFKEDIQKAQVSGQGDSLHEHIANLAGSPAIKKGILQTVKVVDELVKVMGRHKPENIVIEMARENQTTQKGQKNSRERMKRIEEGIKELGSQILKEHPVENTQLQNEKLYLYYLQNGRDMYVDQELDINRLSDYDVDHIVPQSFLKDDSIDNKVLTRSDKARGKSDNVPSEEVVKKMKNYWRQLLNAKLITQRKFDNLTKAERGGLSELDKAGFIKRQLVETRQITKHVAQILDSRMNTKYDENDKLIREVKVITLKSKLVSDFRKDFQFYKVREINNYHHAHDAYLNAVVGTALIKKYPKLESEFVYGDYKVYDVRKMIAKSEQEIGKATAKYFFYSNIMNFFKTEITLANGEIRKRPLIETNGETGEIVWDKGRDFATVRKVLSMPQVNIVKKTEVQTGGFSKESILPKRNSDKLIARKKDWDPKKYGGFDSPTVAYSVLVVAKVEKGKSKKLKSVKELLGITIMERSSFEKNPIDFLEAKGYKEVKKDLIIKLPKYSLFELENGRKRMLASAGELQKGNELALPSKYVNFLYLASHYEKLKGSPEDNEQKQLFVEQHKHYLDEIIEQISEFSKRVILADANLDKVLSAYNKHRDKPIREQAENIIHLFTLTNLGAPAAFKYFDTTIDRKRYTSTKEVLDATLIHQSITGLYETRIDLSQLGGDGGGGGEAAAKGGSGGMDPLQLLQPLEAEIKGTKLKAHWNSGATITCVPEAFLEDERPIQTMLIKTIHGEKQQDVYYLTFKVQGRKVEAEVLASPYDYILLNPSDVPWLMKKPLQLTVLVPLHEYQERLLQQTALPKEQKELLQKLFLKYDALWQHWENQVGHRRIKPHNIATGTLAPRPQKQYPINPKAKPSIQIVIDDLLKQGVLIQQNSTMNTPVYPVPKPDGKWRMVLDYREVNKTIPLIAAQNQHSAGILSSIYRGKYKTTLDLTNGFWAHPITPESYWLTAFTWQGKQYCWTRLPQGFLNSPALFTADVVDLLKEIPNVQAYVDDIYISHDDPQEHLEQLEKIFSILLNAGYVVSLKKSEIAQREVEFLGFNITKEGRGLTDTFKQKLLNITPPKDLKQLQSILGLLNFARNFIPNYSELVKPLYTIVANANGKFISWTEDNSNQLQHIISVLNQADNLEERNPETRLIIKVNSSPSAGYIRYYNEGSKRPIMYVNYIFSKAEAKFTQTEKLLTTMHKGLIKAMDLAMGQEILVYSPIVSMTKIQRTPLPERKALPVRWITWMTYLEDPRIQFHYDKSLPELQQIPNVTEDVIAKTKHPSEFAMVFYTDGSAIKHPDVNKSHSAGMGIAQVQFIPEYKIVHQWSIPLGDHTAQLAEIAAVEFACKKALKISGPVLIVTDSFYVAESANKELPYWKSNGFLNNKKKPLRHVSKWKSIAECLQLKPDIIIMHEKGHQQPMTTLHTEGNNLADKLATQGSYVVHAGKRTADGSEFEKRTADGSEFESPKKKAKVE

SEQ ID NO: 423 - protein, 2171 aa, synthetic construct
MPAAKRVKLDGGDKKYSIGLDIGTNSVGWAVITDEYKVPSKKFKVLGNTDRHSIKKNLIGALLFDSGETAEATRLKRTARRRYTRRKNRICYLQEIFSNEMAKVDDSFFHRLEESFLVEEDKKHERHPIFGNIVDEVAYHEKYPTIYHLRKKLVDSTDKADLRLIYLALAHMIKFRGHFLIEGDLNPDNSDVDKLFIQLVQTYNQLFEENPINASGVDAKAILSARLSKSRRLENLIAQLPGEKKNGLFGNLIALSLGLTPNFKSNFDLAEDAKLQLSKDTYDDDLDNLLAQIGDQYADLFLAAKNLSDAILLSDILRVNTEITKAPLSASMIKRYDEHHQDLTLLKALVRQQLPEKYKEIFFDQSKNGYAGYIDGGASQEEFYKFIKPILEKMDGTEELLVKLNREDLLRKQRTFDNGSIPHQIHLGELHAILRRQEDFYPFLKDNREKIEKILTFRIPYYVGPLARGNSRFAWMTRKSEETITPWNFEEVVDKGASAQSFIERMTNFDKNLPNEKVLPKHSLLYEYFTVYNELTKVKYVTEGMRKPAFLSGEQKKAIVDLLFKTNRKVTVKQLKEDYFKKIECFDSVEISGVEDRFNASLGTYHDLLKIIKDKDFLDNEENEDILEDIVLTLTLFEDREMIEERLKTYAHLFDDKVMKQLKRRRYTGWGRLSRKLINGIRDKQSGKTILDFLKSDGFANRNFMQLIHDDSLTFKEDIQKAQVSGQGDSLHEHIANLAGSPAIKKGILQTVKVVDELVKVMGRHKPENIVIEMARENQTTQKGQKNSRERMKRIEEGIKELGSQILKEHPVENTQLQNEKLYLYYLQNGRDMYVDQELDINRLSDYDVDHIVPQSFLKDDSIDNKVLTRSDKARGKSDNVPSEEVVKKMKNYWRQLLNAKLITQRKFDNLTKAERGGLSELDKAGFIKRQLVETRQITKHVAQILDSRMNTKYDENDKLIREVKVITLKSKLVSDFRKDFQFYKVREINNYHHAHDAYLNAVVGTALIKKYPKLESEFVYGDYKVYDVRKMIAKSEQEIGKATAKYFFYSNIMNFFKTEITLANGEIRKRPLIETNGETGEIVWDKGRDFATVRKVLSMPQVNIVKKTEVQTGGFSKESILPKRNSDKLIARKKDWDPKKYGGFDSPTVAYSVLVVAKVEKGKSKKLKSVKELLGITIMERSSFEKNPIDFLEAKGYKEVKKDLIIKLPKYSLFELENGRKRMLASAGELQKGNELALPSKYVNFLYLASHYEKLKGSPEDNEQKQLFVEQHKHYLDEIIEQISEFSKRVILADANLDKVLSAYNKHRDKPIREQAENIIHLFTLTNLGAPAAFKYFDTTIDRKRYTSTKEVLDATLIHQSITGLYETRIDLSQLGGDGGGSSGSSGGMDPLQLLQPLEAEIKGTKLKAHWNSGATITCVPEAFLEDERPIQTMLIKTIHGEKQQDVYYLTFKVQGRKVEAEVLASPYDYILLNPSDVPWLMKKPLQLTVLVPLHEYQERLLQQTALPKEQKELLQKLFLKYDALWQHWENQVGHRRIKPHNIATGTLAPRPQKQYPINPKAKPSIQIVIDDLLKQGVLIQQNSTMNTPVYPVPKPDGKWRMVLDYREVNKTIPLIAAQNQHSAGILSSIYRGKYKTTLDLTNGFWAHPITPESYWLTAFTWQGKQYCWTRLPQGFLNSPALFTADVVDLLKEIPNVQAYVDDIYISHDDPQEHLEQLEKIFSILLNAGYVVSLKKSEIAQREVEFLGFNITKEGRGLTDTFKQKLLNITPPKDLKQLQSILGLLNFARNFIPNYSELVKPLYTIVANANGKFISWTEDNSNQLQHIISVLNQADNLEERNPETRLIIKVNSSPSAGYIRYYNEGSKRPIMYVNYIFSKAEAKFTQTEKLLTTMHKGLIKAMDLAMGQEILVYSPIVSMTKIQRTPLPERKALPVRWITWMTYLEDPRIQFHYDKSLPELQQIPNVTEDVIAKTKHPSEFAMVFYTDGSAIKHPDVNKSHSAGMGIAQVQFIPEYKIVHQWSIPLGDHTAQLAEIAAVEFACKKALKISGPVLIVTDSFYVAESANKELPYWKSNGFLNNKKKPLRHVSKWKSIAECLQLKPDIIIMHEKGHQQPMTTLHTEGNNLADKLATQGSYVVHAGKRTADGSEFEKRTADGSEFESPKKKAKVE

SEQ ID NO: 424 - protein, 2176 aa, synthetic construct
MPAAKRVKLDGGDKKYSIGLDIGTNSVGWAVITDEYKVPSKKFKVLGNTDRHSIKKNLIGALLFDSGETAEATRLKRTARRRYTRRKNRICYLQEIFSNEMAKVDDSFFHRLEESFLVEEDKKHERHPIFGNIVDEVAYHEKYPTIYHLRKKLVDSTDKADLRLIYLALAHMIKFRGHFLIEGDLNPDNSDVDKLFIQLVQTYNQLFEENPINASGVDAKAILSARLSKSRRLENLIAQLPGEKKNGLFGNLIALSLGLTPNFKSNFDLAEDAKLQLSKDTYDDDLDNLLAQIGDQYADLFLAAKNLSDAILLSDILRVNTEITKAPLSASMIKRYDEHHQDLTLLKALVRQQLPEKYKEIFFDQSKNGYAGYIDGGASQEEFYKFIKPILEKMDGTEELLVKLNREDLLRKQRTFDNGSIPHQIHLGELHAILRRQEDFYPFLKDNREKIEKILTFRIPYYVGPLARGNSRFAWMTRKSEETITPWNFEEVVDKGASAQSFIERMTNFDKNLPNEKVLPKHSLLYEYFTVYNELTKVKYVTEGMRKPAFLSGEQKKAIVDLLFKTNRKVTVKQLKEDYFKKIECFDSVEISGVEDRFNASLGTYHDLLKIIKDKDFLDNEENEDILEDIVLTLTLFEDREMIEERLKTYAHLFDDKVMKQLKRRRYTGWGRLSRKLINGIRDKQSGKTILDFLKSDGFANRNFMQLIHDDSLTFKEDIQKAQVSGQGDSLHEHIANLAGSPAIKKGILQTVKVVDELVKVMGRHKPENIVIEMARENQTTQKGQKNSRERMKRIEEGIKELGSQILKEHPVENTQLQNEKLYLYYLQNGRDMYVDQELDINRLSDYDVDHIVPQSFLKDDSIDNKVLTRSDKARGKSDNVPSEEVVKKMKNYWRQLLNAKLITQRKFDNLTKAERGGLSELDKAGFIKRQLVETRQITKHVAQILDSRMNTKYDENDKLIREVKVITLKSKLVSDFRKDFQFYKVREINNYHHAHDAYLNAVVGTALIKKYPKLESEFVYGDYKVYDVRKMIAKSEQEIGKATAKYFFYSNIMNFFKTEITLANGEIRKRPLIETNGETGEIVWDKGRDFATVRKVLSMPQVNIVKKTEVQTGGFSKESILPKRNSDKLIARKKDWDPKKYGGFDSPTVAYSVLVVAKVEKGKSKKLKSVKELLGITIMERSSFEKNPIDFLEAKGYKEVKKDLIIKLPKYSLFELENGRKRMLASAGELQKGNELALPSKYVNFLYLASHYEKLKGSPEDNEQKQLFVEQHKHYLDEIIEQISEFSKRVILADANLDKVLSAYNKHRDKPIREQAENIIHLFTLTNLGAPAAFKYFDTTIDRKRYTSTKEVLDATLIHQSITGLYETRIDLSQLGGDGGPAPGGGEAAAKGGMDPLQLLQPLEAEIKGTKLKAHWNSGATITCVPEAFLEDERPIQTMLIKTIHGEKQQDVYYLTFKVQGRKVEAEVLASPYDYILLNPSDVPWLMKKPLQLTVLVPLHEYQERLLQQTALPKEQKELLQKLFLKYDALWQHWENQVGHRRIKPHNIATGTLAPRPQKQYPINPKAKPSIQIVIDDLLKQGVLIQQNSTMNTPVYPVPKPDGKWRMVLDYREVNKTIPLIAAQNQHSAGILSSIYRGKYKTTLDLTNGFWAHPITPESYWLTAFTWQGKQYCWTRLPQGFLNSPALFTADVVDLLKEIPNVQAYVDDIYISHDDPQEHLEQLEKIFSILLNAGYVVSLKKSEIAQREVEFLGFNITKEGRGLTDTFKQKLLNITPPKDLKQLQSILGLLNFARNFIPNYSELVKPLYTIVANANGKFISWTEDNSNQLQHIISVLNQADNLEERNPETRLIIKVNSSPSAGYIRYYNEGSKRPIMYVNYIFSKAEAKFTQTEKLLTTMHKGLIKAMDLAMGQEILVYSPIVSMTKIQRTPLPERKALPVRWITWMTYLEDPRIQFHYDKSLPELQQIPNVTEDVIAKTKHPSEFAMVFYTDGSAIKHPDVNKSHSAGMGIAQVQFIPEYKIVHQWSIPLGDHTAQLAEIAAVEFACKKALKISGPVLIVTDSFYVAESANKELPYWKSNGFLNNKKKPLRHVSKWKSIAECLQLKPDIIIMHEKGHQQPMTTLHTEGNNLADKLATQGSYVVHAGKRTADGSEFEKRTADGSEFESPKKKAKVE

SEQ ID NO: 425 - protein, 2174 aa, synthetic construct
MPAAKRVKLDGGDKKYSIGLDIGTNSVGWAVITDEYKVPSKKFKVLGNTDRHSIKKNLIGALLFDSGETAEATRLKRTARRRYTRRKNRICYLQEIFSNEMAKVDDSFFHRLEESFLVEEDKKHERHPIFGNIVDEVAYHEKYPTIYHLRKKLVDSTDKADLRLIYLALAHMIKFRGHFLIEGDLNPDNSDVDKLFIQLVQTYNQLFEENPINASGVDAKAILSARLSKSRRLENLIAQLPGEKKNGLFGNLIALSLGLTPNFKSNFDLAEDAKLQLSKDTYDDDLDNLLAQIGDQYADLFLAAKNLSDAILLSDILRVNTEITKAPLSASMIKRYDEHHQDLTLLKALVRQQLPEKYKEIFFDQSKNGYAGYIDGGASQEEFYKFIKPILEKMDGTEELLVKLNREDLLRKQRTFDNGSIPHQIHLGELHAILRRQEDFYPFLKDNREKIEKILTFRIPYYVGPLARGNSRFAWMTRKSEETITPWNFEEVVDKGASAQSFIERMTNFDKNLPNEKVLPKHSLLYEYFTVYNELTKVKYVTEGMRKPAFLSGEQKKAIVDLLFKTNRKVTVKQLKEDYFKKIECFDSVEISGVEDRFNASLGTYHDLLKIIKDKDFLDNEENEDILEDIVLTLTLFEDREMIEERLKTYAHLFDDKVMKQLKRRRYTGWGRLSRKLINGIRDKQSGKTILDFLKSDGFANRNFMQLIHDDSLTFKEDIQKAQVSGQGDSLHEHIANLAGSPAIKKGILQTVKVVDELVKVMGRHKPENIVIEMARENQTTQKGQKNSRERMKRIEEGIKELGSQILKEHPVENTQLQNEKLYLYYLQNGRDMYVDQELDINRLSDYDVDHIVPQSFLKDDSIDNKVLTRSDKARGKSDNVPSEEVVKKMKNYWRQLLNAKLITQRKFDNLTKAERGGLSELDKAGFIKRQLVETRQITKHVAQILDSRMNTKYDENDKLIREVKVITLKSKLVSDFRKDFQFYKVREINNYHHAHDAYLNAVVGTALIKKYPKLESEFVYGDYKVYDVRKMIAKSEQEIGKATAKYFFYSNIMNFFKTEITLANGEIRKRPLIETNGETGEIVWDKGRDFATVRKVLSMPQVNIVKKTEVQTGGFSKESILPKRNSDKLIARKKDWDPKKYGGFDSPTVAYSVLVVAKVEKGKSKKLKSVKELLGITIMERSSFEKNPIDFLEAKGYKEVKKDLIIKLPKYSLFELENGRKRMLASAGELQKGNELALPSKYVNFLYLASHYEKLKGSPEDNEQKQLFVEQHKHYLDEIIEQISEFSKRVILADANLDKVLSAYNKHRDKPIREQAENIIHLFTLTNLGAPAAFKYFDTTIDRKRYTSTKEVLDATLIHQSITGLYETRIDLSQLGGDGGGGSGGSGGSGGMDPLQLLQPLEAEIKGTKLKAHWNSGATITCVPEAFLEDERPIQTMLIKTIHGEKQQDVYYLTFKVQGRKVEAEVLASPYDYILLNPSDVPWLMKKPLQLTVLVPLHEYQERLLQQTALPKEQKELLQKLFLKYDALWQHWENQVGHRRIKPHNIATGTLAPRPQKQYPINPKAKPSIQIVIDDLLKQGVLIQQNSTMNTPVYPVPKPDGKWRMVLDYREVNKTIPLIAAQNQHSAGILSSIYRGKYKTTLDLTNGFWAHPITPESYWLTAFTWQGKQYCWTRLPQGFLNSPALFTADVVDLLKEIPNVQAYVDDIYISHDDPQEHLEQLEKIFSILLNAGYVVSLKKSEIAQREVEFLGFNITKEGRGLTDTFKQKLLNITPPKDLKQLQSILGLLNFARNFIPNYSELVKPLYTIVANANGKFISWTEDNSNQLQHIISVLNQADNLEERNPETRLIIKVNSSPSAGYIRYYNEGSKRPIMYVNYIFSKAEAKFTQTEKLLTTMHKGLIKAMDLAMGQEILVYSPIVSMTKIQRTPLPERKALPVRWITWMTYLEDPRIQFHYDKSLPELQQIPNVTEDVIAKTKHPSEFAMVFYTDGSAIKHPDVNKSHSAGMGIAQVQFIPEYKIVHQWSIPLGDHTAQLAEIAAVEFACKKALKISGPVLIVTDSFYVAESANKELPYWKSNGFLNNKKKPLRHVSKWKSIAECLQLKPDIIIMHEKGHQQPMTTLHTEGNNLADKLATQGSYVVHAGKRTADGSEFEKRTADGSEFESPKKKAKVE

SEQ ID NO: 426 - protein, 2094 aa, synthetic construct
MPAAKRVKLDGGDKKYSIGLDIGTNSVGWAVITDEYKVPSKKFKVLGNTDRHSIKKNLIGALLFDSGETAEATRLKRTARRRYTRRKNRICYLQEIFSNEMAKVDDSFFHRLEESFLVEEDKKHERHPIFGNIVDEVAYHEKYPTIYHLRKKLVDSTDKADLRLIYLALAHMIKFRGHFLIEGDLNPDNSDVDKLFIQLVQTYNQLFEENPINASGVDAKAILSARLSKSRRLENLIAQLPGEKKNGLFGNLIALSLGLTPNFKSNFDLAEDAKLQLSKDTYDDDLDNLLAQIGDQYADLFLAAKNLSDAILLSDILRVNTEITKAPLSASMIKRYDEHHQDLTLLKALVRQQLPEKYKEIFFDQSKNGYAGYIDGGASQEEFYKFIKPILEKMDGTEELLVKLNREDLLRKQRTFDNGSIPHQIHLGELHAILRRQEDFYPFLKDNREKIEKILTFRIPYYVGPLARGNSRFAWMTRKSEETITPWNFEEVVDKGASAQSFIERMTNFDKNLPNEKVLPKHSLLYEYFTVYNELTKVKYVTEGMRKPAFLSGEQKKAIVDLLFKTNRKVTVKQLKEDYFKKIECFDSVEISGVEDRFNASLGTYHDLLKIIKDKDFLDNEENEDILEDIVLTLTLFEDREMIEERLKTYAHLFDDKVMKQLKRRRYTGWGRLSRKLINGIRDKQSGKTILDFLKSDGFANRNFMQLIHDDSLTFKEDIQKAQVSGQGDSLHEHIANLAGSPAIKKGILQTVKVVDELVKVMGRHKPENIVIEMARENQTTQKGQKNSRERMKRIEEGIKELGSQILKEHPVENTQLQNEKLYLYYLQNGRDMYVDQELDINRLSDYDVDHIVPQSFLKDDSIDNKVLTRSDKARGKSDNVPSEEVVKKMKNYWRQLLNAKLITQRKFDNLTKAERGGLSELDKAGFIKRQLVETRQITKHVAQILDSRMNTKYDENDKLIREVKVITLKSKLVSDFRKDFQFYKVREINNYHHAHDAYLNAVVGTALIKKYPKLESEFVYGDYKVYDVRKMIAKSEQEIGKATAKYFFYSNIMNFFKTEITLANGEIRKRPLIETNGETGEIVWDKGRDFATVRKVLSMPQVNIVKKTEVQTGGFSKESILPKRNSDKLIARKKDWDPKKYGGFDSPTVAYSVLVVAKVEKGKSKKLKSVKELLGITIMERSSFEKNPIDFLEAKGYKEVKKDLIIKLPKYSLFELENGRKRMLASAGELQKGNELALPSKYVNFLYLASHYEKLKGSPEDNEQKQLFVEQHKHYLDEIIEQISEFSKRVILADANLDKVLSAYNKHRDKPIREQAENIIHLFTLTNLGAPAAFKYFDTTIDRKRYTSTKEVLDATLIHQSITGLYETRIDLSQLGGDGGGSSGSSGSSGSSGSSGSSGGVPWLMKKPLQLTVLVPLHEYQERLLQQTALPKEQKELLQKLFLKYDALWQHWENQVGHRRIKPHNIATGTLAPRPQKQYPINPKAKPSIQIVIDDLLKQGVLIQQNSTMNTPVYPVPKPDGKWRMVLDYREVNKTIPLIAAQNQHSAGILSSIYRGKYKTTLDLTNGFWAHPITPESYWLTAFTWQGKQYCWTRLPQGFLNSPALFTADVVDLLKEIPNVQAYVDDIYISHDDPQEHLEQLEKIFSILLNAGYVVSLKKSEIAQREVEFLGFNITKEGRGLTDTFKQKLLNITPPKDLKQLQSILGLLNFARNFIPNYSELVKPLYTIVANANGKFISWTEDNSNQLQHIISVLNQADNLEERNPETRLIIKVNSSPSAGYIRYYNEGSKRPIMYVNYIFSKAEAKFTQTEKLLTTMHKGLIKAMDLAMGQEILVYSPIVSMTKIQRTPLPERKALPVRWITWMTYLEDPRIQFHYDKSLPELQQIPNVTEDVIAKTKHPSEFAMVFYTDGSAIKHPDVNKSHSAGMGIAQVQFIPEYKIVHQWSIPLGDHTAQLAEIAAVEFACKKALKISGPVLIVTDSFYVAESANKELPYWKSNGFLNNKKKPLRHVSKWKSIAECLQLKPDIIIMHEKGHQQPMTTLHTEGNNLADKLATQGSYVVHAGKRTADGSEFEKRTADGSEFESPKKKAKVE

SEQ ID NO: 427 - protein, 2087 aa, synthetic construct
MPAAKRVKLDGGDKKYSIGLDIGTNSVGWAVITDEYKVPSKKFKVLGNTDRHSIKKNLIGALLFDSGETAEATRLKRTARRRYTRRKNRICYLQEIFSNEMAKVDDSFFHRLEESFLVEEDKKHERHPIFGNIVDEVAYHEKYPTIYHLRKKLVDSTDKADLRLIYLALAHMIKFRGHFLIEGDLNPDNSDVDKLFIQLVQTYNQLFEENPINASGVDAKAILSARLSKSRRLENLIAQLPGEKKNGLFGNLIALSLGLTPNFKSNFDLAEDAKLQLSKDTYDDDLDNLLAQIGDQYADLFLAAKNLSDAILLSDILRVNTEITKAPLSASMIKRYDEHHQDLTLLKALVRQQLPEKYKEIFFDQSKNGYAGYIDGGASQEEFYKFIKPILEKMDGTEELLVKLNREDLLRKQRTFDNGSIPHQIHLGELHAILRRQEDFYPFLKDNREKIEKILTFRIPYYVGPLARGNSRFAWMTRKSEETITPWNFEEVVDKGASAQSFIERMTNFDKNLPNEKVLPKHSLLYEYFTVYNELTKVKYVTEGMRKPAFLSGEQKKAIVDLLFKTNRKVTVKQLKEDYFKKIECFDSVEISGVEDRFNASLGTYHDLLKIIKDKDFLDNEENEDILEDIVLTLTLFEDREMIEERLKTYAHLFDDKVMKQLKRRRYTGWGRLSRKLINGIRDKQSGKTILDFLKSDGFANRNFMQLIHDDSLTFKEDIQKAQVSGQGDSLHEHIANLAGSPAIKKGILQTVKVVDELVKVMGRHKPENIVIEMARENQTTQKGQKNSRERMKRIEEGIKELGSQILKEHPVENTQLQNEKLYLYYLQNGRDMYVDQELDINRLSDYDVDHIVPQSFLKDDSIDNKVLTRSDKARGKSDNVPSEEVVKKMKNYWRQLLNAKLITQRKFDNLTKAERGGLSELDKAGFIKRQLVETRQITKHVAQILDSRMNTKYDENDKLIREVKVITLKSKLVSDFRKDFQFYKVREINNYHHAHDAYLNAVVGTALIKKYPKLESEFVYGDYKVYDVRKMIAKSEQEIGKATAKYFFYSNIMNFFKTEITLANGEIRKRPLIETNGETGEIVWDKGRDFATVRKVLSMPQVNIVKKTEVQTGGFSKESILPKRNSDKLIARKKDWDPKKYGGFDSPTVAYSVLVVAKVEKGKSKKLKSVKELLGITIMERSSFEKNPIDFLEAKGYKEVKKDLIIKLPKYSLFELENGRKRMLASAGELQKGNELALPSKYVNFLYLASHYEKLKGSPEDNEQKQLFVEQHKHYLDEIIEQISEFSKRVILADANLDKVLSAYNKHRDKPIREQAENIIHLFTLTNLGAPAAFKYFDTTIDRKRYTSTKEVLDATLIHQSITGLYETRIDLSQLGGDGGPAPEAAAKGSSGGVPWLMKKPLQLTVLVPLHEYQERLLQQTALPKEQKELLQKLFLKYDALWQHWENQVGHRRIKPHNIATGTLAPRPQKQYPINPKAKPSIQIVIDDLLKQGVLIQQNSTMNTPVYPVPKPDGKWRMVLDYREVNKTIPLIAAQNQHSAGILSSIYRGKYKTTLDLTNGFWAHPITPESYWLTAFTWQGKQYCWTRLPQGFLNSPALFTADVVDLLKEIPNVQAYVDDIYISHDDPQEHLEQLEKIFSILLNAGYVVSLKKSEIAQREVEFLGFNITKEGRGLTDTFKQKLLNITPPKDLKQLQSILGLLNFARNFIPNYSELVKPLYTIVANANGKFISWTEDNSNQLQHIISVLNQADNLEERNPETRLIIKVNSSPSAGYIRYYNEGSKRPIMYVNYIFSKAEAKFTQTEKLLTTMHKGLIKAMDLAMGQEILVYSPIVSMTKIQRTPLPERKALPVRWITWMTYLEDPRIQFHYDKSLPELQQIPNVTEDVIAKTKHPSEFAMVFYTDGSAIKHPDVNKSHSAGMGIAQVQFIPEYKIVHQWSIPLGDHTAQLAEIAAVEFACKKALKISGPVLIVTDSFYVAESANKELPYWKSNGFLNNKKKPLRHVSKWKSIAECLQLKPDIIIMHEKGHQQPMTTLHTEGNNLADKLATQGSYVVHAGKRTADGSEFEKRTADGSEFESPKKKAKVE

SEQ ID NO: 428 - protein, 2091 aa, synthetic construct
MPAAKRVKLDGGDKKYSIGLDIGTNSVGWAVITDEYKVPSKKFKVLGNTDRHSIKKNLIGALLFDSGETAEATRLKRTARRRYTRRKNRICYLQEIFSNEMAKVDDSFFHRLEESFLVEEDKKHERHPIFGNIVDEVAYHEKYPTIYHLRKKLVDSTDKADLRLIYLALAHMIKFRGHFLIEGDLNPDNSDVDKLFIQLVQTYNQLFEENPINASGVDAKAILSARLSKSRRLENLIAQLPGEKKNGLFGNLIALSLGLTPNFKSNFDLAEDAKLQLSKDTYDDDLDNLLAQIGDQYADLFLAAKNLSDAILLSDILRVNTEITKAPLSASMIKRYDEHHQDLTLLKALVRQQLPEKYKEIFFDQSKNGYAGYIDGGASQEEFYKFIKPILEKMDGTEELLVKLNREDLLRKQRTFDNGSIPHQIHLGELHAILRRQEDFYPFLKDNREKIEKILTFRIPYYVGPLARGNSRFAWMTRKSEETITPWNFEEVVDKGASAQSFIERMTNFDKNLPNEKVLPKHSLLYEYFTVYNELTKVKYVTEGMRKPAFLSGEQKKAIVDLLFKTNRKVTVKQLKEDYFKKIECFDSVEISGVEDRFNASLGTYHDLLKIIKDKDFLDNEENEDILEDIVLTLTLFEDREMIEERLKTYAHLFDDKVMKQLKRRRYTGWGRLSRKLINGIRDKQSGKTILDFLKSDGFANRNFMQLIHDDSLTFKEDIQKAQVSGQGDSLHEHIANLAGSPAIKKGILQTVKVVDELVKVMGRHKPENIVIEMARENQTTQKGQKNSRERMKRIEEGIKELGSQILKEHPVENTQLQNEKLYLYYLQNGRDMYVDQELDINRLSDYDVDHIVPQSFLKDDSIDNKVLTRSDKARGKSDNVPSEEVVKKMKNYWRQLLNAKLITQRKFDNLTKAERGGLSELDKAGFIKRQLVETRQITKHVAQILDSRMNTKYDENDKLIREVKVITLKSKLVSDFRKDFQFYKVREINNYHHAHDAYLNAVVGTALIKKYPKLESEFVYGDYKVYDVRKMIAKSEQEIGKATAKYFFYSNIMNFFKTEITLANGEIRKRPLIETNGETGEIVWDKGRDFATVRKVLSMPQVNIVKKTEVQTGGFSKESILPKRNSDKLIARKKDWDPKKYGGFDSPTVAYSVLVVAKVEKGKSKKLKSVKELLGITIMERSSFEKNPIDFLEAKGYKEVKKDLIIKLPKYSLFELENGRKRMLASAGELQKGNELALPSKYVNFLYLASHYEKLKGSPEDNEQKQLFVEQHKHYLDEIIEQISEFSKRVILADANLDKVLSAYNKHRDKPIREQAENIIHLFTLTNLGAPAAFKYFDTTIDRKRYTSTKEVLDATLIHQSITGLYETRIDLSQLGGDGGGSSGSSGSSGSSGSSGGVPWLMKKPLQLTVLVPLHEYQERLLQQTALPKEQKELLQKLFLKYDALWQHWENQVGHRRIKPHNIATGTLAPRPQKQYPINPKAKPSIQIVIDDLLKQGVLIQQNSTMNTPVYPVPKPDGKWRMVLDYREVNKTIPLIAAQNQHSAGILSSIYRGKYKTTLDLTNGFWAHPITPESYWLTAFTWQGKQYCWTRLPQGFLNSPALFTADVVDLLKEIPNVQAYVDDIYISHDDPQEHLEQLEKIFSILLNAGYVVSLKKSEIAQREVEFLGFNITKEGRGLTDTFKQKLLNITPPKDLKQLQSILGLLNFARNFIPNYSELVKPLYTIVANANGKFISWTEDNSNQLQHIISVLNQADNLEERNPETRLIIKVNSSPSAGYIRYYNEGSKRPIMYVNYIFSKAEAKFTQTEKLLTTMHKGLIKAMDLAMGQEILVYSPIVSMTKIQRTPLPERKALPVRWITWMTYLEDPRIQFHYDKSLPELQQIPNVTEDVIAKTKHPSEFAMVFYTDGSAIKHPDVNKSHSAGMGIAQVQFIPEYKIVHQWSIPLGDHTAQLAEIAAVEFACKKALKISGPVLIVTDSFYVAESANKELPYWKSNGFLNNKKKPLRHVSKWKSIAECLQLKPDIIIMHEKGHQQPMTTLHTEGNNLADKLATQGSYVVHAGKRTADGSEFEKRTADGSEFESPKKKAKVE

SEQ ID NO: 429 - protein, 2084 aa, synthetic construct
MPAAKRVKLDGGDKKYSIGLDIGTNSVGWAVITDEYKVPSKKFKVLGNTDRHSIKKNLIGALLFDSGETAEATRLKRTARRRYTRRKNRICYLQEIFSNEMAKVDDSFFHRLEESFLVEEDKKHERHPIFGNIVDEVAYHEKYPTIYHLRKKLVDSTDKADLRLIYLALAHMIKFRGHFLIEGDLNPDNSDVDKLFIQLVQTYNQLFEENPINASGVDAKAILSARLSKSRRLENLIAQLPGEKKNGLFGNLIALSLGLTPNFKSNFDLAEDAKLQLSKDTYDDDLDNLLAQIGDQYADLFLAAKNLSDAILLSDILRVNTEITKAPLSASMIKRYDEHHQDLTLLKALVRQQLPEKYKEIFFDQSKNGYAGYIDGGASQEEFYKFIKPILEKMDGTEELLVKLNREDLLRKQRTFDNGSIPHQIHLGELHAILRRQEDFYPFLKDNREKIEKILTFRIPYYVGPLARGNSRFAWMTRKSEETITPWNFEEVVDKGASAQSFIERMTNFDKNLPNEKVLPKHSLLYEYFTVYNELTKVKYVTEGMRKPAFLSGEQKKAIVDLLFKTNRKVTVKQLKEDYFKKIECFDSVEISGVEDRFNASLGTYHDLLKIIKDKDFLDNEENEDILEDIVLTLTLFEDREMIEERLKTYAHLFDDKVMKQLKRRRYTGWGRLSRKLINGIRDKQSGKTILDFLKSDGFANRNFMQLIHDDSLTFKEDIQKAQVSGQGDSLHEHIANLAGSPAIKKGILQTVKVVDELVKVMGRHKPENIVIEMARENQTTQKGQKNSRERMKRIEEGIKELGSQILKEHPVENTQLQNEKLYLYYLQNGRDMYVDQELDINRLSDYDVDHIVPQSFLKDDSIDNKVLTRSDKARGKSDNVPSEEVVKKMKNYWRQLLNAKLITQRKFDNLTKAERGGLSELDKAGFIKRQLVETRQITKHVAQILDSRMNTKYDENDKLIREVKVITLKSKLVSDFRKDFQFYKVREINNYHHAHDAYLNAVVGTALIKKYPKLESEFVYGDYKVYDVRKMIAKSEQEIGKATAKYFFYSNIMNFFKTEITLANGEIRKRPLIETNGETGEIVWDKGRDFATVRKVLSMPQVNIVKKTEVQTGGFSKESILPKRNSDKLIARKKDWDPKKYGGFDSPTVAYSVLVVAKVEKGKSKKLKSVKELLGITIMERSSFEKNPIDFLEAKGYKEVKKDLIIKLPKYSLFELENGRKRMLASAGELQKGNELALPSKYVNFLYLASHYEKLKGSPEDNEQKQLFVEQHKHYLDEIIEQISEFSKRVILADANLDKVLSAYNKHRDKPIREQAENIIHLFTLTNLGAPAAFKYFDTTIDRKRYTSTKEVLDATLIHQSITGLYETRIDLSQLGGDGGGGGGGGGGGGVPWLMKKPLQLTVLVPLHEYQERLLQQTALPKEQKELLQKLFLKYDALWQHWENQVGHRRIKPHNIATGTLAPRPQKQYPINPKAKPSIQIVIDDLLKQGVLIQQNSTMNTPVYPVPKPDGKWRMVLDYREVNKTIPLIAAQNQHSAGILSSIYRGKYKTTLDLTNGFWAHPITPESYWLTAFTWQGKQYCWTRLPQGFLNSPALFTADVVDLLKEIPNVQAYVDDIYISHDDPQEHLEQLEKIFSILLNAGYVVSLKKSEIAQREVEFLGFNITKEGRGLTDTFKQKLLNITPPKDLKQLQSILGLLNFARNFIPNYSELVKPLYTIVANANGKFISWTEDNSNQLQHIISVLNQADNLEERNPETRLIIKVNSSPSAGYIRYYNEGSKRPIMYVNYIFSKAEAKFTQTEKLLTTMHKGLIKAMDLAMGQEILVYSPIVSMTKIQRTPLPERKALPVRWITWMTYLEDPRIQFHYDKSLPELQQIPNVTEDVIAKTKHPSEFAMVFYTDGSAIKHPDVNKSHSAGMGIAQVQFIPEYKIVHQWSIPLGDHTAQLAEIAAVEFACKKALKISGPVLIVTDSFYVAESANKELPYWKSNGFLNNKKKPLRHVSKWKSIAECLQLKPDIIIMHEKGHQQPMTTLHTEGNNLADKLATQGSYVVHAGKRTADGSEFEKRTADGSEFESPKKKAKVE

SEQ ID NO: 430 - protein, 2084 aa, synthetic construct
MPAAKRVKLDGGDKKYSIGLDIGTNSVGWAVITDEYKVPSKKFKVLGNTDRHSIKKNLIGALLFDSGETAEATRLKRTARRRYTRRKNRICYLQEIFSNEMAKVDDSFFHRLEESFLVEEDKKHERHPIFGNIVDEVAYHEKYPTIYHLRKKLVDSTDKADLRLIYLALAHMIKFRGHFLIEGDLNPDNSDVDKLFIQLVQTYNQLFEENPINASGVDAKAILSARLSKSRRLENLIAQLPGEKKNGLFGNLIALSLGLTPNFKSNFDLAEDAKLQLSKDTYDDDLDNLLAQIGDQYADLFLAAKNLSDAILLSDILRVNTEITKAPLSASMIKRYDEHHQDLTLLKALVRQQLPEKYKEIFFDQSKNGYAGYIDGGASQEEFYKFIKPILEKMDGTEELLVKLNREDLLRKQRTFDNGSIPHQIHLGELHAILRRQEDFYPFLKDNREKIEKILTFRIPYYVGPLARGNSRFAWMTRKSEETITPWNFEEVVDKGASAQSFIERMTNFDKNLPNEKVLPKHSLLYEYFTVYNELTKVKYVTEGMRKPAFLSGEQKKAIVDLLFKTNRKVTVKQLKEDYFKKIECFDSVEISGVEDRFNASLGTYHDLLKIIKDKDFLDNEENEDILEDIVLTLTLFEDREMIEERLKTYAHLFDDKVMKQLKRRRYTGWGRLSRKLINGIRDKQSGKTILDFLKSDGFANRNFMQLIHDDSLTFKEDIQKAQVSGQGDSLHEHIANLAGSPAIKKGILQTVKVVDELVKVMGRHKPENIVIEMARENQTTQKGQKNSRERMKRIEEGIKELGSQILKEHPVENTQLQNEKLYLYYLQNGRDMYVDQELDINRLSDYDVDHIVPQSFLKDDSIDNKVLTRSDKARGKSDNVPSEEVVKKMKNYWRQLLNAKLITQRKFDNLTKAERGGLSELDKAGFIKRQLVETRQITKHVAQILDSRMNTKYDENDKLIREVKVITLKSKLVSDFRKDFQFYKVREINNYHHAHDAYLNAVVGTALIKKYPKLESEFVYGDYKVYDVRKMIAKSEQEIGKATAKYFFYSNIMNFFKTEITLANGEIRKRPLIETNGETGEIVWDKGRDFATVRKVLSMPQVNIVKKTEVQTGGFSKESILPKRNSDKLIARKKDWDPKKYGGFDSPTVAYSVLVVAKVEKGKSKKLKSVKELLGITIMERSSFEKNPIDFLEAKGYKEVKKDLIIKLPKYSLFELENGRKRMLASAGELQKGNELALPSKYVNFLYLASHYEKLKGSPEDNEQKQLFVEQHKHYLDEIIEQISEFSKRVILADANLDKVLSAYNKHRDKPIREQAENIIHLFTLTNLGAPAAFKYFDTTIDRKRYTSTKEVLDATLIHQSITGLYETRIDLSQLGGDGGPAPEAAAKGGVPWLMKKPLQLTVLVPLHEYQERLLQQTALPKEQKELLQKLFLKYDALWQHWENQVGHRRIKPHNIATGTLAPRPQKQYPINPKAKPSIQIVIDDLLKQGVLIQQNSTMNTPVYPVPKPDGKWRMVLDYREVNKTIPLIAAQNQHSAGILSSIYRGKYKTTLDLTNGFWAHPITPESYWLTAFTWQGKQYCWTRLPQGFLNSPALFTADVVDLLKEIPNVQAYVDDIYISHDDPQEHLEQLEKIFSILLNAGYVVSLKKSEIAQREVEFLGFNITKEGRGLTDTFKQKLLNITPPKDLKQLQSILGLLNFARNFIPNYSELVKPLYTIVANANGKFISWTEDNSNQLQHIISVLNQADNLEERNPETRLIIKVNSSPSAGYIRYYNEGSKRPIMYVNYIFSKAEAKFTQTEKLLTTMHKGLIKAMDLAMGQEILVYSPIVSMTKIQRTPLPERKALPVRWITWMTYLEDPRIQFHYDKSLPELQQIPNVTEDVIAKTKHPSEFAMVFYTDGSAIKHPDVNKSHSAGMGIAQVQFIPEYKIVHQWSIPLGDHTAQLAEIAAVEFACKKALKISGPVLIVTDSFYVAESANKELPYWKSNGFLNNKKKPLRHVSKWKSIAECLQLKPDIIIMHEKGHQQPMTTLHTEGNNLADKLATQGSYVVHAGKRTADGSEFEKRTADGSEFESPKKKAKVE

SEQ ID NO: 431 - protein, 2082 aa, synthetic construct
MPAAKRVKLDGGDKKYSIGLDIGTNSVGWAVITDEYKVPSKKFKVLGNTDRHSIKKNLIGALLFDSGETAEATRLKRTARRRYTRRKNRICYLQEIFSNEMAKVDDSFFHRLEESFLVEEDKKHERHPIFGNIVDEVAYHEKYPTIYHLRKKLVDSTDKADLRLIYLALAHMIKFRGHFLIEGDLNPDNSDVDKLFIQLVQTYNQLFEENPINASGVDAKAILSARLSKSRRLENLIAQLPGEKKNGLFGNLIALSLGLTPNFKSNFDLAEDAKLQLSKDTYDDDLDNLLAQIGDQYADLFLAAKNLSDAILLSDILRVNTEITKAPLSASMIKRYDEHHQDLTLLKALVRQQLPEKYKEIFFDQSKNGYAGYIDGGASQEEFYKFIKPILEKMDGTEELLVKLNREDLLRKQRTFDNGSIPHQIHLGELHAILRRQEDFYPFLKDNREKIEKILTFRIPYYVGPLARGNSRFAWMTRKSEETITPWNFEEVVDKGASAQSFIERMTNFDKNLPNEKVLPKHSLLYEYFTVYNELTKVKYVTEGMRKPAFLSGEQKKAIVDLLFKTNRKVTVKQLKEDYFKKIECFDSVEISGVEDRFNASLGTYHDLLKIIKDKDFLDNEENEDILEDIVLTLTLFEDREMIEERLKTYAHLFDDKVMKQLKRRRYTGWGRLSRKLINGIRDKQSGKTILDFLKSDGFANRNFMQLIHDDSLTFKEDIQKAQVSGQGDSLHEHIANLAGSPAIKKGILQTVKVVDELVKVMGRHKPENIVIEMARENQTTQKGQKNSRERMKRIEEGIKELGSQILKEHPVENTQLQNEKLYLYYLQNGRDMYVDQELDINRLSDYDVDHIVPQSFLKDDSIDNKVLTRSDKARGKSDNVPSEEVVKKMKNYWRQLLNAKLITQRKFDNLTKAERGGLSELDKAGFIKRQLVETRQITKHVAQILDSRMNTKYDENDKLIREVKVITLKSKLVSDFRKDFQFYKVREINNYHHAHDAYLNAVVGTALIKKYPKLESEFVYGDYKVYDVRKMIAKSEQEIGKATAKYFFYSNIMNFFKTEITLANGEIRKRPLIETNGETGEIVWDKGRDFATVRKVLSMPQVNIVKKTEVQTGGFSKESILPKRNSDKLIARKKDWDPKKYGGFDSPTVAYSVLVVAKVEKGKSKKLKSVKELLGITIMERSSFEKNPIDFLEAKGYKEVKKDLIIKLPKYSLFELENGRKRMLASAGELQKGNELALPSKYVNFLYLASHYEKLKGSPEDNEQKQLFVEQHKHYLDEIIEQISEFSKRVILADANLDKVLSAYNKHRDKPIREQAENIIHLFTLTNLGAPAAFKYFDTTIDRKRYTSTKEVLDATLIHQSITGLYETRIDLSQLGGDGGGGGGGGGGVPWLMKKPLQLTVLVPLHEYQERLLQQTALPKEQKELLQKLFLKYDALWQHWENQVGHRRIKPHNIATGTLAPRPQKQYPINPKAKPSIQIVIDDLLKQGVLIQQNSTMNTPVYPVPKPDGKWRMVLDYREVNKTIPLIAAQNQHSAGILSSIYRGKYKTTLDLTNGFWAHPITPESYWLTAFTWQGKQYCWTRLPQGFLNSPALFTADVVDLLKEIPNVQAYVDDIYISHDDPQEHLEQLEKIFSILLNAGYVVSLKKSEIAQREVEFLGFNITKEGRGLTDTFKQKLLNITPPKDLKQLQSILGLLNFARNFIPNYSELVKPLYTIVANANGKFISWTEDNSNQLQHIISVLNQADNLEERNPETRLIIKVNSSPSAGYIRYYNEGSKRPIMYVNYIFSKAEAKFTQTEKLLTTMHKGLIKAMDLAMGQEILVYSPIVSMTKIQRTPLPERKALPVRWITWMTYLEDPRIQFHYDKSLPELQQIPNVTEDVIAKTKHPSEFAMVFYTDGSAIKHPDVNKSHSAGMGIAQVQFIPEYKIVHQWSIPLGDHTAQLAEIAAVEFACKKALKISGPVLIVTDSFYVAESANKELPYWKSNGFLNNKKKPLRHVSKWKSIAECLQLKPDIIIMHEKGHQQPMTTLHTEGNNLADKLATQGSYVVHAGKRTADGSEFEKRTADGSEFESPKKKAKVE

SEQ ID NO: 432 - protein, 2087 aa, synthetic construct
MPAAKRVKLDGGDKKYSIGLDIGTNSVGWAVITDEYKVPSKKFKVLGNTDRHSIKKNLIGALLFDSGETAEATRLKRTARRRYTRRKNRICYLQEIFSNEMAKVDDSFFHRLEESFLVEEDKKHERHPIFGNIVDEVAYHEKYPTIYHLRKKLVDSTDKADLRLIYLALAHMIKFRGHFLIEGDLNPDNSDVDKLFIQLVQTYNQLFEENPINASGVDAKAILSARLSKSRRLENLIAQLPGEKKNGLFGNLIALSLGLTPNFKSNFDLAEDAKLQLSKDTYDDDLDNLLAQIGDQYADLFLAAKNLSDAILLSDILRVNTEITKAPLSASMIKRYDEHHQDLTLLKALVRQQLPEKYKEIFFDQSKNGYAGYIDGGASQEEFYKFIKPILEKMDGTEELLVKLNREDLLRKQRTFDNGSIPHQIHLGELHAILRRQEDFYPFLKDNREKIEKILTFRIPYYVGPLARGNSRFAWMTRKSEETITPWNFEEVVDKGASAQSFIERMTNFDKNLPNEKVLPKHSLLYEYFTVYNELTKVKYVTEGMRKPAFLSGEQKKAIVDLLFKTNRKVTVKQLKEDYFKKIECFDSVEISGVEDRFNASLGTYHDLLKIIKDKDFLDNEENEDILEDIVLTLTLFEDREMIEERLKTYAHLFDDKVMKQLKRRRYTGWGRLSRKLINGIRDKQSGKTILDFLKSDGFANRNFMQLIHDDSLTFKEDIQKAQVSGQGDSLHEHIANLAGSPAIKKGILQTVKVVDELVKVMGRHKPENIVIEMARENQTTQKGQKNSRERMKRIEEGIKELGSQILKEHPVENTQLQNEKLYLYYLQNGRDMYVDQELDINRLSDYDVDHIVPQSFLKDDSIDNKVLTRSDKARGKSDNVPSEEVVKKMKNYWRQLLNAKLITQRKFDNLTKAERGGLSELDKAGFIKRQLVETRQITKHVAQILDSRMNTKYDENDKLIREVKVITLKSKLVSDFRKDFQFYKVREINNYHHAHDAYLNAVVGTALIKKYPKLESEFVYGDYKVYDVRKMIAKSEQEIGKATAKYFFYSNIMNFFKTEITLANGEIRKRPLIETNGETGEIVWDKGRDFATVRKVLSMPQVNIVKKTEVQTGGFSKESILPKRNSDKLIARKKDWDPKKYGGFDSPTVAYSVLVVAKVEKGKSKKLKSVKELLGITIMERSSFEKNPIDFLEAKGYKEVKKDLIIKLPKYSLFELENGRKRMLASAGELQKGNELALPSKYVNFLYLASHYEKLKGSPEDNEQKQLFVEQHKHYLDEIIEQISEFSKRVILADANLDKVLSAYNKHRDKPIREQAENIIHLFTLTNLGAPAAFKYFDTTIDRKRYTSTKEVLDATLIHQSITGLYETRIDLSQLGGDGGGGSEAAAKPAPGGVPWLMKKPLQLTVLVPLHEYQERLLQQTALPKEQKELLQKLFLKYDALWQHWENQVGHRRIKPHNIATGTLAPRPQKQYPINPKAKPSIQIVIDDLLKQGVLIQQNSTMNTPVYPVPKPDGKWRMVLDYREVNKTIPLIAAQNQHSAGILSSIYRGKYKTTLDLTNGFWAHPITPESYWLTAFTWQGKQYCWTRLPQGFLNSPALFTADVVDLLKEIPNVQAYVDDIYISHDDPQEHLEQLEKIFSILLNAGYVVSLKKSEIAQREVEFLGFNITKEGRGLTDTFKQKLLNITPPKDLKQLQSILGLLNFARNFIPNYSELVKPLYTIVANANGKFISWTEDNSNQLQHIISVLNQADNLEERNPETRLIIKVNSSPSAGYIRYYNEGSKRPIMYVNYIFSKAEAKFTQTEKLLTTMHKGLIKAMDLAMGQEILVYSPIVSMTKIQRTPLPERKALPVRWITWMTYLEDPRIQFHYDKSLPELQQIPNVTEDVIAKTKHPSEFAMVFYTDGSAIKHPDVNKSHSAGMGIAQVQFIPEYKIVHQWSIPLGDHTAQLAEIAAVEFACKKALKISGPVLIVTDSFYVAESANKELPYWKSNGFLNNKKKPLRHVSKWKSIAECLQLKPDIIIMHEKGHQQPMTTLHTEGNNLADKLATQGSYVVHAGKRTADGSEFEKRTADGSEFESPKKKAKVE

SEQ ID NO: 433 - protein, 2087 aa, synthetic construct
MPAAKRVKLDGGDKKYSIGLDIGTNSVGWAVITDEYKVPSKKFKVLGNTDRHSIKKNLIGALLFDSGETAEATRLKRTARRRYTRRKNRICYLQEIFSNEMAKVDDSFFHRLEESFLVEEDKKHERHPIFGNIVDEVAYHEKYPTIYHLRKKLVDSTDKADLRLIYLALAHMIKFRGHFLIEGDLNPDNSDVDKLFIQLVQTYNQLFEENPINASGVDAKAILSARLSKSRRLENLIAQLPGEKKNGLFGNLIALSLGLTPNFKSNFDLAEDAKLQLSKDTYDDDLDNLLAQIGDQYADLFLAAKNLSDAILLSDILRVNTEITKAPLSASMIKRYDEHHQDLTLLKALVRQQLPEKYKEIFFDQSKNGYAGYIDGGASQEEFYKFIKPILEKMDGTEELLVKLNREDLLRKQRTFDNGSIPHQIHLGELHAILRRQEDFYPFLKDNREKIEKILTFRIPYYVGPLARGNSRFAWMTRKSEETITPWNFEEVVDKGASAQSFIERMTNFDKNLPNEKVLPKHSLLYEYFTVYNELTKVKYVTEGMRKPAFLSGEQKKAIVDLLFKTNRKVTVKQLKEDYFKKIECFDSVEISGVEDRFNASLGTYHDLLKIIKDKDFLDNEENEDILEDIVLTLTLFEDREMIEERLKTYAHLFDDKVMKQLKRRRYTGWGRLSRKLINGIRDKQSGKTILDFLKSDGFANRNFMQLIHDDSLTFKEDIQKAQVSGQGDSLHEHIANLAGSPAIKKGILQTVKVVDELVKVMGRHKPENIVIEMARENQTTQKGQKNSRERMKRIEEGIKELGSQILKEHPVENTQLQNEKLYLYYLQNGRDMYVDQELDINRLSDYDVDHIVPQSFLKDDSIDNKVLTRSDKARGKSDNVPSEEVVKKMKNYWRQLLNAKLITQRKFDNLTKAERGGLSELDKAGFIKRQLVETRQITKHVAQILDSRMNTKYDENDKLIREVKVITLKSKLVSDFRKDFQFYKVREINNYHHAHDAYLNAVVGTALIKKYPKLESEFVYGDYKVYDVRKMIAKSEQEIGKATAKYFFYSNIMNFFKTEITLANGEIRKRPLIETNGETGEIVWDKGRDFATVRKVLSMPQVNIVKKTEVQTGGFSKESILPKRNSDKLIARKKDWDPKKYGGFDSPTVAYSVLVVAKVEKGKSKKLKSVKELLGITIMERSSFEKNPIDFLEAKGYKEVKKDLIIKLPKYSLFELENGRKRMLASAGELQKGNELALPSKYVNFLYLASHYEKLKGSPEDNEQKQLFVEQHKHYLDEIIEQISEFSKRVILADANLDKVLSAYNKHRDKPIREQAENIIHLFTLTNLGAPAAFKYFDTTIDRKRYTSTKEVLDATLIHQSITGLYETRIDLSQLGGDGGGGGEAAAKGSSGGVPWLMKKPLQLTVLVPLHEYQERLLQQTALPKEQKELLQKLFLKYDALWQHWENQVGHRRIKPHNIATGTLAPRPQKQYPINPKAKPSIQIVIDDLLKQGVLIQQNSTMNTPVYPVPKPDGKWRMVLDYREVNKTIPLIAAQNQHSAGILSSIYRGKYKTTLDLTNGFWAHPITPESYWLTAFTWQGKQYCWTRLPQGFLNSPALFTADVVDLLKEIPNVQAYVDDIYISHDDPQEHLEQLEKIFSILLNAGYVVSLKKSEIAQREVEFLGFNITKEGRGLTDTFKQKLLNITPPKDLKQLQSILGLLNFARNFIPNYSELVKPLYTIVANANGKFISWTEDNSNQLQHIISVLNQADNLEERNPETRLIIKVNSSPSAGYIRYYNEGSKRPIMYVNYIFSKAEAKFTQTEKLLTTMHKGLIKAMDLAMGQEILVYSPIVSMTKIQRTPLPERKALPVRWITWMTYLEDPRIQFHYDKSLPELQQIPNVTEDVIAKTKHPSEFAMVFYTDGSAIKHPDVNKSHSAGMGIAQVQFIPEYKIVHQWSIPLGDHTAQLAEIAAVEFACKKALKISGPVLIVTDSFYVAESANKELPYWKSNGFLNNKKKPLRHVSKWKSIAECLQLKPDIIIMHEKGHQQPMTTLHTEGNNLADKLATQGSYVVHAGKRTADGSEFEKRTADGSEFESPKKKAKVE

SEQ ID NO: 434 - protein, 2082 aa, synthetic construct
MPAAKRVKLDGGDKKYSIGLDIGTNSVGWAVITDEYKVPSKKFKVLGNTDRHSIKKNLIGALLFDSGETAEATRLKRTARRRYTRRKNRICYLQEIFSNEMAKVDDSFFHRLEESFLVEEDKKHERHPIFGNIVDEVAYHEKYPTIYHLRKKLVDSTDKADLRLIYLALAHMIKFRGHFLIEGDLNPDNSDVDKLFIQLVQTYNQLFEENPINASGVDAKAILSARLSKSRRLENLIAQLPGEKKNGLFGNLIALSLGLTPNFKSNFDLAEDAKLQLSKDTYDDDLDNLLAQIGDQYADLFLAAKNLSDAILLSDILRVNTEITKAPLSASMIKRYDEHHQDLTLLKALVRQQLPEKYKEIFFDQSKNGYAGYIDGGASQEEFYKFIKPILEKMDGTEELLVKLNREDLLRKQRTFDNGSIPHQIHLGELHAILRRQEDFYPFLKDNREKIEKILTFRIPYYVGPLARGNSRFAWMTRKSEETITPWNFEEVVDKGASAQSFIERMTNFDKNLPNEKVLPKHSLLYEYFTVYNELTKVKYVTEGMRKPAFLSGEQKKAIVDLLFKTNRKVTVKQLKEDYFKKIECFDSVEISGVEDRFNASLGTYHDLLKIIKDKDFLDNEENEDILEDIVLTLTLFEDREMIEERLKTYAHLFDDKVMKQLKRRRYTGWGRLSRKLINGIRDKQSGKTILDFLKSDGFANRNFMQLIHDDSLTFKEDIQKAQVSGQGDSLHEHIANLAGSPAIKKGILQTVKVVDELVKVMGRHKPENIVIEMARENQTTQKGQKNSRERMKRIEEGIKELGSQILKEHPVENTQLQNEKLYLYYLQNGRDMYVDQELDINRLSDYDVDHIVPQSFLKDDSIDNKVLTRSDKARGKSDNVPSEEVVKKMKNYWRQLLNAKLITQRKFDNLTKAERGGLSELDKAGFIKRQLVETRQITKHVAQILDSRMNTKYDENDKLIREVKVITLKSKLVSDFRKDFQFYKVREINNYHHAHDAYLNAVVGTALIKKYPKLESEFVYGDYKVYDVRKMIAKSEQEIGKATAKYFFYSNIMNFFKTEITLANGEIRKRPLIETNGETGEIVWDKGRDFATVRKVLSMPQVNIVKKTEVQTGGFSKESILPKRNSDKLIARKKDWDPKKYGGFDSPTVAYSVLVVAKVEKGKSKKLKSVKELLGITIMERSSFEKNPIDFLEAKGYKEVKKDLIIKLPKYSLFELENGRKRMLASAGELQKGNELALPSKYVNFLYLASHYEKLKGSPEDNEQKQLFVEQHKHYLDEIIEQISEFSKRVILADANLDKVLSAYNKHRDKPIREQAENIIHLFTLTNLGAPAAFKYFDTTIDRKRYTSTKEVLDATLIHQSITGLYETRIDLSQLGGDGGGSSGSSGGVPWLMKKPLQLTVLVPLHEYQERLLQQTALPKEQKELLQKLFLKYDALWQHWENQVGHRRIKPHNIATGTLAPRPQKQYPINPKAKPSIQIVIDDLLKQGVLIQQNSTMNTPVYPVPKPDGKWRMVLDYREVNKTIPLIAAQNQHSAGILSSIYRGKYKTTLDLTNGFWAHPITPESYWLTAFTWQGKQYCWTRLPQGFLNSPALFTADVVDLLKEIPNVQAYVDDIYISHDDPQEHLEQLEKIFSILLNAGYVVSLKKSEIAQREVEFLGFNITKEGRGLTDTFKQKLLNITPPKDLKQLQSILGLLNFARNFIPNYSELVKPLYTIVANANGKFISWTEDNSNQLQHIISVLNQADNLEERNPETRLIIKVNSSPSAGYIRYYNEGSKRPIMYVNYIFSKAEAKFTQTEKLLTTMHKGLIKAMDLAMGQEILVYSPIVSMTKIQRTPLPERKALPVRWITWMTYLEDPRIQFHYDKSLPELQQIPNVTEDVIAKTKHPSEFAMVFYTDGSAIKHPDVNKSHSAGMGIAQVQFIPEYKIVHQWSIPLGDHTAQLAEIAAVEFACKKALKISGPVLIVTDSFYVAESANKELPYWKSNGFLNNKKKPLRHVSKWKSIAECLQLKPDIIIMHEKGHQQPMTTLHTEGNNLADKLATQGSYVVHAGKRTADGSEFEKRTADGSEFESPKKKAKVE

SEQ ID NO: 435 - protein, 2084 aa, synthetic construct
MPAAKRVKLDGGDKKYSIGLDIGTNSVGWAVITDEYKVPSKKFKVLGNTDRHSIKKNLIGALLFDSGETAEATRLKRTARRRYTRRKNRICYLQEIFSNEMAKVDDSFFHRLEESFLVEEDKKHERHPIFGNIVDEVAYHEKYPTIYHLRKKLVDSTDKADLRLIYLALAHMIKFRGHFLIEGDLNPDNSDVDKLFIQLVQTYNQLFEENPINASGVDAKAILSARLSKSRRLENLIAQLPGEKKNGLFGNLIALSLGLTPNFKSNFDLAEDAKLQLSKDTYDDDLDNLLAQIGDQYADLFLAAKNLSDAILLSDILRVNTEITKAPLSASMIKRYDEHHQDLTLLKALVRQQLPEKYKEIFFDQSKNGYAGYIDGGASQEEFYKFIKPILEKMDGTEELLVKLNREDLLRKQRTFDNGSIPHQIHLGELHAILRRQEDFYPFLKDNREKIEKILTFRIPYYVGPLARGNSRFAWMTRKSEETITPWNFEEVVDKGASAQSFIERMTNFDKNLPNEKVLPKHSLLYEYFTVYNELTKVKYVTEGMRKPAFLSGEQKKAIVDLLFKTNRKVTVKQLKEDYFKKIECFDSVEISGVEDRFNASLGTYHDLLKIIKDKDFLDNEENEDILEDIVLTLTLFEDREMIEERLKTYAHLFDDKVMKQLKRRRYTGWGRLSRKLINGIRDKQSGKTILDFLKSDGFANRNFMQLIHDDSLTFKEDIQKAQVSGQGDSLHEHIANLAGSPAIKKGILQTVKVVDELVKVMGRHKPENIVIEMARENQTTQKGQKNSRERMKRIEEGIKELGSQILKEHPVENTQLQNEKLYLYYLQNGRDMYVDQELDINRLSDYDVDHIVPQSFLKDDSIDNKVLTRSDKARGKSDNVPSEEVVKKMKNYWRQLLNAKLITQRKFDNLTKAERGGLSELDKAGFIKRQLVETRQITKHVAQILDSRMNTKYDENDKLIREVKVITLKSKLVSDFRKDFQFYKVREINNYHHAHDAYLNAVVGTALIKKYPKLESEFVYGDYKVYDVRKMIAKSEQEIGKATAKYFFYSNIMNFFKTEITLANGEIRKRPLIETNGETGEIVWDKGRDFATVRKVLSMPQVNIVKKTEVQTGGFSKESILPKRNSDKLIARKKDWDPKKYGGFDSPTVAYSVLVVAKVEKGKSKKLKSVKELLGITIMERSSFEKNPIDFLEAKGYKEVKKDLIIKLPKYSLFELENGRKRMLASAGELQKGNELALPSKYVNFLYLASHYEKLKGSPEDNEQKQLFVEQHKHYLDEIIEQISEFSKRVILADANLDKVLSAYNKHRDKPIREQAENIIHLFTLTNLGAPAAFKYFDTTIDRKRYTSTKEVLDATLIHQSITGLYETRIDLSQLGGDGGGGGEAAAKGGVPWLMKKPLQLTVLVPLHEYQERLLQQTALPKEQKELLQKLFLKYDALWQHWENQVGHRRIKPHNIATGTLAPRPQKQYPINPKAKPSIQIVIDDLLKQGVLIQQNSTMNTPVYPVPKPDGKWRMVLDYREVNKTIPLIAAQNQHSAGILSSIYRGKYKTTLDLTNGFWAHPITPESYWLTAFTWQGKQYCWTRLPQGFLNSPALFTADVVDLLKEIPNVQAYVDDIYISHDDPQEHLEQLEKIFSILLNAGYVVSLKKSEIAQREVEFLGFNITKEGRGLTDTFKQKLLNITPPKDLKQLQSILGLLNFARNFIPNYSELVKPLYTIVANANGKFISWTEDNSNQLQHIISVLNQADNLEERNPETRLIIKVNSSPSAGYIRYYNEGSKRPIMYVNYIFSKAEAKFTQTEKLLTTMHKGLIKAMDLAMGQEILVYSPIVSMTKIQRTPLPERKALPVRWITWMTYLEDPRIQFHYDKSLPELQQIPNVTEDVIAKTKHPSEFAMVFYTDGSAIKHPDVNKSHSAGMGIAQVQFIPEYKIVHQWSIPLGDHTAQLAEIAAVEFACKKALKISGPVLIVTDSFYVAESANKELPYWKSNGFLNNKKKPLRHVSKWKSIAECLQLKPDIIIMHEKGHQQPMTTLHTEGNNLADKLATQGSYVVHAGKRTADGSEFEKRTADGSEFESPKKKAKVE

SEQ ID NO: 436 - protein, 2087 aa, synthetic construct
MPAAKRVKLDGGDKKYSIGLDIGTNSVGWAVITDEYKVPSKKFKVLGNTDRHSIKKNLIGALLFDSGETAEATRLKRTARRRYTRRKNRICYLQEIFSNEMAKVDDSFFHRLEESFLVEEDKKHERHPIFGNIVDEVAYHEKYPTIYHLRKKLVDSTDKADLRLIYLALAHMIKFRGHFLIEGDLNPDNSDVDKLFIQLVQTYNQLFEENPINASGVDAKAILSARLSKSRRLENLIAQLPGEKKNGLFGNLIALSLGLTPNFKSNFDLAEDAKLQLSKDTYDDDLDNLLAQIGDQYADLFLAAKNLSDAILLSDILRVNTEITKAPLSASMIKRYDEHHQDLTLLKALVRQQLPEKYKEIFFDQSKNGYAGYIDGGASQEEFYKFIKPILEKMDGTEELLVKLNREDLLRKQRTFDNGSIPHQIHLGELHAILRRQEDFYPFLKDNREKIEKILTFRIPYYVGPLARGNSRFAWMTRKSEETITPWNFEEVVDKGASAQSFIERMTNFDKNLPNEKVLPKHSLLYEYFTVYNELTKVKYVTEGMRKPAFLSGEQKKAIVDLLFKTNRKVTVKQLKEDYFKKIECFDSVEISGVEDRFNASLGTYHDLLKIIKDKDFLDNEENEDILEDIVLTLTLFEDREMIEERLKTYAHLFDDKVMKQLKRRRYTGWGRLSRKLINGIRDKQSGKTILDFLKSDGFANRNFMQLIHDDSLTFKEDIQKAQVSGQGDSLHEHIANLAGSPAIKKGILQTVKVVDELVKVMGRHKPENIVIEMARENQTTQKGQKNSRERMKRIEEGIKELGSQILKEHPVENTQLQNEKLYLYYLQNGRDMYVDQELDINRLSDYDVDHIVPQSFLKDDSIDNKVLTRSDKARGKSDNVPSEEVVKKMKNYWRQLLNAKLITQRKFDNLTKAERGGLSELDKAGFIKRQLVETRQITKHVAQILDSRMNTKYDENDKLIREVKVITLKSKLVSDFRKDFQFYKVREINNYHHAHDAYLNAVVGTALIKKYPKLESEFVYGDYKVYDVRKMIAKSEQEIGKATAKYFFYSNIMNFFKTEITLANGEIRKRPLIETNGETGEIVWDKGRDFATVRKVLSMPQVNIVKKTEVQTGGFSKESILPKRNSDKLIARKKDWDPKKYGGFDSPTVAYSVLVVAKVEKGKSKKLKSVKELLGITIMERSSFEKNPIDFLEAKGYKEVKKDLIIKLPKYSLFELENGRKRMLASAGELQKGNELALPSKYVNFLYLASHYEKLKGSPEDNEQKQLFVEQHKHYLDEIIEQISEFSKRVILADANLDKVLSAYNKHRDKPIREQAENIIHLFTLTNLGAPAAFKYFDTTIDRKRYTSTKEVLDATLIHQSITGLYETRIDLSQLGGDGGPAPGGGEAAAKGGVPWLMKKPLQLTVLVPLHEYQERLLQQTALPKEQKELLQKLFLKYDALWQHWENQVGHRRIKPHNIATGTLAPRPQKQYPINPKAKPSIQIVIDDLLKQGVLIQQNSTMNTPVYPVPKPDGKWRMVLDYREVNKTIPLIAAQNQHSAGILSSIYRGKYKTTLDLTNGFWAHPITPESYWLTAFTWQGKQYCWTRLPQGFLNSPALFTADVVDLLKEIPNVQAYVDDIYISHDDPQEHLEQLEKIFSILLNAGYVVSLKKSEIAQREVEFLGFNITKEGRGLTDTFKQKLLNITPPKDLKQLQSILGLLNFARNFIPNYSELVKPLYTIVANANGKFISWTEDNSNQLQHIISVLNQADNLEERNPETRLIIKVNSSPSAGYIRYYNEGSKRPIMYVNYIFSKAEAKFTQTEKLLTTMHKGLIKAMDLAMGQEILVYSPIVSMTKIQRTPLPERKALPVRWITWMTYLEDPRIQFHYDKSLPELQQIPNVTEDVIAKTKHPSEFAMVFYTDGSAIKHPDVNKSHSAGMGIAQVQFIPEYKIVHQWSIPLGDHTAQLAEIAAVEFACKKALKISGPVLIVTDSFYVAESANKELPYWKSNGFLNNKKKPLRHVSKWKSIAECLQLKPDIIIMHEKGHQQPMTTLHTEGNNLADKLATQGSYVVHAGKRTADGSEFEKRTADGSEFESPKKKAKVE

SEQ ID NO: 437 - protein, 2094 aa, synthetic construct
MPAAKRVKLDGGDKKYSIGLDIGTNSVGWAVITDEYKVPSKKFKVLGNTDRHSIKKNLIGALLFDSGETAEATRLKRTARRRYTRRKNRICYLQEIFSNEMAKVDDSFFHRLEESFLVEEDKKHERHPIFGNIVDEVAYHEKYPTIYHLRKKLVDSTDKADLRLIYLALAHMIKFRGHFLIEGDLNPDNSDVDKLFIQLVQTYNQLFEENPINASGVDAKAILSARLSKSRRLENLIAQLPGEKKNGLFGNLIALSLGLTPNFKSNFDLAEDAKLQLSKDTYDDDLDNLLAQIGDQYADLFLAAKNLSDAILLSDILRVNTEITKAPLSASMIKRYDEHHQDLTLLKALVRQQLPEKYKEIFFDQSKNGYAGYIDGGASQEEFYKFIKPILEKMDGTEELLVKLNREDLLRKQRTFDNGSIPHQIHLGELHAILRRQEDFYPFLKDNREKIEKILTFRIPYYVGPLARGNSRFAWMTRKSEETITPWNFEEVVDKGASAQSFIERMTNFDKNLPNEKVLPKHSLLYEYFTVYNELTKVKYVTEGMRKPAFLSGEQKKAIVDLLFKTNRKVTVKQLKEDYFKKIECFDSVEISGVEDRFNASLGTYHDLLKIIKDKDFLDNEENEDILEDIVLTLTLFEDREMIEERLKTYAHLFDDKVMKQLKRRRYTGWGRLSRKLINGIRDKQSGKTILDFLKSDGFANRNFMQLIHDDSLTFKEDIQKAQVSGQGDSLHEHIANLAGSPAIKKGILQTVKVVDELVKVMGRHKPENIVIEMARENQTTQKGQKNSRERMKRIEEGIKELGSQILKEHPVENTQLQNEKLYLYYLQNGRDMYVDQELDINRLSDYDVDHIVPQSFLKDDSIDNKVLTRSDKARGKSDNVPSEEVVKKMKNYWRQLLNAKLITQRKFDNLTKAERGGLSELDKAGFIKRQLVETRQITKHVAQILDSRMNTKYDENDKLIREVKVITLKSKLVSDFRKDFQFYKVREINNYHHAHDAYLNAVVGTALIKKYPKLESEFVYGDYKVYDVRKMIAKSEQEIGKATAKYFFYSNIMNFFKTEITLANGEIRKRPLIETNGETGEIVWDKGRDFATVRKVLSMPQVNIVKKTEVQTGGFSKESILPKRNSDKLIARKKDWDPKKYGGFDSPTVAYSVLVVAKVEKGKSKKLKSVKELLGITIMERSSFEKNPIDFLEAKGYKEVKKDLIIKLPKYSLFELENGRKRMLASAGELQKGNELALPSKYVNFLYLASHYEKLKGSPEDNEQKQLFVEQHKHYLDEIIEQISEFSKRVILADANLDKVLSAYNKHRDKPIREQAENIIHLFTLTNLGAPAAFKYFDTTIDRKRYTSTKEVLDATLIHQSITGLYETRIDLSQLGGDGGGSSGSSGSSGSSGSSGSSGGVPWLMKKPLQLTVLVPLHEYQERLLQQTALPKEQKELLQKLFLKYDALWQHWENQVGHRRIKPHNIATGTLAPRPQKQYPINPKAKPSIQIVIDDLLKQGVLIQQNSTMNTPVYPVPKPDGKWRMVLDYREVNKTIPLIAAQNQHSAGILSSIYRGKYKTTLDLTNGFWAHPITPESYWLTAFTWQGKQYCWTRLPQGFLNSPALFNADVVDLLKEIPNVQAYVDDIYISHDDPQEHLEQLEKIFSILLNAGYVVSLKKSEIAQREVEFLGFNITKEGRGLTDTFKQKLLNITPPKDLKQLQSILGLLNFARNFIPNYSELVKPLYTIVAPANGKFISWTEDNSNQLQHIISVLNQADNLEERNPETRLIIKVNSSPSAGYIRYYNEGSKRPIMYVNYIFSKAEAKFTQTEKLLTTMHKGLIKAMDLAMGQEILVYSPIVSMTKIQRTPLPERKALPVRWITWMTYLEDPRIQFHYDKSLPELQQIPNVTEDVIAKTKHPSEFAMVFYTDGSAIKHPDVNKSHSAGMGIAQVQFIPEYKIVHQWSIPLGDHTAQLAEIAAVEFACKKALKISGPVLIVTDSFYVAESANKELPYWKSNGFLNNKKKPLRHVSKWKSIAECLQLKPDIIIMHEKGHQQPMTTLHTEGNNLADKLATQGSYVVHAGKRTADGSEFEKRTADGSEFESPKKKAKVE

SEQ ID NO: 438 - protein, 2087 aa, synthetic construct
MPAAKRVKLDGGDKKYSIGLDIGTNSVGWAVITDEYKVPSKKFKVLGNTDRHSIKKNLIGALLFDSGETAEATRLKRTARRRYTRRKNRICYLQEIFSNEMAKVDDSFFHRLEESFLVEEDKKHERHPIFGNIVDEVAYHEKYPTIYHLRKKLVDSTDKADLRLIYLALAHMIKFRGHFLIEGDLNPDNSDVDKLFIQLVQTYNQLFEENPINASGVDAKAILSARLSKSRRLENLIAQLPGEKKNGLFGNLIALSLGLTPNFKSNFDLAEDAKLQLSKDTYDDDLDNLLAQIGDQYADLFLAAKNLSDAILLSDILRVNTEITKAPLSASMIKRYDEHHQDLTLLKALVRQQLPEKYKEIFFDQSKNGYAGYIDGGASQEEFYKFIKPILEKMDGTEELLVKLNREDLLRKQRTFDNGSIPHQIHLGELHAILRRQEDFYPFLKDNREKIEKILTFRIPYYVGPLARGNSRFAWMTRKSEETITPWNFEEVVDKGASAQSFIERMTNFDKNLPNEKVLPKHSLLYEYFTVYNELTKVKYVTEGMRKPAFLSGEQKKAIVDLLFKTNRKVTVKQLKEDYFKKIECFDSVEISGVEDRFNASLGTYHDLLKIIKDKDFLDNEENEDILEDIVLTLTLFEDREMIEERLKTYAHLFDDKVMKQLKRRRYTGWGRLSRKLINGIRDKQSGKTILDFLKSDGFANRNFMQLIHDDSLTFKEDIQKAQVSGQGDSLHEHIANLAGSPAIKKGILQTVKVVDELVKVMGRHKPENIVIEMARENQTTQKGQKNSRERMKRIEEGIKELGSQILKEHPVENTQLQNEKLYLYYLQNGRDMYVDQELDINRLSDYDVDHIVPQSFLKDDSIDNKVLTRSDKARGKSDNVPSEEVVKKMKNYWRQLLNAKLITQRKFDNLTKAERGGLSELDKAGFIKRQLVETRQITKHVAQILDSRMNTKYDENDKLIREVKVITLKSKLVSDFRKDFQFYKVREINNYHHAHDAYLNAVVGTALIKKYPKLESEFVYGDYKVYDVRKMIAKSEQEIGKATAKYFFYSNIMNFFKTEITLANGEIRKRPLIETNGETGEIVWDKGRDFATVRKVLSMPQVNIVKKTEVQTGGFSKESILPKRNSDKLIARKKDWDPKKYGGFDSPTVAYSVLVVAKVEKGKSKKLKSVKELLGITIMERSSFEKNPIDFLEAKGYKEVKKDLIIKLPKYSLFELENGRKRMLASAGELQKGNELALPSKYVNFLYLASHYEKLKGSPEDNEQKQLFVEQHKHYLDEIIEQISEFSKRVILADANLDKVLSAYNKHRDKPIREQAENIIHLFTLTNLGAPAAFKYFDTTIDRKRYTSTKEVLDATLIHQSITGLYETRIDLSQLGGDGGGSSGGGEAAAKGGVPWLMKKPLQLTVLVPLHEYQERLLQQTALPKEQKELLQKLFLKYDALWQHWENQVGHRRIKPHNIATGTLAPRPQKQYPINPKAKPSIQIVIDDLLKQGVLIQQNSTMNTPVYPVPKPDGKWRMVLDYREVNKTIPLIAAQNQHSAGILSSIYRGKYKTTLDLTNGFWAHPITPESYWLTAFTWQGKQYCWTRLPQGFLNSPALFNADVVDLLKEIPNVQAYVDDIYISHDDPQEHLEQLEKIFSILLNAGYVVSLKKSEIAQREVEFLGFNITKEGRGLTDTFKQKLLNITPPKDLKQLQSILGLLNFARNFIPNYSELVKPLYTIVAPANGKFISWTEDNSNQLQHIISVLNQADNLEERNPETRLIIKVNSSPSAGYIRYYNEGSKRPIMYVNYIFSKAEAKFTQTEKLLTTMHKGLIKAMDLAMGQEILVYSPIVSMTKIQRTPLPERKALPVRWITWMTYLEDPRIQFHYDKSLPELQQIPNVTEDVIAKTKHPSEFAMVFYTDGSAIKHPDVNKSHSAGMGIAQVQFIPEYKIVHQWSIPLGDHTAQLAEIAAVEFACKKALKISGPVLIVTDSFYVAESANKELPYWKSNGFLNNKKKPLRHVSKWKSIAECLQLKPDIIIMHEKGHQQPMTTLHTEGNNLADKLATQGSYVVHAGKRTADGSEFEKRTADGSEFESPKKKAKVE

SEQ ID NO: 439 - protein, 2091 aa, synthetic construct
MPAAKRVKLDGGDKKYSIGLDIGTNSVGWAVITDEYKVPSKKFKVLGNTDRHSIKKNLIGALLFDSGETAEATRLKRTARRRYTRRKNRICYLQEIFSNEMAKVDDSFFHRLEESFLVEEDKKHERHPIFGNIVDEVAYHEKYPTIYHLRKKLVDSTDKADLRLIYLALAHMIKFRGHFLIEGDLNPDNSDVDKLFIQLVQTYNQLFEENPINASGVDAKAILSARLSKSRRLENLIAQLPGEKKNGLFGNLIALSLGLTPNFKSNFDLAEDAKLQLSKDTYDDDLDNLLAQIGDQYADLFLAAKNLSDAILLSDILRVNTEITKAPLSASMIKRYDEHHQDLTLLKALVRQQLPEKYKEIFFDQSKNGYAGYIDGGASQEEFYKFIKPILEKMDGTEELLVKLNREDLLRKQRTFDNGSIPHQIHLGELHAILRRQEDFYPFLKDNREKIEKILTFRIPYYVGPLARGNSRFAWMTRKSEETITPWNFEEVVDKGASAQSFIERMTNFDKNLPNEKVLPKHSLLYEYFTVYNELTKVKYVTEGMRKPAFLSGEQKKAIVDLLFKTNRKVTVKQLKEDYFKKIECFDSVEISGVEDRFNASLGTYHDLLKIIKDKDFLDNEENEDILEDIVLTLTLFEDREMIEERLKTYAHLFDDKVMKQLKRRRYTGWGRLSRKLINGIRDKQSGKTILDFLKSDGFANRNFMQLIHDDSLTFKEDIQKAQVSGQGDSLHEHIANLAGSPAIKKGILQTVKVVDELVKVMGRHKPENIVIEMARENQTTQKGQKNSRERMKRIEEGIKELGSQILKEHPVENTQLQNEKLYLYYLQNGRDMYVDQELDINRLSDYDVDHIVPQSFLKDDSIDNKVLTRSDKARGKSDNVPSEEVVKKMKNYWRQLLNAKLITQRKFDNLTKAERGGLSELDKAGFIKRQLVETRQITKHVAQILDSRMNTKYDENDKLIREVKVITLKSKLVSDFRKDFQFYKVREINNYHHAHDAYLNAVVGTALIKKYPKLESEFVYGDYKVYDVRKMIAKSEQEIGKATAKYFFYSNIMNFFKTEITLANGEIRKRPLIETNGETGEIVWDKGRDFATVRKVLSMPQVNIVKKTEVQTGGFSKESILPKRNSDKLIARKKDWDPKKYGGFDSPTVAYSVLVVAKVEKGKSKKLKSVKELLGITIMERSSFEKNPIDFLEAKGYKEVKKDLIIKLPKYSLFELENGRKRMLASAGELQKGNELALPSKYVNFLYLASHYEKLKGSPEDNEQKQLFVEQHKHYLDEIIEQISEFSKRVILADANLDKVLSAYNKHRDKPIREQAENIIHLFTLTNLGAPAAFKYFDTTIDRKRYTSTKEVLDATLIHQSITGLYETRIDLSQLGGDGGGGGGSEAAAKGGGGSGGVPWLMKKPLQLTVLVPLHEYQERLLQQTALPKEQKELLQKLFLKYDALWQHWENQVGHRRIKPHNIATGTLAPRPQKQYPINPKAKPSIQIVIDDLLKQGVLIQQNSTMNTPVYPVPKPDGKWRMVLDYREVNKTIPLIAAQNQHSAGILSSIYRGKYKTTLDLTNGFWAHPITPESYWLTAFTWQGKQYCWTRLPQGFLNSPALFNADVVDLLKEIPNVQAYVDDIYISHDDPQEHLEQLEKIFSILLNAGYVVSLKKSEIAQREVEFLGFNITKEGRGLTDTFKQKLLNITPPKDLKQLQSILGLLNFARNFIPNYSELVKPLYTIVAPANGKFISWTEDNSNQLQHIISVLNQADNLEERNPETRLIIKVNSSPSAGYIRYYNEGSKRPIMYVNYIFSKAEAKFTQTEKLLTTMHKGLIKAMDLAMGQEILVYSPIVSMTKIQRTPLPERKALPVRWITWMTYLEDPRIQFHYDKSLPELQQIPNVTEDVIAKTKHPSEFAMVFYTDGSAIKHPDVNKSHSAGMGIAQVQFIPEYKIVHQWSIPLGDHTAQLAEIAAVEFACKKALKISGPVLIVTDSFYVAESANKELPYWKSNGFLNNKKKPLRHVSKWKSIAECLQLKPDIIIMHEKGHQQPMTTLHTEGNNLADKLATQGSYVVHAGKRTADGSEFEKRTADGSEFESPKKKAKVE

SEQ ID NO: 440 - protein, 2085 aa, synthetic construct
MPAAKRVKLDGGDKKYSIGLDIGTNSVGWAVITDEYKVPSKKFKVLGNTDRHSIKKNLIGALLFDSGETAEATRLKRTARRRYTRRKNRICYLQEIFSNEMAKVDDSFFHRLEESFLVEEDKKHERHPIFGNIVDEVAYHEKYPTIYHLRKKLVDSTDKADLRLIYLALAHMIKFRGHFLIEGDLNPDNSDVDKLFIQLVQTYNQLFEENPINASGVDAKAILSARLSKSRRLENLIAQLPGEKKNGLFGNLIALSLGLTPNFKSNFDLAEDAKLQLSKDTYDDDLDNLLAQIGDQYADLFLAAKNLSDAILLSDILRVNTEITKAPLSASMIKRYDEHHQDLTLLKALVRQQLPEKYKEIFFDQSKNGYAGYIDGGASQEEFYKFIKPILEKMDGTEELLVKLNREDLLRKQRTFDNGSIPHQIHLGELHAILRRQEDFYPFLKDNREKIEKILTFRIPYYVGPLARGNSRFAWMTRKSEETITPWNFEEVVDKGASAQSFIERMTNFDKNLPNEKVLPKHSLLYEYFTVYNELTKVKYVTEGMRKPAFLSGEQKKAIVDLLFKTNRKVTVKQLKEDYFKKIECFDSVEISGVEDRFNASLGTYHDLLKIIKDKDFLDNEENEDILEDIVLTLTLFEDREMIEERLKTYAHLFDDKVMKQLKRRRYTGWGRLSRKLINGIRDKQSGKTILDFLKSDGFANRNFMQLIHDDSLTFKEDIQKAQVSGQGDSLHEHIANLAGSPAIKKGILQTVKVVDELVKVMGRHKPENIVIEMARENQTTQKGQKNSRERMKRIEEGIKELGSQILKEHPVENTQLQNEKLYLYYLQNGRDMYVDQELDINRLSDYDVDHIVPQSFLKDDSIDNKVLTRSDKARGKSDNVPSEEVVKKMKNYWRQLLNAKLITQRKFDNLTKAERGGLSELDKAGFIKRQLVETRQITKHVAQILDSRMNTKYDENDKLIREVKVITLKSKLVSDFRKDFQFYKVREINNYHHAHDAYLNAVVGTALIKKYPKLESEFVYGDYKVYDVRKMIAKSEQEIGKATAKYFFYSNIMNFFKTEITLANGEIRKRPLIETNGETGEIVWDKGRDFATVRKVLSMPQVNIVKKTEVQTGGFSKESILPKRNSDKLIARKKDWDPKKYGGFDSPTVAYSVLVVAKVEKGKSKKLKSVKELLGITIMERSSFEKNPIDFLEAKGYKEVKKDLIIKLPKYSLFELENGRKRMLASAGELQKGNELALPSKYVNFLYLASHYEKLKGSPEDNEQKQLFVEQHKHYLDEIIEQISEFSKRVILADANLDKVLSAYNKHRDKPIREQAENIIHLFTLTNLGAPAAFKYFDTTIDRKRYTSTKEVLDATLIHQSITGLYETRIDLSQLGGDGGPAPGSSGGSGGVPWLMKKPLQLTVLVPLHEYQERLLQQTALPKEQKELLQKLFLKYDALWQHWENQVGHRRIKPHNIATGTLAPRPQKQYPINPKAKPSIQIVIDDLLKQGVLIQQNSTMNTPVYPVPKPDGKWRMVLDYREVNKTIPLIAAQNQHSAGILSSIYRGKYKTTLDLTNGFWAHPITPESYWLTAFTWQGKQYCWTRLPQGFLNSPALFNADVVDLLKEIPNVQAYVDDIYISHDDPQEHLEQLEKIFSILLNAGYVVSLKKSEIAQREVEFLGFNITKEGRGLTDTFKQKLLNITPPKDLKQLQSILGLLNFARNFIPNYSELVKPLYTIVAPANGKFISWTEDNSNQLQHIISVLNQADNLEERNPETRLIIKVNSSPSAGYIRYYNEGSKRPIMYVNYIFSKAEAKFTQTEKLLTTMHKGLIKAMDLAMGQEILVYSPIVSMTKIQRTPLPERKALPVRWITWMTYLEDPRIQFHYDKSLPELQQIPNVTEDVIAKTKHPSEFAMVFYTDGSAIKHPDVNKSHSAGMGIAQVQFIPEYKIVHQWSIPLGDHTAQLAEIAAVEFACKKALKISGPVLIVTDSFYVAESANKELPYWKSNGFLNNKKKPLRHVSKWKSIAECLQLKPDIIIMHEKGHQQPMTTLHTEGNNLADKLATQGSYVVHAGKRTADGSEFEKRTADGSEFESPKKKAKVE

SEQ ID NO: 441 - protein, 2087 aa, synthetic construct
MPAAKRVKLDGGDKKYSIGLDIGTNSVGWAVITDEYKVPSKKFKVLGNTDRHSIKKNLIGALLFDSGETAEATRLKRTARRRYTRRKNRICYLQEIFSNEMAKVDDSFFHRLEESFLVEEDKKHERHPIFGNIVDEVAYHEKYPTIYHLRKKLVDSTDKADLRLIYLALAHMIKFRGHFLIEGDLNPDNSDVDKLFIQLVQTYNQLFEENPINASGVDAKAILSARLSKSRRLENLIAQLPGEKKNGLFGNLIALSLGLTPNFKSNFDLAEDAKLQLSKDTYDDDLDNLLAQIGDQYADLFLAAKNLSDAILLSDILRVNTEITKAPLSASMIKRYDEHHQDLTLLKALVRQQLPEKYKEIFFDQSKNGYAGYIDGGASQEEFYKFIKPILEKMDGTEELLVKLNREDLLRKQRTFDNGSIPHQIHLGELHAILRRQEDFYPFLKDNREKIEKILTFRIPYYVGPLARGNSRFAWMTRKSEETITPWNFEEVVDKGASAQSFIERMTNFDKNLPNEKVLPKHSLLYEYFTVYNELTKVKYVTEGMRKPAFLSGEQKKAIVDLLFKTNRKVTVKQLKEDYFKKIECFDSVEISGVEDRFNASLGTYHDLLKIIKDKDFLDNEENEDILEDIVLTLTLFEDREMIEERLKTYAHLFDDKVMKQLKRRRYTGWGRLSRKLINGIRDKQSGKTILDFLKSDGFANRNFMQLIHDDSLTFKEDIQKAQVSGQGDSLHEHIANLAGSPAIKKGILQTVKVVDELVKVMGRHKPENIVIEMARENQTTQKGQKNSRERMKRIEEGIKELGSQILKEHPVENTQLQNEKLYLYYLQNGRDMYVDQELDINRLSDYDVDHIVPQSFLKDDSIDNKVLTRSDKARGKSDNVPSEEVVKKMKNYWRQLLNAKLITQRKFDNLTKAERGGLSELDKAGFIKRQLVETRQITKHVAQILDSRMNTKYDENDKLIREVKVITLKSKLVSDFRKDFQFYKVREINNYHHAHDAYLNAVVGTALIKKYPKLESEFVYGDYKVYDVRKMIAKSEQEIGKATAKYFFYSNIMNFFKTEITLANGEIRKRPLIETNGETGEIVWDKGRDFATVRKVLSMPQVNIVKKTEVQTGGFSKESILPKRNSDKLIARKKDWDPKKYGGFDSPTVAYSVLVVAKVEKGKSKKLKSVKELLGITIMERSSFEKNPIDFLEAKGYKEVKKDLIIKLPKYSLFELENGRKRMLASAGELQKGNELALPSKYVNFLYLASHYEKLKGSPEDNEQKQLFVEQHKHYLDEIIEQISEFSKRVILADANLDKVLSAYNKHRDKPIREQAENIIHLFTLTNLGAPAAFKYFDTTIDRKRYTSTKEVLDATLIHQSITGLYETRIDLSQLGGDGGGGGEAAAKPAPGGVPWLMKKPLQLTVLVPLHEYQERLLQQTALPKEQKELLQKLFLKYDALWQHWENQVGHRRIKPHNIATGTLAPRPQKQYPINPKAKPSIQIVIDDLLKQGVLIQQNSTMNTPVYPVPKPDGKWRMVLDYREVNKTIPLIAAQNQHSAGILSSIYRGKYKTTLDLTNGFWAHPITPESYWLTAFTWQGKQYCWTRLPQGFLNSPALFNADVVDLLKEIPNVQAYVDDIYISHDDPQEHLEQLEKIFSILLNAGYVVSLKKSEIAQREVEFLGFNITKEGRGLTDTFKQKLLNITPPKDLKQLQSILGLLNFARNFIPNYSELVKPLYTIVAPANGKFISWTEDNSNQLQHIISVLNQADNLEERNPETRLIIKVNSSPSAGYIRYYNEGSKRPIMYVNYIFSKAEAKFTQTEKLLTTMHKGLIKAMDLAMGQEILVYSPIVSMTKIQRTPLPERKALPVRWITWMTYLEDPRIQFHYDKSLPELQQIPNVTEDVIAKTKHPSEFAMVFYTDGSAIKHPDVNKSHSAGMGIAQVQFIPEYKIVHQWSIPLGDHTAQLAEIAAVEFACKKALKISGPVLIVTDSFYVAESANKELPYWKSNGFLNNKKKPLRHVSKWKSIAECLQLKPDIIIMHEKGHQQPMTTLHTEGNNLADKLATQGSYVVHAGKRTADGSEFEKRTADGSEFESPKKKAKVE

SEQ ID NO: 442 - protein, 2087 aa, synthetic construct
MPAAKRVKLDGGDKKYSIGLDIGTNSVGWAVITDEYKVPSKKFKVLGNTDRHSIKKNLIGALLFDSGETAEATRLKRTARRRYTRRKNRICYLQEIFSNEMAKVDDSFFHRLEESFLVEEDKKHERHPIFGNIVDEVAYHEKYPTIYHLRKKLVDSTDKADLRLIYLALAHMIKFRGHFLIEGDLNPDNSDVDKLFIQLVQTYNQLFEENPINASGVDAKAILSARLSKSRRLENLIAQLPGEKKNGLFGNLIALSLGLTPNFKSNFDLAEDAKLQLSKDTYDDDLDNLLAQIGDQYADLFLAAKNLSDAILLSDILRVNTEITKAPLSASMIKRYDEHHQDLTLLKALVRQQLPEKYKEIFFDQSKNGYAGYIDGGASQEEFYKFIKPILEKMDGTEELLVKLNREDLLRKQRTFDNGSIPHQIHLGELHAILRRQEDFYPFLKDNREKIEKILTFRIPYYVGPLARGNSRFAWMTRKSEETITPWNFEEVVDKGASAQSFIERMTNFDKNLPNEKVLPKHSLLYEYFTVYNELTKVKYVTEGMRKPAFLSGEQKKAIVDLLFKTNRKVTVKQLKEDYFKKIECFDSVEISGVEDRFNASLGTYHDLLKIIKDKDFLDNEENEDILEDIVLTLTLFEDREMIEERLKTYAHLFDDKVMKQLKRRRYTGWGRLSRKLINGIRDKQSGKTILDFLKSDGFANRNFMQLIHDDSLTFKEDIQKAQVSGQGDSLHEHIANLAGSPAIKKGILQTVKVVDELVKVMGRHKPENIVIEMARENQTTQKGQKNSRERMKRIEEGIKELGSQILKEHPVENTQLQNEKLYLYYLQNGRDMYVDQELDINRLSDYDVDHIVPQSFLKDDSIDNKVLTRSDKARGKSDNVPSEEVVKKMKNYWRQLLNAKLITQRKFDNLTKAERGGLSELDKAGFIKRQLVETRQITKHVAQILDSRMNTKYDENDKLIREVKVITLKSKLVSDFRKDFQFYKVREINNYHHAHDAYLNAVVGTALIKKYPKLESEFVYGDYKVYDVRKMIAKSEQEIGKATAKYFFYSNIMNFFKTEITLANGEIRKRPLIETNGETGEIVWDKGRDFATVRKVLSMPQVNIVKKTEVQTGGFSKESILPKRNSDKLIARKKDWDPKKYGGFDSPTVAYSVLVVAKVEKGKSKKLKSVKELLGITIMERSSFEKNPIDFLEAKGYKEVKKDLIIKLPKYSLFELENGRKRMLASAGELQKGNELALPSKYVNFLYLASHYEKLKGSPEDNEQKQLFVEQHKHYLDEIIEQISEFSKRVILADANLDKVLSAYNKHRDKPIREQAENIIHLFTLTNLGAPAAFKYFDTTIDRKRYTSTKEVLDATLIHQSITGLYETRIDLSQLGGDGGGGSPAPEAAAKGGVPWLMKKPLQLTVLVPLHEYQERLLQQTALPKEQKELLQKLFLKYDALWQHWENQVGHRRIKPHNIATGTLAPRPQKQYPINPKAKPSIQIVIDDLLKQGVLIQQNSTMNTPVYPVPKPDGKWRMVLDYREVNKTIPLIAAQNQHSAGILSSIYRGKYKTTLDLTNGFWAHPITPESYWLTAFTWQGKQYCWTRLPQGFLNSPALFNADVVDLLKEIPNVQAYVDDIYISHDDPQEHLEQLEKIFSILLNAGYVVSLKKSEIAQREVEFLGFNITKEGRGLTDTFKQKLLNITPPKDLKQLQSILGLLNFARNFIPNYSELVKPLYTIVAPANGKFISWTEDNSNQLQHIISVLNQADNLEERNPETRLIIKVNSSPSAGYIRYYNEGSKRPIMYVNYIFSKAEAKFTQTEKLLTTMHKGLIKAMDLAMGQEILVYSPIVSMTKIQRTPLPERKALPVRWITWMTYLEDPRIQFHYDKSLPELQQIPNVTEDVIAKTKHPSEFAMVFYTDGSAIKHPDVNKSHSAGMGIAQVQFIPEYKIVHQWSIPLGDHTAQLAEIAAVEFACKKALKISGPVLIVTDSFYVAESANKELPYWKSNGFLNNKKKPLRHVSKWKSIAECLQLKPDIIIMHEKGHQQPMTTLHTEGNNLADKLATQGSYVVHAGKRTADGSEFEKRTADGSEFESPKKKAKVE

SEQ ID NO: 443 - protein, 2084 aa, synthetic construct
MPAAKRVKLDGGDKKYSIGLDIGTNSVGWAVITDEYKVPSKKFKVLGNTDRHSIKKNLIGALLFDSGETAEATRLKRTARRRYTRRKNRICYLQEIFSNEMAKVDDSFFHRLEESFLVEEDKKHERHPIFGNIVDEVAYHEKYPTIYHLRKKLVDSTDKADLRLIYLALAHMIKFRGHFLIEGDLNPDNSDVDKLFIQLVQTYNQLFEENPINASGVDAKAILSARLSKSRRLENLIAQLPGEKKNGLFGNLIALSLGLTPNFKSNFDLAEDAKLQLSKDTYDDDLDNLLAQIGDQYADLFLAAKNLSDAILLSDILRVNTEITKAPLSASMIKRYDEHHQDLTLLKALVRQQLPEKYKEIFFDQSKNGYAGYIDGGASQEEFYKFIKPILEKMDGTEELLVKLNREDLLRKQRTFDNGSIPHQIHLGELHAILRRQEDFYPFLKDNREKIEKILTFRIPYYVGPLARGNSRFAWMTRKSEETITPWNFEEVVDKGASAQSFIERMTNFDKNLPNEKVLPKHSLLYEYFTVYNELTKVKYVTEGMRKPAFLSGEQKKAIVDLLFKTNRKVTVKQLKEDYFKKIECFDSVEISGVEDRFNASLGTYHDLLKIIKDKDFLDNEENEDILEDIVLTLTLFEDREMIEERLKTYAHLFDDKVMKQLKRRRYTGWGRLSRKLINGIRDKQSGKTILDFLKSDGFANRNFMQLIHDDSLTFKEDIQKAQVSGQGDSLHEHIANLAGSPAIKKGILQTVKVVDELVKVMGRHKPENIVIEMARENQTTQKGQKNSRERMKRIEEGIKELGSQILKEHPVENTQLQNEKLYLYYLQNGRDMYVDQELDINRLSDYDVDHIVPQSFLKDDSIDNKVLTRSDKARGKSDNVPSEEVVKKMKNYWRQLLNAKLITQRKFDNLTKAERGGLSELDKAGFIKRQLVETRQITKHVAQILDSRMNTKYDENDKLIREVKVITLKSKLVSDFRKDFQFYKVREINNYHHAHDAYLNAVVGTALIKKYPKLESEFVYGDYKVYDVRKMIAKSEQEIGKATAKYFFYSNIMNFFKTEITLANGEIRKRPLIETNGETGEIVWDKGRDFATVRKVLSMPQVNIVKKTEVQTGGFSKESILPKRNSDKLIARKKDWDPKKYGGFDSPTVAYSVLVVAKVEKGKSKKLKSVKELLGITIMERSSFEKNPIDFLEAKGYKEVKKDLIIKLPKYSLFELENGRKRMLASAGELQKGNELALPSKYVNFLYLASHYEKLKGSPEDNEQKQLFVEQHKHYLDEIIEQISEFSKRVILADANLDKVLSAYNKHRDKPIREQAENIIHLFTLTNLGAPAAFKYFDTTIDRKRYTSTKEVLDATLIHQSITGLYETRIDLSQLGGDGGEAAAKGGGGGVPWLMKKPLQLTVLVPLHEYQERLLQQTALPKEQKELLQKLFLKYDALWQHWENQVGHRRIKPHNIATGTLAPRPQKQYPINPKAKPSIQIVIDDLLKQGVLIQQNSTMNTPVYPVPKPDGKWRMVLDYREVNKTIPLIAAQNQHSAGILSSIYRGKYKTTLDLTNGFWAHPITPESYWLTAFTWQGKQYCWTRLPQGFLNSPALFNADVVDLLKEIPNVQAYVDDIYISHDDPQEHLEQLEKIFSILLNAGYVVSLKKSEIAQREVEFLGFNITKEGRGLTDTFKQKLLNITPPKDLKQLQSILGLLNFARNFIPNYSELVKPLYTIVAPANGKFISWTEDNSNQLQHIISVLNQADNLEERNPETRLIIKVNSSPSAGYIRYYNEGSKRPIMYVNYIFSKAEAKFTQTEKLLTTMHKGLIKAMDLAMGQEILVYSPIVSMTKIQRTPLPERKALPVRWITWMTYLEDPRIQFHYDKSLPELQQIPNVTEDVIAKTKHPSEFAMVFYTDGSAIKHPDVNKSHSAGMGIAQVQFIPEYKIVHQWSIPLGDHTAQLAEIAAVEFACKKALKISGPVLIVTDSFYVAESANKELPYWKSNGFLNNKKKPLRHVSKWKSIAECLQLKPDIIIMHEKGHQQPMTTLHTEGNNLADKLATQGSYVVHAGKRTADGSEFEKRTADGSEFESPKKKAKVE

SEQ ID NO: 444 - protein, 2087 aa, synthetic construct
MPAAKRVKLDGGDKKYSIGLDIGTNSVGWAVITDEYKVPSKKFKVLGNTDRHSIKKNLIGALLFDSGETAEATRLKRTARRRYTRRKNRICYLQEIFSNEMAKVDDSFFHRLEESFLVEEDKKHERHPIFGNIVDEVAYHEKYPTIYHLRKKLVDSTDKADLRLIYLALAHMIKFRGHFLIEGDLNPDNSDVDKLFIQLVQTYNQLFEENPINASGVDAKAILSARLSKSRRLENLIAQLPGEKKNGLFGNLIALSLGLTPNFKSNFDLAEDAKLQLSKDTYDDDLDNLLAQIGDQYADLFLAAKNLSDAILLSDILRVNTEITKAPLSASMIKRYDEHHQDLTLLKALVRQQLPEKYKEIFFDQSKNGYAGYIDGGASQEEFYKFIKPILEKMDGTEELLVKLNREDLLRKQRTFDNGSIPHQIHLGELHAILRRQEDFYPFLKDNREKIEKILTFRIPYYVGPLARGNSRFAWMTRKSEETITPWNFEEVVDKGASAQSFIERMTNFDKNLPNEKVLPKHSLLYEYFTVYNELTKVKYVTEGMRKPAFLSGEQKKAIVDLLFKTNRKVTVKQLKEDYFKKIECFDSVEISGVEDRFNASLGTYHDLLKIIKDKDFLDNEENEDILEDIVLTLTLFEDREMIEERLKTYAHLFDDKVMKQLKRRRYTGWGRLSRKLINGIRDKQSGKTILDFLKSDGFANRNFMQLIHDDSLTFKEDIQKAQVSGQGDSLHEHIANLAGSPAIKKGILQTVKVVDELVKVMGRHKPENIVIEMARENQTTQKGQKNSRERMKRIEEGIKELGSQILKEHPVENTQLQNEKLYLYYLQNGRDMYVDQELDINRLSDYDVDHIVPQSFLKDDSIDNKVLTRSDKARGKSDNVPSEEVVKKMKNYWRQLLNAKLITQRKFDNLTKAERGGLSELDKAGFIKRQLVETRQITKHVAQILDSRMNTKYDENDKLIREVKVITLKSKLVSDFRKDFQFYKVREINNYHHAHDAYLNAVVGTALIKKYPKLESEFVYGDYKVYDVRKMIAKSEQEIGKATAKYFFYSNIMNFFKTEITLANGEIRKRPLIETNGETGEIVWDKGRDFATVRKVLSMPQVNIVKKTEVQTGGFSKESILPKRNSDKLIARKKDWDPKKYGGFDSPTVAYSVLVVAKVEKGKSKKLKSVKELLGITIMERSSFEKNPIDFLEAKGYKEVKKDLIIKLPKYSLFELENGRKRMLASAGELQKGNELALPSKYVNFLYLASHYEKLKGSPEDNEQKQLFVEQHKHYLDEIIEQISEFSKRVILADANLDKVLSAYNKHRDKPIREQAENIIHLFTLTNLGAPAAFKYFDTTIDRKRYTSTKEVLDATLIHQSITGLYETRIDLSQLGGDGGPAPGGSEAAAKGGVPWLMKKPLQLTVLVPLHEYQERLLQQTALPKEQKELLQKLFLKYDALWQHWENQVGHRRIKPHNIATGTLAPRPQKQYPINPKAKPSIQIVIDDLLKQGVLIQQNSTMNTPVYPVPKPDGKWRMVLDYREVNKTIPLIAAQNQHSAGILSSIYRGKYKTTLDLTNGFWAHPITPESYWLTAFTWQGKQYCWTRLPQGFLNSPALFNADVVDLLKEIPNVQAYVDDIYISHDDPQEHLEQLEKIFSILLNAGYVVSLKKSEIAQREVEFLGFNITKEGRGLTDTFKQKLLNITPPKDLKQLQSILGLLNFARNFIPNYSELVKPLYTIVAPANGKFISWTEDNSNQLQHIISVLNQADNLEERNPETRLIIKVNSSPSAGYIRYYNEGSKRPIMYVNYIFSKAEAKFTQTEKLLTTMHKGLIKAMDLAMGQEILVYSPIVSMTKIQRTPLPERKALPVRWITWMTYLEDPRIQFHYDKSLPELQQIPNVTEDVIAKTKHPSEFAMVFYTDGSAIKHPDVNKSHSAGMGIAQVQFIPEYKIVHQWSIPLGDHTAQLAEIAAVEFACKKALKISGPVLIVTDSFYVAESANKELPYWKSNGFLNNKKKPLRHVSKWKSIAECLQLKPDIIIMHEKGHQQPMTTLHTEGNNLADKLATQGSYVVHAGKRTADGSEFEKRTADGSEFESPKKKAKVE

SEQ ID NO: 445 - protein, 2091 aa, synthetic construct
MPAAKRVKLDGGDKKYSIGLDIGTNSVGWAVITDEYKVPSKKFKVLGNTDRHSIKKNLIGALLFDSGETAEATRLKRTARRRYTRRKNRICYLQEIFSNEMAKVDDSFFHRLEESFLVEEDKKHERHPIFGNIVDEVAYHEKYPTIYHLRKKLVDSTDKADLRLIYLALAHMIKFRGHFLIEGDLNPDNSDVDKLFIQLVQTYNQLFEENPINASGVDAKAILSARLSKSRRLENLIAQLPGEKKNGLFGNLIALSLGLTPNFKSNFDLAEDAKLQLSKDTYDDDLDNLLAQIGDQYADLFLAAKNLSDAILLSDILRVNTEITKAPLSASMIKRYDEHHQDLTLLKALVRQQLPEKYKEIFFDQSKNGYAGYIDGGASQEEFYKFIKPILEKMDGTEELLVKLNREDLLRKQRTFDNGSIPHQIHLGELHAILRRQEDFYPFLKDNREKIEKILTFRIPYYVGPLARGNSRFAWMTRKSEETITPWNFEEVVDKGASAQSFIERMTNFDKNLPNEKVLPKHSLLYEYFTVYNELTKVKYVTEGMRKPAFLSGEQKKAIVDLLFKTNRKVTVKQLKEDYFKKIECFDSVEISGVEDRFNASLGTYHDLLKIIKDKDFLDNEENEDILEDIVLTLTLFEDREMIEERLKTYAHLFDDKVMKQLKRRRYTGWGRLSRKLINGIRDKQSGKTILDFLKSDGFANRNFMQLIHDDSLTFKEDIQKAQVSGQGDSLHEHIANLAGSPAIKKGILQTVKVVDELVKVMGRHKPENIVIEMARENQTTQKGQKNSRERMKRIEEGIKELGSQILKEHPVENTQLQNEKLYLYYLQNGRDMYVDQELDINRLSDYDVDHIVPQSFLKDDSIDNKVLTRSDKARGKSDNVPSEEVVKKMKNYWRQLLNAKLITQRKFDNLTKAERGGLSELDKAGFIKRQLVETRQITKHVAQILDSRMNTKYDENDKLIREVKVITLKSKLVSDFRKDFQFYKVREINNYHHAHDAYLNAVVGTALIKKYPKLESEFVYGDYKVYDVRKMIAKSEQEIGKATAKYFFYSNIMNFFKTEITLANGEIRKRPLIETNGETGEIVWDKGRDFATVRKVLSMPQVNIVKKTEVQTGGFSKESILPKRNSDKLIARKKDWDPKKYGGFDSPTVAYSVLVVAKVEKGKSKKLKSVKELLGITIMERSSFEKNPIDFLEAKGYKEVKKDLIIKLPKYSLFELENGRKRMLASAGELQKGNELALPSKYVNFLYLASHYEKLKGSPEDNEQKQLFVEQHKHYLDEIIEQISEFSKRVILADANLDKVLSAYNKHRDKPIREQAENIIHLFTLTNLGAPAAFKYFDTTIDRKRYTSTKEVLDATLIHQSITGLYETRIDLSQLGGDGGGGGGSEAAAKGGGGSGGVPWLMKKPLQLTVLVPLHEYQERLLQQTALPKEQKELLQKLFLKYDALWQHWENQVGHRRIKPHNIATGTLAPRPQKQYPINPKAKPSIQIVIDDLLKQGVLIQQNSTMNTPVYPVPKPDGKWRMVLDYREVNKTIPLIAAQNQHSAGILSSIYRGKYKTTLDLTNGFWAHPITPESYWLTAFTWQGKQYCWTRLPQGFLNSPALFNADVVDLLKEIPNVQAYVDDIYISHDDPQEHLEQLEKIFSILLNAGYVVSLKKSEIAQREVEFLGFNITKEGRGLTDTFKQKLLNITPPKDLKQLQSILGKLNFARNFIPNYSELVKPLYTIVAPANGKFISWTEDNSNQLQHIISVLNQADNLEERNPETRLIIKVNSSPSAGYIRYYNEGSKRPIMYVNYIFSKAEAKFTQTEKLLTTMHKGLIKAMDLAMGQEILVYSPIVSMTKIQRTPLPERKALPVRWITWMTYLEDPRIQFHYDKSLPELQQIPNVTEDVIAKTKHPSEFAMVFYTDGSAIKHPDVNKSHSAGMGIAQVQFIPEYKIVHQWSIPLGDHTAQLAEIAAVEFACKKALKISGPVLIVTDSFYVAESANKELPYWKSNGFLNNKKKPLRHVSKWKSIAECLQLKPDIIIMHEKGHQQPMTTLHTEGNNLADKLATQGSYVVHAGKRTADGSEFEKRTADGSEFESPKKKAKVE

SEQ ID NO: 446 - protein, 2082 aa, synthetic construct
MPAAKRVKLDGGDKKYSIGLDIGTNSVGWAVITDEYKVPSKKFKVLGNTDRHSIKKNLIGALLFDSGETAEATRLKRTARRRYTRRKNRICYLQEIFSNEMAKVDDSFFHRLEESFLVEEDKKHERHPIFGNIVDEVAYHEKYPTIYHLRKKLVDSTDKADLRLIYLALAHMIKFRGHFLIEGDLNPDNSDVDKLFIQLVQTYNQLFEENPINASGVDAKAILSARLSKSRRLENLIAQLPGEKKNGLFGNLIALSLGLTPNFKSNFDLAEDAKLQLSKDTYDDDLDNLLAQIGDQYADLFLAAKNLSDAILLSDILRVNTEITKAPLSASMIKRYDEHHQDLTLLKALVRQQLPEKYKEIFFDQSKNGYAGYIDGGASQEEFYKFIKPILEKMDGTEELLVKLNREDLLRKQRTFDNGSIPHQIHLGELHAILRRQEDFYPFLKDNREKIEKILTFRIPYYVGPLARGNSRFAWMTRKSEETITPWNFEEVVDKGASAQSFIERMTNFDKNLPNEKVLPKHSLLYEYFTVYNELTKVKYVTEGMRKPAFLSGEQKKAIVDLLFKTNRKVTVKQLKEDYFKKIECFDSVEISGVEDRFNASLGTYHDLLKIIKDKDFLDNEENEDILEDIVLTLTLFEDREMIEERLKTYAHLFDDKVMKQLKRRRYTGWGRLSRKLINGIRDKQSGKTILDFLKSDGFANRNFMQLIHDDSLTFKEDIQKAQVSGQGDSLHEHIANLAGSPAIKKGILQTVKVVDELVKVMGRHKPENIVIEMARENQTTQKGQKNSRERMKRIEEGIKELGSQILKEHPVENTQLQNEKLYLYYLQNGRDMYVDQELDINRLSDYDVDHIVPQSFLKDDSIDNKVLTRSDKARGKSDNVPSEEVVKKMKNYWRQLLNAKLITQRKFDNLTKAERGGLSELDKAGFIKRQLVETRQITKHVAQILDSRMNTKYDENDKLIREVKVITLKSKLVSDFRKDFQFYKVREINNYHHAHDAYLNAVVGTALIKKYPKLESEFVYGDYKVYDVRKMIAKSEQEIGKATAKYFFYSNIMNFFKTEITLANGEIRKRPLIETNGETGEIVWDKGRDFATVRKVLSMPQVNIVKKTEVQTGGFSKESILPKRNSDKLIARKKDWDPKKYGGFDSPTVAYSVLVVAKVEKGKSKKLKSVKELLGITIMERSSFEKNPIDFLEAKGYKEVKKDLIIKLPKYSLFELENGRKRMLASAGELQKGNELALPSKYVNFLYLASHYEKLKGSPEDNEQKQLFVEQHKHYLDEIIEQISEFSKRVILADANLDKVLSAYNKHRDKPIREQAENIIHLFTLTNLGAPAAFKYFDTTIDRKRYTSTKEVLDATLIHQSITGLYETRIDLSQLGGDGGGGGGSSGGVPWLMKKPLQLTVLVPLHEYQERLLQQTALPKEQKELLQKLFLKYDALWQHWENQVGHRRIKPHNIATGTLAPRPQKQYPINPKAKPSIQIVIDDLLKQGVLIQQNSTMNTPVYPVPKPDGKWRMVLDYREVNKTIPLIAAQNQHSAGILSSIYRGKYKTTLDLTNGFWAHPITPESYWLTAFTWQGKQYCWTRLPQGFLNSPALFNADVVDLLKEIPNVQAYVDDIYISHDDPQEHLEQLEKIFSILLNAGYVVSLKKSEIAQREVEFLGFNITKEGRGLTDTFKQKLLNITPPKDLKQLQSILGKLNFARNFIPNYSELVKPLYTIVAPANGKFISWTEDNSNQLQHIISVLNQADNLEERNPETRLIIKVNSSPSAGYIRYYNEGSKRPIMYVNYIFSKAEAKFTQTEKLLTTMHKGLIKAMDLAMGQEILVYSPIVSMTKIQRTPLPERKALPVRWITWMTYLEDPRIQFHYDKSLPELQQIPNVTEDVIAKTKHPSEFAMVFYTDGSAIKHPDVNKSHSAGMGIAQVQFIPEYKIVHQWSIPLGDHTAQLAEIAAVEFACKKALKISGPVLIVTDSFYVAESANKELPYWKSNGFLNNKKKPLRHVSKWKSIAECLQLKPDIIIMHEKGHQQPMTTLHTEGNNLADKLATQGSYVVHAGKRTADGSEFEKRTADGSEFESPKKKAKVE

SEQ ID NO: 447 - protein, 2101 aa, synthetic construct
MPAAKRVKLDGGDKKYSIGLDIGTNSVGWAVITDEYKVPSKKFKVLGNTDRHSIKKNLIGALLFDSGETAEATRLKRTARRRYTRRKNRICYLQEIFSNEMAKVDDSFFHRLEESFLVEEDKKHERHPIFGNIVDEVAYHEKYPTIYHLRKKLVDSTDKADLRLIYLALAHMIKFRGHFLIEGDLNPDNSDVDKLFIQLVQTYNQLFEENPINASGVDAKAILSARLSKSRRLENLIAQLPGEKKNGLFGNLIALSLGLTPNFKSNFDLAEDAKLQLSKDTYDDDLDNLLAQIGDQYADLFLAAKNLSDAILLSDILRVNTEITKAPLSASMIKRYDEHHQDLTLLKALVRQQLPEKYKEIFFDQSKNGYAGYIDGGASQEEFYKFIKPILEKMDGTEELLVKLNREDLLRKQRTFDNGSIPHQIHLGELHAILRRQEDFYPFLKDNREKIEKILTFRIPYYVGPLARGNSRFAWMTRKSEETITPWNFEEVVDKGASAQSFIERMTNFDKNLPNEKVLPKHSLLYEYFTVYNELTKVKYVTEGMRKPAFLSGEQKKAIVDLLFKTNRKVTVKQLKEDYFKKIECFDSVEISGVEDRFNASLGTYHDLLKIIKDKDFLDNEENEDILEDIVLTLTLFEDREMIEERLKTYAHLFDDKVMKQLKRRRYTGWGRLSRKLINGIRDKQSGKTILDFLKSDGFANRNFMQLIHDDSLTFKEDIQKAQVSGQGDSLHEHIANLAGSPAIKKGILQTVKVVDELVKVMGRHKPENIVIEMARENQTTQKGQKNSRERMKRIEEGIKELGSQILKEHPVENTQLQNEKLYLYYLQNGRDMYVDQELDINRLSDYDVDHIVPQSFLKDDSIDNKVLTRSDKARGKSDNVPSEEVVKKMKNYWRQLLNAKLITQRKFDNLTKAERGGLSELDKAGFIKRQLVETRQITKHVAQILDSRMNTKYDENDKLIREVKVITLKSKLVSDFRKDFQFYKVREINNYHHAHDAYLNAVVGTALIKKYPKLESEFVYGDYKVYDVRKMIAKSEQEIGKATAKYFFYSNIMNFFKTEITLANGEIRKRPLIETNGETGEIVWDKGRDFATVRKVLSMPQVNIVKKTEVQTGGFSKESILPKRNSDKLIARKKDWDPKKYGGFDSPTVAYSVLVVAKVEKGKSKKLKSVKELLGITIMERSSFEKNPIDFLEAKGYKEVKKDLIIKLPKYSLFELENGRKRMLASAGELQKGNELALPSKYVNFLYLASHYEKLKGSPEDNEQKQLFVEQHKHYLDEIIEQISEFSKRVILADANLDKVLSAYNKHRDKPIREQAENIIHLFTLTNLGAPAAFKYFDTTIDRKRYTSTKEVLDATLIHQSITGLYETRIDLSQLGGDGGEAAAKEAAAKEAAAKEAAAKEAAAKGGVPWLMKKPLQLTVLVPLHEYQERLLQQTALPKEQKELLQKLFLKYDALWQHWENQVGHRRIKPHNIATGTLAPRPQKQYPINPKAKPSIQIVIDDLLKQGVLIQQNSTMNTPVYPVPKPDGKWRMVLDYREVNKTIPLIAAQNQHSAGILSSIYRGKYKTTLDLTNGFWAHPITPESYWLTAFTWQGKQYCWTRLPQGFLNSPALFNADVVDLLKEIPNVQAYVDDIYISHDDPQEHLEQLEKIFSILLNAGYVVSLKKSEIAQREVEFLGFNITKEGRGLTDTFKQKLLNITPPKDLKQLQSILGKLNFARNFIPNYSELVKPLYTIVAPANGKFISWTEDNSNQLQHIISVLNQADNLEERNPETRLIIKVNSSPSAGYIRYYNEGSKRPIMYVNYIFSKAEAKFTQTEKLLTTMHKGLIKAMDLAMGQEILVYSPIVSMTKIQRTPLPERKALPVRWITWMTYLEDPRIQFHYDKSLPELQQIPNVTEDVIAKTKHPSEFAMVFYTDGSAIKHPDVNKSHSAGMGIAQVQFIPEYKIVHQWSIPLGDHTAQLAEIAAVEFACKKALKISGPVLIVTDSFYVAESANKELPYWKSNGFLNNKKKPLRHVSKWKSIAECLQLKPDIIIMHEKGHQQPMTTLHTEGNNLADKLATQGSYVVHAGKRTADGSEFEKRTADGSEFESPKKKAKVE

SEQ ID NO: 448 - protein, 2085 aa, synthetic construct
MPAAKRVKLDGGDKKYSIGLDIGTNSVGWAVITDEYKVPSKKFKVLGNTDRHSIKKNLIGALLFDSGETAEATRLKRTARRRYTRRKNRICYLQEIFSNEMAKVDDSFFHRLEESFLVEEDKKHERHPIFGNIVDEVAYHEKYPTIYHLRKKLVDSTDKADLRLIYLALAHMIKFRGHFLIEGDLNPDNSDVDKLFIQLVQTYNQLFEENPINASGVDAKAILSARLSKSRRLENLIAQLPGEKKNGLFGNLIALSLGLTPNFKSNFDLAEDAKLQLSKDTYDDDLDNLLAQIGDQYADLFLAAKNLSDAILLSDILRVNTEITKAPLSASMIKRYDEHHQDLTLLKALVRQQLPEKYKEIFFDQSKNGYAGYIDGGASQEEFYKFIKPILEKMDGTEELLVKLNREDLLRKQRTFDNGSIPHQIHLGELHAILRRQEDFYPFLKDNREKIEKILTFRIPYYVGPLARGNSRFAWMTRKSEETITPWNFEEVVDKGASAQSFIERMTNFDKNLPNEKVLPKHSLLYEYFTVYNELTKVKYVTEGMRKPAFLSGEQKKAIVDLLFKTNRKVTVKQLKEDYFKKIECFDSVEISGVEDRFNASLGTYHDLLKIIKDKDFLDNEENEDILEDIVLTLTLFEDREMIEERLKTYAHLFDDKVMKQLKRRRYTGWGRLSRKLINGIRDKQSGKTILDFLKSDGFANRNFMQLIHDDSLTFKEDIQKAQVSGQGDSLHEHIANLAGSPAIKKGILQTVKVVDELVKVMGRHKPENIVIEMARENQTTQKGQKNSRERMKRIEEGIKELGSQILKEHPVENTQLQNEKLYLYYLQNGRDMYVDQELDINRLSDYDVDHIVPQSFLKDDSIDNKVLTRSDKARGKSDNVPSEEVVKKMKNYWRQLLNAKLITQRKFDNLTKAERGGLSELDKAGFIKRQLVETRQITKHVAQILDSRMNTKYDENDKLIREVKVITLKSKLVSDFRKDFQFYKVREINNYHHAHDAYLNAVVGTALIKKYPKLESEFVYGDYKVYDVRKMIAKSEQEIGKATAKYFFYSNIMNFFKTEITLANGEIRKRPLIETNGETGEIVWDKGRDFATVRKVLSMPQVNIVKKTEVQTGGFSKESILPKRNSDKLIARKKDWDPKKYGGFDSPTVAYSVLVVAKVEKGKSKKLKSVKELLGITIMERSSFEKNPIDFLEAKGYKEVKKDLIIKLPKYSLFELENGRKRMLASAGELQKGNELALPSKYVNFLYLASHYEKLKGSPEDNEQKQLFVEQHKHYLDEIIEQISEFSKRVILADANLDKVLSAYNKHRDKPIREQAENIIHLFTLTNLGAPAAFKYFDTTIDRKRYTSTKEVLDATLIHQSITGLYETRIDLSQLGGDGGGGGPAPGGSGGVPWLMKKPLQLTVLVPLHEYQERLLQQTALPKEQKELLQKLFLKYDALWQHWENQVGHRRIKPHNIATGTLAPRPQKQYPINPKAKPSIQIVIDDLLKQGVLIQQNSTMNTPVYPVPKPDGKWRMVLDYREVNKTIPLIAAQNQHSAGILSSIYRGKYKTTLDLTNGFWAHPITPESYWLTAFTWQGKQYCWTRLPQGFLNSPALFNADVVDLLKEIPNVQAYVDDIYISHDDPQEHLEQLEKIFSILLNAGYVVSLKKSEIAQREVEFLGFNITKEGRGLTDTFKQKLLNITPPKDLKQLQSILGKLNFARNFIPNYSELVKPLYTIVAPANGKFISWTEDNSNQLQHIISVLNQADNLEERNPETRLIIKVNSSPSAGYIRYYNEGSKRPIMYVNYIFSKAEAKFTQTEKLLTTMHKGLIKAMDLAMGQEILVYSPIVSMTKIQRTPLPERKALPVRWITWMTYLEDPRIQFHYDKSLPELQQIPNVTEDVIAKTKHPSEFAMVFYTDGSAIKHPDVNKSHSAGMGIAQVQFIPEYKIVHQWSIPLGDHTAQLAEIAAVEFACKKALKISGPVLIVTDSFYVAESANKELPYWKSNGFLNNKKKPLRHVSKWKSIAECLQLKPDIIIMHEKGHQQPMTTLHTEGNNLADKLATQGSYVVHAGKRTADGSEFEKRTADGSEFESPKKKAKVE

SEQ ID NO: 449 - protein, 2088 aa, synthetic construct
MPAAKRVKLDGGDKKYSIGLDIGTNSVGWAVITDEYKVPSKKFKVLGNTDRHSIKKNLIGALLFDSGETAEATRLKRTARRRYTRRKNRICYLQEIFSNEMAKVDDSFFHRLEESFLVEEDKKHERHPIFGNIVDEVAYHEKYPTIYHLRKKLVDSTDKADLRLIYLALAHMIKFRGHFLIEGDLNPDNSDVDKLFIQLVQTYNQLFEENPINASGVDAKAILSARLSKSRRLENLIAQLPGEKKNGLFGNLIALSLGLTPNFKSNFDLAEDAKLQLSKDTYDDDLDNLLAQIGDQYADLFLAAKNLSDAILLSDILRVNTEITKAPLSASMIKRYDEHHQDLTLLKALVRQQLPEKYKEIFFDQSKNGYAGYIDGGASQEEFYKFIKPILEKMDGTEELLVKLNREDLLRKQRTFDNGSIPHQIHLGELHAILRRQEDFYPFLKDNREKIEKILTFRIPYYVGPLARGNSRFAWMTRKSEETITPWNFEEVVDKGASAQSFIERMTNFDKNLPNEKVLPKHSLLYEYFTVYNELTKVKYVTEGMRKPAFLSGEQKKAIVDLLFKTNRKVTVKQLKEDYFKKIECFDSVEISGVEDRFNASLGTYHDLLKIIKDKDFLDNEENEDILEDIVLTLTLFEDREMIEERLKTYAHLFDDKVMKQLKRRRYTGWGRLSRKLINGIRDKQSGKTILDFLKSDGFANRNFMQLIHDDSLTFKEDIQKAQVSGQGDSLHEHIANLAGSPAIKKGILQTVKVVDELVKVMGRHKPENIVIEMARENQTTQKGQKNSRERMKRIEEGIKELGSQILKEHPVENTQLQNEKLYLYYLQNGRDMYVDQELDINRLSDYDVDHIVPQSFLKDDSIDNKVLTRSDKARGKSDNVPSEEVVKKMKNYWRQLLNAKLITQRKFDNLTKAERGGLSELDKAGFIKRQLVETRQITKHVAQILDSRMNTKYDENDKLIREVKVITLKSKLVSDFRKDFQFYKVREINNYHHAHDAYLNAVVGTALIKKYPKLESEFVYGDYKVYDVRKMIAKSEQEIGKATAKYFFYSNIMNFFKTEITLANGEIRKRPLIETNGETGEIVWDKGRDFATVRKVLSMPQVNIVKKTEVQTGGFSKESILPKRNSDKLIARKKDWDPKKYGGFDSPTVAYSVLVVAKVEKGKSKKLKSVKELLGITIMERSSFEKNPIDFLEAKGYKEVKKDLIIKLPKYSLFELENGRKRMLASAGELQKGNELALPSKYVNFLYLASHYEKLKGSPEDNEQKQLFVEQHKHYLDEIIEQISEFSKRVILADANLDKVLSAYNKHRDKPIREQAENIIHLFTLTNLGAPAAFKYFDTTIDRKRYTSTKEVLDATLIHQSITGLYETRIDLSQLGGDGGGSSGSSGSSGSSGGVPWLMKKPLQLTVLVPLHEYQERLLQQTALPKEQKELLQKLFLKYDALWQHWENQVGHRRIKPHNIATGTLAPRPQKQYPINPKAKPSIQIVIDDLLKQGVLIQQNSTMNTPVYPVPKPDGKWRMVLDYREVNKTIPLIAAQNQHSAGILSSIYRGKYKTTLDLTNGFWAHPITPESYWLTAFTWQGKQYCWTRLPQGFLNSPALFNADVVDLLKEIPNVQAYVDDIYISHDDPQEHLEQLEKIFSILLNAGYVVSLKKSEIAQREVEFLGFNITKEGRGLTDTFKQKLLNITPPKDLKQLQSILGKLNFARNFIPNYSELVKPLYTIVAPANGKFISWTEDNSNQLQHIISVLNQADNLEERNPETRLIIKVNSSPSAGYIRYYNEGSKRPIMYVNYIFSKAEAKFTQTEKLLTTMHKGLIKAMDLAMGQEILVYSPIVSMTKIQRTPLPERKALPVRWITWMTYLEDPRIQFHYDKSLPELQQIPNVTEDVIAKTKHPSEFAMVFYTDGSAIKHPDVNKSHSAGMGIAQVQFIPEYKIVHQWSIPLGDHTAQLAEIAAVEFACKKALKISGPVLIVTDSFYVAESANKELPYWKSNGFLNNKKKPLRHVSKWKSIAECLQLKPDIIIMHEKGHQQPMTTLHTEGNNLADKLATQGSYVVHAGKRTADGSEFEKRTADGSEFESPKKKAKVE

SEQ ID NO: 450 - protein, 2094 aa, synthetic construct
MPAAKRVKLDGGDKKYSIGLDIGTNSVGWAVITDEYKVPSKKFKVLGNTDRHSIKKNLIGALLFDSGETAEATRLKRTARRRYTRRKNRICYLQEIFSNEMAKVDDSFFHRLEESFLVEEDKKHERHPIFGNIVDEVAYHEKYPTIYHLRKKLVDSTDKADLRLIYLALAHMIKFRGHFLIEGDLNPDNSDVDKLFIQLVQTYNQLFEENPINASGVDAKAILSARLSKSRRLENLIAQLPGEKKNGLFGNLIALSLGLTPNFKSNFDLAEDAKLQLSKDTYDDDLDNLLAQIGDQYADLFLAAKNLSDAILLSDILRVNTEITKAPLSASMIKRYDEHHQDLTLLKALVRQQLPEKYKEIFFDQSKNGYAGYIDGGASQEEFYKFIKPILEKMDGTEELLVKLNREDLLRKQRTFDNGSIPHQIHLGELHAILRRQEDFYPFLKDNREKIEKILTFRIPYYVGPLARGNSRFAWMTRKSEETITPWNFEEVVDKGASAQSFIERMTNFDKNLPNEKVLPKHSLLYEYFTVYNELTKVKYVTEGMRKPAFLSGEQKKAIVDLLFKTNRKVTVKQLKEDYFKKIECFDSVEISGVEDRFNASLGTYHDLLKIIKDKDFLDNEENEDILEDIVLTLTLFEDREMIEERLKTYAHLFDDKVMKQLKRRRYTGWGRLSRKLINGIRDKQSGKTILDFLKSDGFANRNFMQLIHDDSLTFKEDIQKAQVSGQGDSLHEHIANLAGSPAIKKGILQTVKVVDELVKVMGRHKPENIVIEMARENQTTQKGQKNSRERMKRIEEGIKELGSQILKEHPVENTQLQNEKLYLYYLQNGRDMYVDQELDINRLSDYDVDHIVPQSFLKDDSIDNKVLTRSDKARGKSDNVPSEEVVKKMKNYWRQLLNAKLITQRKFDNLTKAERGGLSELDKAGFIKRQLVETRQITKHVAQILDSRMNTKYDENDKLIREVKVITLKSKLVSDFRKDFQFYKVREINNYHHAHDAYLNAVVGTALIKKYPKLESEFVYGDYKVYDVRKMIAKSEQEIGKATAKYFFYSNIMNFFKTEITLANGEIRKRPLIETNGETGEIVWDKGRDFATVRKVLSMPQVNIVKKTEVQTGGFSKESILPKRNSDKLIARKKDWDPKKYGGFDSPTVAYSVLVVAKVEKGKSKKLKSVKELLGITIMERSSFEKNPIDFLEAKGYKEVKKDLIIKLPKYSLFELENGRKRMLASAGELQKGNELALPSKYVNFLYLASHYEKLKGSPEDNEQKQLFVEQHKHYLDEIIEQISEFSKRVILADANLDKVLSAYNKHRDKPIREQAENIIHLFTLTNLGAPAAFKYFDTTIDRKRYTSTKEVLDATLIHQSITGLYETRIDLSQLGGDGGGSSGSSGSSGSSGSSGSSGGVPWLMKKPLQLTVLVPLHEYQERLLQQTALPKEQKELLQKLFLKYDALWQHWENQVGHRRIKPHNIATGTLAPRPQKQYPINPKAKPSIQIVIDDLLKQGVLIQQNSTMNTPVYPVPKPDGKWRMVLDYREVNKTIPLIAAQNQHSAGILSSIYRGKYKTTLDLTNGFWAHPITPESYWLTAFTWQGKQYCWTRLPQGFLNSPALFNADVVDLLKEIPNVQAYVDDIYISHDDPQEHLEQLEKIFSILLNAGYVVSLKKSEIAQREVEFLGFNITKEGRGLTDTFKQKLLNITPPKDLKQLQSILGKLNFARNFIPNYSELVKPLYTIVAPANGKFISWTEDNSNQLQHIISVLNQADNLEERNPETRLIIKVNSSPSAGYIRYYNEGSKRPIMYVNYIFSKAEAKFTQTEKLLTTMHKGLIKAMDLAMGQEILVYSPIVSMTKIQRTPLPERKALPVRWITWMTYLEDPRIQFHYDKSLPELQQIPNVTEDVIAKTKHPSEFAMVFYTDGSAIKHPDVNKSHSAGMGIAQVQFIPEYKIVHQWSIPLGDHTAQLAEIAAVEFACKKALKISGPVLIVTDSFYVAESANKELPYWKSNGFLNNKKKPLRHVSKWKSIAECLQLKPDIIIMHEKGHQQPMTTLHTEGNNLADKLATQGSYVVHAGKRTADGSEFEKRTADGSEFESPKKKAKVE

SEQ ID NO: 451 - protein, 2087 aa, synthetic construct
MPAAKRVKLDGGDKKYSIGLDIGTNSVGWAVITDEYKVPSKKFKVLGNTDRHSIKKNLIGALLFDSGETAEATRLKRTARRRYTRRKNRICYLQEIFSNEMAKVDDSFFHRLEESFLVEEDKKHERHPIFGNIVDEVAYHEKYPTIYHLRKKLVDSTDKADLRLIYLALAHMIKFRGHFLIEGDLNPDNSDVDKLFIQLVQTYNQLFEENPINASGVDAKAILSARLSKSRRLENLIAQLPGEKKNGLFGNLIALSLGLTPNFKSNFDLAEDAKLQLSKDTYDDDLDNLLAQIGDQYADLFLAAKNLSDAILLSDILRVNTEITKAPLSASMIKRYDEHHQDLTLLKALVRQQLPEKYKEIFFDQSKNGYAGYIDGGASQEEFYKFIKPILEKMDGTEELLVKLNREDLLRKQRTFDNGSIPHQIHLGELHAILRRQEDFYPFLKDNREKIEKILTFRIPYYVGPLARGNSRFAWMTRKSEETITPWNFEEVVDKGASAQSFIERMTNFDKNLPNEKVLPKHSLLYEYFTVYNELTKVKYVTEGMRKPAFLSGEQKKAIVDLLFKTNRKVTVKQLKEDYFKKIECFDSVEISGVEDRFNASLGTYHDLLKIIKDKDFLDNEENEDILEDIVLTLTLFEDREMIEERLKTYAHLFDDKVMKQLKRRRYTGWGRLSRKLINGIRDKQSGKTILDFLKSDGFANRNFMQLIHDDSLTFKEDIQKAQVSGQGDSLHEHIANLAGSPAIKKGILQTVKVVDELVKVMGRHKPENIVIEMARENQTTQKGQKNSRERMKRIEEGIKELGSQILKEHPVENTQLQNEKLYLYYLQNGRDMYVDQELDINRLSDYDVDHIVPQSFLKDDSIDNKVLTRSDKARGKSDNVPSEEVVKKMKNYWRQLLNAKLITQRKFDNLTKAERGGLSELDKAGFIKRQLVETRQITKHVAQILDSRMNTKYDENDKLIREVKVITLKSKLVSDFRKDFQFYKVREINNYHHAHDAYLNAVVGTALIKKYPKLESEFVYGDYKVYDVRKMIAKSEQEIGKATAKYFFYSNIMNFFKTEITLANGEIRKRPLIETNGETGEIVWDKGRDFATVRKVLSMPQVNIVKKTEVQTGGFSKESILPKRNSDKLIARKKDWDPKKYGGFDSPTVAYSVLVVAKVEKGKSKKLKSVKELLGITIMERSSFEKNPIDFLEAKGYKEVKKDLIIKLPKYSLFELENGRKRMLASAGELQKGNELALPSKYVNFLYLASHYEKLKGSPEDNEQKQLFVEQHKHYLDEIIEQISEFSKRVILADANLDKVLSAYNKHRDKPIREQAENIIHLFTLTNLGAPAAFKYFDTTIDRKRYTSTKEVLDATLIHQSITGLYETRIDLSQLGGDGGPAPGGGEAAAKGGVPWLMKKPLQLTVLVPLHEYQERLLQQTALPKEQKELLQKLFLKYDALWQHWENQVGHRRIKPHNIATGTLAPRPQKQYPINPKAKPSIQIVIDDLLKQGVLIQQNSTMNTPVYPVPKPDGKWRMVLDYREVNKTIPLIAAQNQHSAGILSSIYRGKYKTTLDLTNGFWAHPITPESYWLTAFTWQGKQYCWTRLPQGFLNSPALFNADVVDLLKEIPNVQAYVDDIYISHDDPQEHLEQLEKIFSILLNAGYVVSLKKSEIAQREVEFLGFNITKEGRGLTDTFKQKLLNITPPKDLKQLQSILGKLNFARNFIPNYSELVKPLYTIVAPANGKFISWTEDNSNQLQHIISVLNQADNLEERNPETRLIIKVNSSPSAGYIRYYNEGSKRPIMYVNYIFSKAEAKFTQTEKLLTTMHKGLIKAMDLAMGQEILVYSPIVSMTKIQRTPLPERKALPVRWITWMTYLEDPRIQFHYDKSLPELQQIPNVTEDVIAKTKHPSEFAMVFYTDGSAIKHPDVNKSHSAGMGIAQVQFIPEYKIVHQWSIPLGDHTAQLAEIAAVEFACKKALKISGPVLIVTDSFYVAESANKELPYWKSNGFLNNKKKPLRHVSKWKSIAECLQLKPDIIIMHEKGHQQPMTTLHTEGNNLADKLATQGSYVVHAGKRTADGSEFEKRTADGSEFESPKKKAKVE

SEQ ID NO: 452 - protein, 2081 aa, synthetic construct
MPAAKRVKLDGGDKKYSIGLDIGTNSVGWAVITDEYKVPSKKFKVLGNTDRHSIKKNLIGALLFDSGETAEATRLKRTARRRYTRRKNRICYLQEIFSNEMAKVDDSFFHRLEESFLVEEDKKHERHPIFGNIVDEVAYHEKYPTIYHLRKKLVDSTDKADLRLIYLALAHMIKFRGHFLIEGDLNPDNSDVDKLFIQLVQTYNQLFEENPINASGVDAKAILSARLSKSRRLENLIAQLPGEKKNGLFGNLIALSLGLTPNFKSNFDLAEDAKLQLSKDTYDDDLDNLLAQIGDQYADLFLAAKNLSDAILLSDILRVNTEITKAPLSASMIKRYDEHHQDLTLLKALVRQQLPEKYKEIFFDQSKNGYAGYIDGGASQEEFYKFIKPILEKMDGTEELLVKLNREDLLRKQRTFDNGSIPHQIHLGELHAILRRQEDFYPFLKDNREKIEKILTFRIPYYVGPLARGNSRFAWMTRKSEETITPWNFEEVVDKGASAQSFIERMTNFDKNLPNEKVLPKHSLLYEYFTVYNELTKVKYVTEGMRKPAFLSGEQKKAIVDLLFKTNRKVTVKQLKEDYFKKIECFDSVEISGVEDRFNASLGTYHDLLKIIKDKDFLDNEENEDILEDIVLTLTLFEDREMIEERLKTYAHLFDDKVMKQLKRRRYTGWGRLSRKLINGIRDKQSGKTILDFLKSDGFANRNFMQLIHDDSLTFKEDIQKAQVSGQGDSLHEHIANLAGSPAIKKGILQTVKVVDELVKVMGRHKPENIVIEMARENQTTQKGQKNSRERMKRIEEGIKELGSQILKEHPVENTQLQNEKLYLYYLQNGRDMYVDQELDINRLSDYDVDHIVPQSFLKDDSIDNKVLTRSDKARGKSDNVPSEEVVKKMKNYWRQLLNAKLITQRKFDNLTKAERGGLSELDKAGFIKRQLVETRQITKHVAQILDSRMNTKYDENDKLIREVKVITLKSKLVSDFRKDFQFYKVREINNYHHAHDAYLNAVVGTALIKKYPKLESEFVYGDYKVYDVRKMIAKSEQEIGKATAKYFFYSNIMNFFKTEITLANGEIRKRPLIETNGETGEIVWDKGRDFATVRKVLSMPQVNIVKKTEVQTGGFSKESILPKRNSDKLIARKKDWDPKKYGGFDSPTVAYSVLVVAKVEKGKSKKLKSVKELLGITIMERSSFEKNPIDFLEAKGYKEVKKDLIIKLPKYSLFELENGRKRMLASAGELQKGNELALPSKYVNFLYLASHYEKLKGSPEDNEQKQLFVEQHKHYLDEIIEQISEFSKRVILADANLDKVLSAYNKHRDKPIREQAENIIHLFTLTNLGAPAAFKYFDTTIDRKRYTSTKEVLDATLIHQSITGLYETRIDLSQLGGDGGGGGGSGGVPWLMKKPLQLTVLVPLHEYQERLLQQTALPKEQKELLQKLFLKYDALWQHWENQVGHRRIKPHNIATGTLAPRPQKQYPINPKAKPSIQIVIDDLLKQGVLIQQNSTMNTPVYPVPKPDGKWRMVLDYREVNKTIPLIAAQNQHSAGILSSIYRGKYKTTLDLTNGFWAHPITPESYWLTAFTWQGKQYCWTRLPQGFLNSPALFNADVVDLLKEIPNVQAYVDDIYISHDDPQEHLEQLEKIFSILLNAGYVVSLKKSEIAQREVEFLGFNITKEGRGLTDTFKQKLLNITPPKDLKQLQSILGKLNFARNFIPNYSELVKPLYTIVAPANGKFISWTEDNSNQLQHIISVLNQADNLEERNPETRLIIKVNSSPSAGYIRYYNEGSKRPIMYVNYIFSKAEAKFTQTEKLLTTMHKGLIKAMDLAMGQEILVYSPIVSMTKIQRTPLPERKALPVRWITWMTYLEDPRIQFHYDKSLPELQQIPNVTEDVIAKTKHPSEFAMVFYTDGSAIKHPDVNKSHSAGMGIAQVQFIPEYKIVHQWSIPLGDHTAQLAEIAAVEFACKKALKISGPVLIVTDSFYVAESANKELPYWKSNGFLNNKKKPLRHVSKWKSIAECLQLKPDIIIMHEKGHQQPMTTLHTEGNNLADKLATQGSYVVHAGKRTADGSEFEKRTADGSEFESPKKKAKVE

SEQ ID NO: 453 - protein, 2084 aa, synthetic construct
MPAAKRVKLDGGDKKYSIGLDIGTNSVGWAVITDEYKVPSKKFKVLGNTDRHSIKKNLIGALLFDSGETAEATRLKRTARRRYTRRKNRICYLQEIFSNEMAKVDDSFFHRLEESFLVEEDKKHERHPIFGNIVDEVAYHEKYPTIYHLRKKLVDSTDKADLRLIYLALAHMIKFRGHFLIEGDLNPDNSDVDKLFIQLVQTYNQLFEENPINASGVDAKAILSARLSKSRRLENLIAQLPGEKKNGLFGNLIALSLGLTPNFKSNFDLAEDAKLQLSKDTYDDDLDNLLAQIGDQYADLFLAAKNLSDAILLSDILRVNTEITKAPLSASMIKRYDEHHQDLTLLKALVRQQLPEKYKEIFFDQSKNGYAGYIDGGASQEEFYKFIKPILEKMDGTEELLVKLNREDLLRKQRTFDNGSIPHQIHLGELHAILRRQEDFYPFLKDNREKIEKILTFRIPYYVGPLARGNSRFAWMTRKSEETITPWNFEEVVDKGASAQSFIERMTNFDKNLPNEKVLPKHSLLYEYFTVYNELTKVKYVTEGMRKPAFLSGEQKKAIVDLLFKTNRKVTVKQLKEDYFKKIECFDSVEISGVEDRFNASLGTYHDLLKIIKDKDFLDNEENEDILEDIVLTLTLFEDREMIEERLKTYAHLFDDKVMKQLKRRRYTGWGRLSRKLINGIRDKQSGKTILDFLKSDGFANRNFMQLIHDDSLTFKEDIQKAQVSGQGDSLHEHIANLAGSPAIKKGILQTVKVVDELVKVMGRHKPENIVIEMARENQTTQKGQKNSRERMKRIEEGIKELGSQILKEHPVENTQLQNEKLYLYYLQNGRDMYVDQELDINRLSDYDVDHIVPQSFLKDDSIDNKVLTRSDKARGKSDNVPSEEVVKKMKNYWRQLLNAKLITQRKFDNLTKAERGGLSELDKAGFIKRQLVETRQITKHVAQILDSRMNTKYDENDKLIREVKVITLKSKLVSDFRKDFQFYKVREINNYHHAHDAYLNAVVGTALIKKYPKLESEFVYGDYKVYDVRKMIAKSEQEIGKATAKYFFYSNIMNFFKTEITLANGEIRKRPLIETNGETGEIVWDKGRDFATVRKVLSMPQVNIVKKTEVQTGGFSKESILPKRNSDKLIARKKDWDPKKYGGFDSPTVAYSVLVVAKVEKGKSKKLKSVKELLGITIMERSSFEKNPIDFLEAKGYKEVKKDLIIKLPKYSLFELENGRKRMLASAGELQKGNELALPSKYVNFLYLASHYEKLKGSPEDNEQKQLFVEQHKHYLDEIIEQISEFSKRVILADANLDKVLSAYNKHRDKPIREQAENIIHLFTLTNLGAPAAFKYFDTTIDRKRYTSTKEVLDATLIHQSITGLYETRIDLSQLGGDGGEAAAKPAPGGVPWLMKKPLQLTVLVPLHEYQERLLQQTALPKEQKELLQKLFLKYDALWQHWENQVGHRRIKPHNIATGTLAPRPQKQYPINPKAKPSIQIVIDDLLKQGVLIQQNSTMNTPVYPVPKPDGKWRMVLDYREVNKTIPLIAAQNQHSAGILSSIYRGKYKTTLDLTNGFWAHPITPESYWLTAFTWQGKQYCWTRLPQGFLNSPALFNADVVDLLKEIPNVQAYVDDIYISHDDPQEHLEQLEKIFSILLNAGYVVSLKKSEIAQREVEFLGFNITKEGRGLTDTFKQKLLNITPPKDLKQLQSILGKLNFARNFIPNYSELVKPLYTIVAPANGKFISWTEDNSNQLQHIISVLNQADNLEERNPETRLIIKVNSSPSAGYIRYYNEGSKRPIMYVNYIFSKAEAKFTQTEKLLTTMHKGLIKAMDLAMGQEILVYSPIVSMTKIQRTPLPERKALPVRWITWMTYLEDPRIQFHYDKSLPELQQIPNVTEDVIAKTKHPSEFAMVFYTDGSAIKHPDVNKSHSAGMGIAQVQFIPEYKIVHQWSIPLGDHTAQLAEIAAVEFACKKALKISGPVLIVTDSFYVAESANKELPYWKSNGFLNNKKKPLRHVSKWKSIAECLQLKPDIIIMHEKGHQQPMTTLHTEGNNLADKLATQGSYVVHAGKRTADGSEFEKRTADGSEFESPKKKAKVE

SEQ ID NO: 454 - protein, 2085 aa, synthetic construct
MPAAKRVKLDGGDKKYSIGLDIGTNSVGWAVITDEYKVPSKKFKVLGNTDRHSIKKNLIGALLFDSGETAEATRLKRTARRRYTRRKNRICYLQEIFSNEMAKVDDSFFHRLEESFLVEEDKKHERHPIFGNIVDEVAYHEKYPTIYHLRKKLVDSTDKADLRLIYLALAHMIKFRGHFLIEGDLNPDNSDVDKLFIQLVQTYNQLFEENPINASGVDAKAILSARLSKSRRLENLIAQLPGEKKNGLFGNLIALSLGLTPNFKSNFDLAEDAKLQLSKDTYDDDLDNLLAQIGDQYADLFLAAKNLSDAILLSDILRVNTEITKAPLSASMIKRYDEHHQDLTLLKALVRQQLPEKYKEIFFDQSKNGYAGYIDGGASQEEFYKFIKPILEKMDGTEELLVKLNREDLLRKQRTFDNGSIPHQIHLGELHAILRRQEDFYPFLKDNREKIEKILTFRIPYYVGPLARGNSRFAWMTRKSEETITPWNFEEVVDKGASAQSFIERMTNFDKNLPNEKVLPKHSLLYEYFTVYNELTKVKYVTEGMRKPAFLSGEQKKAIVDLLFKTNRKVTVKQLKEDYFKKIECFDSVEISGVEDRFNASLGTYHDLLKIIKDKDFLDNEENEDILEDIVLTLTLFEDREMIEERLKTYAHLFDDKVMKQLKRRRYTGWGRLSRKLINGIRDKQSGKTILDFLKSDGFANRNFMQLIHDDSLTFKEDIQKAQVSGQGDSLHEHIANLAGSPAIKKGILQTVKVVDELVKVMGRHKPENIVIEMARENQTTQKGQKNSRERMKRIEEGIKELGSQILKEHPVENTQLQNEKLYLYYLQNGRDMYVDQELDINRLSDYDVDHIVPQSFLKDDSIDNKVLTRSDKARGKSDNVPSEEVVKKMKNYWRQLLNAKLITQRKFDNLTKAERGGLSELDKAGFIKRQLVETRQITKHVAQILDSRMNTKYDENDKLIREVKVITLKSKLVSDFRKDFQFYKVREINNYHHAHDAYLNAVVGTALIKKYPKLESEFVYGDYKVYDVRKMIAKSEQEIGKATAKYFFYSNIMNFFKTEITLANGEIRKRPLIETNGETGEIVWDKGRDFATVRKVLSMPQVNIVKKTEVQTGGFSKESILPKRNSDKLIARKKDWDPKKYGGFDSPTVAYSVLVVAKVEKGKSKKLKSVKELLGITIMERSSFEKNPIDFLEAKGYKEVKKDLIIKLPKYSLFELENGRKRMLASAGELQKGNELALPSKYVNFLYLASHYEKLKGSPEDNEQKQLFVEQHKHYLDEIIEQISEFSKRVILADANLDKVLSAYNKHRDKPIREQAENIIHLFTLTNLGAPAAFKYFDTTIDRKRYTSTKEVLDATLIHQSITGLYETRIDLSQLGGDGGGGGGSSGGSGGVPWLMKKPLQLTVLVPLHEYQERLLQQTALPKEQKELLQKLFLKYDALWQHWENQVGHRRIKPHNIATGTLAPRPQKQYPINPKAKPSIQIVIDDLLKQGVLIQQNSTMNTPVYPVPKPDGKWRMVLDYREVNKTIPLIAAQNQHSAGILSSIYRGKYKTTLDLTNGFWAHPITPESYWLTAFTWQGKQYCWTRLPQGFLNSPALFNADVVDLLKEIPNVQAYVDDIYISHDDPQEHLEQLEKIFSILLNAGYVVSLKKSEIAQREVEFLGFNITKEGRGLTDTFKQKLLNITPPKDLKQLQSILGKLNFARNFIPNYSELVKPLYTIVAPANGKFISWTEDNSNQLQHIISVLNQADNLEERNPETRLIIKVNSSPSAGYIRYYNEGSKRPIMYVNYIFSKAEAKFTQTEKLLTTMHKGLIKAMDLAMGQEILVYSPIVSMTKIQRTPLPERKALPVRWITWMTYLEDPRIQFHYDKSLPELQQIPNVTEDVIAKTKHPSEFAMVFYTDGSAIKHPDVNKSHSAGMGIAQVQFIPEYKIVHQWSIPLGDHTAQLAEIAAVEFACKKALKISGPVLIVTDSFYVAESANKELPYWKSNGFLNNKKKPLRHVSKWKSIAECLQLKPDIIIMHEKGHQQPMTTLHTEGNNLADKLATQGSYVVHAGKRTADGSEFEKRTADGSEFESPKKKAKVE

SEQ ID NO: 455 - protein, 2085 aa, synthetic construct
MPAAKRVKLDGGDKKYSIGLDIGTNSVGWAVITDEYKVPSKKFKVLGNTDRHSIKKNLIGALLFDSGETAEATRLKRTARRRYTRRKNRICYLQEIFSNEMAKVDDSFFHRLEESFLVEEDKKHERHPIFGNIVDEVAYHEKYPTIYHLRKKLVDSTDKADLRLIYLALAHMIKFRGHFLIEGDLNPDNSDVDKLFIQLVQTYNQLFEENPINASGVDAKAILSARLSKSRRLENLIAQLPGEKKNGLFGNLIALSLGLTPNFKSNFDLAEDAKLQLSKDTYDDDLDNLLAQIGDQYADLFLAAKNLSDAILLSDILRVNTEITKAPLSASMIKRYDEHHQDLTLLKALVRQQLPEKYKEIFFDQSKNGYAGYIDGGASQEEFYKFIKPILEKMDGTEELLVKLNREDLLRKQRTFDNGSIPHQIHLGELHAILRRQEDFYPFLKDNREKIEKILTFRIPYYVGPLARGNSRFAWMTRKSEETITPWNFEEVVDKGASAQSFIERMTNFDKNLPNEKVLPKHSLLYEYFTVYNELTKVKYVTEGMRKPAFLSGEQKKAIVDLLFKTNRKVTVKQLKEDYFKKIECFDSVEISGVEDRFNASLGTYHDLLKIIKDKDFLDNEENEDILEDIVLTLTLFEDREMIEERLKTYAHLFDDKVMKQLKRRRYTGWGRLSRKLINGIRDKQSGKTILDFLKSDGFANRNFMQLIHDDSLTFKEDIQKAQVSGQGDSLHEHIANLAGSPAIKKGILQTVKVVDELVKVMGRHKPENIVIEMARENQTTQKGQKNSRERMKRIEEGIKELGSQILKEHPVENTQLQNEKLYLYYLQNGRDMYVDQELDINRLSDYDVDHIVPQSFLKDDSIDNKVLTRSDKARGKSDNVPSEEVVKKMKNYWRQLLNAKLITQRKFDNLTKAERGGLSELDKAGFIKRQLVETRQITKHVAQILDSRMNTKYDENDKLIREVKVITLKSKLVSDFRKDFQFYKVREINNYHHAHDAYLNAVVGTALIKKYPKLESEFVYGDYKVYDVRKMIAKSEQEIGKATAKYFFYSNIMNFFKTEITLANGEIRKRPLIETNGETGEIVWDKGRDFATVRKVLSMPQVNIVKKTEVQTGGFSKESILPKRNSDKLIARKKDWDPKKYGGFDSPTVAYSVLVVAKVEKGKSKKLKSVKELLGITIMERSSFEKNPIDFLEAKGYKEVKKDLIIKLPKYSLFELENGRKRMLASAGELQKGNELALPSKYVNFLYLASHYEKLKGSPEDNEQKQLFVEQHKHYLDEIIEQISEFSKRVILADANLDKVLSAYNKHRDKPIREQAENIIHLFTLTNLGAPAAFKYFDTTIDRKRYTSTKEVLDATLIHQSITGLYETRIDLSQLGGDGGGSSPAPGGSGGVPWLMKKPLQLTVLVPLHEYQERLLQQTALPKEQKELLQKLFLKYDALWQHWENQVGHRRIKPHNIATGTLAPRPQKQYPINPKAKPSIQIVIDDLLKQGVLIQQNSTMNTPVYPVPKPDGKWRMVLDYREVNKTIPLIAAQNQHSAGILSSIYRGKYKTTLDLTNGFWAHPITPESYWLTAFTWQGKQYCWTRLPQGFLNSPALFNADVVDLLKEIPNVQAYVDDIYISHDDPQEHLEQLEKIFSILLNAGYVVSLKKSEIAQREVEFLGFNITKEGRGLTDTFKQKLLNITPPKDLKQLQSILGKLNFARNFIPNYSELVKPLYTIVAPANGKFISWTEDNSNQLQHIISVLNQADNLEERNPETRLIIKVNSSPSAGYIRYYNEGSKRPIMYVNYIFSKAEAKFTQTEKLLTTMHKGLIKAMDLAMGQEILVYSPIVSMTKIQRTPLPERKALPVRWITWMTYLEDPRIQFHYDKSLPELQQIPNVTEDVIAKTKHPSEFAMVFYTDGSAIKHPDVNKSHSAGMGIAQVQFIPEYKIVHQWSIPLGDHTAQLAEIAAVEFACKKALKISGPVLIVTDSFYVAESANKELPYWKSNGFLNNKKKPLRHVSKWKSIAECLQLKPDIIIMHEKGHQQPMTTLHTEGNNLADKLATQGSYVVHAGKRTADGSEFEKRTADGSEFESPKKKAKVE

SEQ ID NO: 456 - protein, 2085 aa, synthetic construct
MPAAKRVKLDGGDKKYSIGLDIGTNSVGWAVITDEYKVPSKKFKVLGNTDRHSIKKNLIGALLFDSGETAEATRLKRTARRRYTRRKNRICYLQEIFSNEMAKVDDSFFHRLEESFLVEEDKKHERHPIFGNIVDEVAYHEKYPTIYHLRKKLVDSTDKADLRLIYLALAHMIKFRGHFLIEGDLNPDNSDVDKLFIQLVQTYNQLFEENPINASGVDAKAILSARLSKSRRLENLIAQLPGEKKNGLFGNLIALSLGLTPNFKSNFDLAEDAKLQLSKDTYDDDLDNLLAQIGDQYADLFLAAKNLSDAILLSDILRVNTEITKAPLSASMIKRYDEHHQDLTLLKALVRQQLPEKYKEIFFDQSKNGYAGYIDGGASQEEFYKFIKPILEKMDGTEELLVKLNREDLLRKQRTFDNGSIPHQIHLGELHAILRRQEDFYPFLKDNREKIEKILTFRIPYYVGPLARGNSRFAWMTRKSEETITPWNFEEVVDKGASAQSFIERMTNFDKNLPNEKVLPKHSLLYEYFTVYNELTKVKYVTEGMRKPAFLSGEQKKAIVDLLFKTNRKVTVKQLKEDYFKKIECFDSVEISGVEDRFNASLGTYHDLLKIIKDKDFLDNEENEDILEDIVLTLTLFEDREMIEERLKTYAHLFDDKVMKQLKRRRYTGWGRLSRKLINGIRDKQSGKTILDFLKSDGFANRNFMQLIHDDSLTFKEDIQKAQVSGQGDSLHEHIANLAGSPAIKKGILQTVKVVDELVKVMGRHKPENIVIEMARENQTTQKGQKNSRERMKRIEEGIKELGSQILKEHPVENTQLQNEKLYLYYLQNGRDMYVDQELDINRLSDYDVDHIVPQSFLKDDSIDNKVLTRSDKARGKSDNVPSEEVVKKMKNYWRQLLNAKLITQRKFDNLTKAERGGLSELDKAGFIKRQLVETRQITKHVAQILDSRMNTKYDENDKLIREVKVITLKSKLVSDFRKDFQFYKVREINNYHHAHDAYLNAVVGTALIKKYPKLESEFVYGDYKVYDVRKMIAKSEQEIGKATAKYFFYSNIMNFFKTEITLANGEIRKRPLIETNGETGEIVWDKGRDFATVRKVLSMPQVNIVKKTEVQTGGFSKESILPKRNSDKLIARKKDWDPKKYGGFDSPTVAYSVLVVAKVEKGKSKKLKSVKELLGITIMERSSFEKNPIDFLEAKGYKEVKKDLIIKLPKYSLFELENGRKRMLASAGELQKGNELALPSKYVNFLYLASHYEKLKGSPEDNEQKQLFVEQHKHYLDEIIEQISEFSKRVILADANLDKVLSAYNKHRDKPIREQAENIIHLFTLTNLGAPAAFKYFDTTIDRKRYTSTKEVLDATLIHQSITGLYETRIDLSQLGGDGGPAPGSSGGGGGVPWLMKKPLQLTVLVPLHEYQERLLQQTALPKEQKELLQKLFLKYDALWQHWENQVGHRRIKPHNIATGTLAPRPQKQYPINPKAKPSIQIVIDDLLKQGVLIQQNSTMNTPVYPVPKPDGKWRMVLDYREVNKTIPLIAAQNQHSAGILSSIYRGKYKTTLDLTNGFWAHPITPESYWLTAFTWQGKQYCWTRLPQGFLNSPALFNADVVDLLKEIPNVQAYVDDIYISHDDPQEHLEQLEKIFSILLNAGYVVSLKKSEIAQREVEFLGFNITKEGRGLTDTFKQKLLNITPPKDLKQLQSILGKLNFARNFIPNYSELVKPLYTIVAPANGKFISWTEDNSNQLQHIISVLNQADNLEERNPETRLIIKVNSSPSAGYIRYYNEGSKRPIMYVNYIFSKAEAKFTQTEKLLTTMHKGLIKAMDLAMGQEILVYSPIVSMTKIQRTPLPERKALPVRWITWMTYLEDPRIQFHYDKSLPELQQIPNVTEDVIAKTKHPSEFAMVFYTDGSAIKHPDVNKSHSAGMGIAQVQFIPEYKIVHQWSIPLGDHTAQLAEIAAVEFACKKALKISGPVLIVTDSFYVAESANKELPYWKSNGFLNNKKKPLRHVSKWKSIAECLQLKPDIIIMHEKGHQQPMTTLHTEGNNLADKLATQGSYVVHAGKRTADGSEFEKRTADGSEFESPKKKAKVE

SEQ ID NO: 457 - protein, 2082 aa, synthetic construct
MPAAKRVKLDGGDKKYSIGLDIGTNSVGWAVITDEYKVPSKKFKVLGNTDRHSIKKNLIGALLFDSGETAEATRLKRTARRRYTRRKNRICYLQEIFSNEMAKVDDSFFHRLEESFLVEEDKKHERHPIFGNIVDEVAYHEKYPTIYHLRKKLVDSTDKADLRLIYLALAHMIKFRGHFLIEGDLNPDNSDVDKLFIQLVQTYNQLFEENPINASGVDAKAILSARLSKSRRLENLIAQLPGEKKNGLFGNLIALSLGLTPNFKSNFDLAEDAKLQLSKDTYDDDLDNLLAQIGDQYADLFLAAKNLSDAILLSDILRVNTEITKAPLSASMIKRYDEHHQDLTLLKALVRQQLPEKYKEIFFDQSKNGYAGYIDGGASQEEFYKFIKPILEKMDGTEELLVKLNREDLLRKQRTFDNGSIPHQIHLGELHAILRRQEDFYPFLKDNREKIEKILTFRIPYYVGPLARGNSRFAWMTRKSEETITPWNFEEVVDKGASAQSFIERMTNFDKNLPNEKVLPKHSLLYEYFTVYNELTKVKYVTEGMRKPAFLSGEQKKAIVDLLFKTNRKVTVKQLKEDYFKKIECFDSVEISGVEDRFNASLGTYHDLLKIIKDKDFLDNEENEDILEDIVLTLTLFEDREMIEERLKTYAHLFDDKVMKQLKRRRYTGWGRLSRKLINGIRDKQSGKTILDFLKSDGFANRNFMQLIHDDSLTFKEDIQKAQVSGQGDSLHEHIANLAGSPAIKKGILQTVKVVDELVKVMGRHKPENIVIEMARENQTTQKGQKNSRERMKRIEEGIKELGSQILKEHPVENTQLQNEKLYLYYLQNGRDMYVDQELDINRLSDYDVDHIVPQSFLKDDSIDNKVLTRSDKARGKSDNVPSEEVVKKMKNYWRQLLNAKLITQRKFDNLTKAERGGLSELDKAGFIKRQLVETRQITKHVAQILDSRMNTKYDENDKLIREVKVITLKSKLVSDFRKDFQFYKVREINNYHHAHDAYLNAVVGTALIKKYPKLESEFVYGDYKVYDVRKMIAKSEQEIGKATAKYFFYSNIMNFFKTEITLANGEIRKRPLIETNGETGEIVWDKGRDFATVRKVLSMPQVNIVKKTEVQTGGFSKESILPKRNSDKLIARKKDWDPKKYGGFDSPTVAYSVLVVAKVEKGKSKKLKSVKELLGITIMERSSFEKNPIDFLEAKGYKEVKKDLIIKLPKYSLFELENGRKRMLASAGELQKGNELALPSKYVNFLYLASHYEKLKGSPEDNEQKQLFVEQHKHYLDEIIEQISEFSKRVILADANLDKVLSAYNKHRDKPIREQAENIIHLFTLTNLGAPAAFKYFDTTIDRKRYTSTKEVLDATLIHQSITGLYETRIDLSQLGGDGGGGSGGSGGVPWLMKKPLQLTVLVPLHEYQERLLQQTALPKEQKELLQKLFLKYDALWQHWENQVGHRRIKPHNIATGTLAPRPQKQYPINPKAKPSIQIVIDDLLKQGVLIQQNSTMNTPVYPVPKPDGKWRMVLDYREVNKTIPLIAAQNQHSAGILSSIYRGKYKTTLDLTNGFWAHPITPESYWLTAFTWQGKQYCWTRLPQGFLNSPALFNADVVDLLKEIPNVQAYVDDIYISHDDPQEHLEQLEKIFSILLNAGYVVSLKKSEIAQREVEFLGFNITKEGRGLTDTFKQKLLNITPPKDLKQLQSILGKLNFARNFIPNYSELVKPLYTIVAPANGKFISWTEDNSNQLQHIISVLNQADNLEERNPETRLIIKVNSSPSAGYIRYYNEGSKRPIMYVNYIFSKAEAKFTQTEKLLTTMHKGLIKAMDLAMGQEILVYSPIVSMTKIQRTPLPERKALPVRWITWMTYLEDPRIQFHYDKSLPELQQIPNVTEDVIAKTKHPSEFAMVFYTDGSAIKHPDVNKSHSAGMGIAQVQFIPEYKIVHQWSIPLGDHTAQLAEIAAVEFACKKALKISGPVLIVTDSFYVAESANKELPYWKSNGFLNNKKKPLRHVSKWKSIAECLQLKPDIIIMHEKGHQQPMTTLHTEGNNLADKLATQGSYVVHAGKRTADGSEFEKRTADGSEFESPKKKAKVE

SEQ ID NO: 458 - protein, 2087 aa, synthetic construct
MPAAKRVKLDGGDKKYSIGLDIGTNSVGWAVITDEYKVPSKKFKVLGNTDRHSIKKNLIGALLFDSGETAEATRLKRTARRRYTRRKNRICYLQEIFSNEMAKVDDSFFHRLEESFLVEEDKKHERHPIFGNIVDEVAYHEKYPTIYHLRKKLVDSTDKADLRLIYLALAHMIKFRGHFLIEGDLNPDNSDVDKLFIQLVQTYNQLFEENPINASGVDAKAILSARLSKSRRLENLIAQLPGEKKNGLFGNLIALSLGLTPNFKSNFDLAEDAKLQLSKDTYDDDLDNLLAQIGDQYADLFLAAKNLSDAILLSDILRVNTEITKAPLSASMIKRYDEHHQDLTLLKALVRQQLPEKYKEIFFDQSKNGYAGYIDGGASQEEFYKFIKPILEKMDGTEELLVKLNREDLLRKQRTFDNGSIPHQIHLGELHAILRRQEDFYPFLKDNREKIEKILTFRIPYYVGPLARGNSRFAWMTRKSEETITPWNFEEVVDKGASAQSFIERMTNFDKNLPNEKVLPKHSLLYEYFTVYNELTKVKYVTEGMRKPAFLSGEQKKAIVDLLFKTNRKVTVKQLKEDYFKKIECFDSVEISGVEDRFNASLGTYHDLLKIIKDKDFLDNEENEDILEDIVLTLTLFEDREMIEERLKTYAHLFDDKVMKQLKRRRYTGWGRLSRKLINGIRDKQSGKTILDFLKSDGFANRNFMQLIHDDSLTFKEDIQKAQVSGQGDSLHEHIANLAGSPAIKKGILQTVKVVDELVKVMGRHKPENIVIEMARENQTTQKGQKNSRERMKRIEEGIKELGSQILKEHPVENTQLQNEKLYLYYLQNGRDMYVDQELDINRLSDYDVDHIVPQSFLKDDSIDNKVLTRSDKARGKSDNVPSEEVVKKMKNYWRQLLNAKLITQRKFDNLTKAERGGLSELDKAGFIKRQLVETRQITKHVAQILDSRMNTKYDENDKLIREVKVITLKSKLVSDFRKDFQFYKVREINNYHHAHDAYLNAVVGTALIKKYPKLESEFVYGDYKVYDVRKMIAKSEQEIGKATAKYFFYSNIMNFFKTEITLANGEIRKRPLIETNGETGEIVWDKGRDFATVRKVLSMPQVNIVKKTEVQTGGFSKESILPKRNSDKLIARKKDWDPKKYGGFDSPTVAYSVLVVAKVEKGKSKKLKSVKELLGITIMERSSFEKNPIDFLEAKGYKEVKKDLIIKLPKYSLFELENGRKRMLASAGELQKGNELALPSKYVNFLYLASHYEKLKGSPEDNEQKQLFVEQHKHYLDEIIEQISEFSKRVILADANLDKVLSAYNKHRDKPIREQAENIIHLFTLTNLGAPAAFKYFDTTIDRKRYTSTKEVLDATLIHQSITGLYETRIDLSQLGGDGGGGGEAAAKGSSGGVPWLMKKPLQLTVLVPLHEYQERLLQQTALPKEQKELLQKLFLKYDALWQHWENQVGHRRIKPHNIATGTLAPRPQKQYPINPKAKPSIQIVIDDLLKQGVLIQQNSTMNTPVYPVPKPDGKWRMVLDYREVNKTIPLIAAQNQHSAGILSSIYRGKYKTTLDLTNGFWAHPITPESYWLTAFTWQGKQYCWTRLPQGFLNSPALFNADVVDLLKEIPNVQAYVDDIYISHDDPQEHLEQLEKIFSILLNAGYVVSLKKSEIAQREVEFLGFNITKEGRGLTDTFKQKLLNITPPKDLKQLQSILGKLNFARNFIPNYSELVKPLYTIVAPANGKFISWTEDNSNQLQHIISVLNQADNLEERNPETRLIIKVNSSPSAGYIRYYNEGSKRPIMYVNYIFSKAEAKFTQTEKLLTTMHKGLIKAMDLAMGQEILVYSPIVSMTKIQRTPLPERKALPVRWITWMTYLEDPRIQFHYDKSLPELQQIPNVTEDVIAKTKHPSEFAMVFYTDGSAIKHPDVNKSHSAGMGIAQVQFIPEYKIVHQWSIPLGDHTAQLAEIAAVEFACKKALKISGPVLIVTDSFYVAESANKELPYWKSNGFLNNKKKPLRHVSKWKSIAECLQLKPDIIIMHEKGHQQPMTTLHTEGNNLADKLATQGSYVVHAGKRTADGSEFEKRTADGSEFESPKKKAKVE

SEQ ID NO: 459 - protein, 2087 aa, synthetic construct
MPAAKRVKLDGGDKKYSIGLDIGTNSVGWAVITDEYKVPSKKFKVLGNTDRHSIKKNLIGALLFDSGETAEATRLKRTARRRYTRRKNRICYLQEIFSNEMAKVDDSFFHRLEESFLVEEDKKHERHPIFGNIVDEVAYHEKYPTIYHLRKKLVDSTDKADLRLIYLALAHMIKFRGHFLIEGDLNPDNSDVDKLFIQLVQTYNQLFEENPINASGVDAKAILSARLSKSRRLENLIAQLPGEKKNGLFGNLIALSLGLTPNFKSNFDLAEDAKLQLSKDTYDDDLDNLLAQIGDQYADLFLAAKNLSDAILLSDILRVNTEITKAPLSASMIKRYDEHHQDLTLLKALVRQQLPEKYKEIFFDQSKNGYAGYIDGGASQEEFYKFIKPILEKMDGTEELLVKLNREDLLRKQRTFDNGSIPHQIHLGELHAILRRQEDFYPFLKDNREKIEKILTFRIPYYVGPLARGNSRFAWMTRKSEETITPWNFEEVVDKGASAQSFIERMTNFDKNLPNEKVLPKHSLLYEYFTVYNELTKVKYVTEGMRKPAFLSGEQKKAIVDLLFKTNRKVTVKQLKEDYFKKIECFDSVEISGVEDRFNASLGTYHDLLKIIKDKDFLDNEENEDILEDIVLTLTLFEDREMIEERLKTYAHLFDDKVMKQLKRRRYTGWGRLSRKLINGIRDKQSGKTILDFLKSDGFANRNFMQLIHDDSLTFKEDIQKAQVSGQGDSLHEHIANLAGSPAIKKGILQTVKVVDELVKVMGRHKPENIVIEMARENQTTQKGQKNSRERMKRIEEGIKELGSQILKEHPVENTQLQNEKLYLYYLQNGRDMYVDQELDINRLSDYDVDHIVPQSFLKDDSIDNKVLTRSDKARGKSDNVPSEEVVKKMKNYWRQLLNAKLITQRKFDNLTKAERGGLSELDKAGFIKRQLVETRQITKHVAQILDSRMNTKYDENDKLIREVKVITLKSKLVSDFRKDFQFYKVREINNYHHAHDAYLNAVVGTALIKKYPKLESEFVYGDYKVYDVRKMIAKSEQEIGKATAKYFFYSNIMNFFKTEITLANGEIRKRPLIETNGETGEIVWDKGRDFATVRKVLSMPQVNIVKKTEVQTGGFSKESILPKRNSDKLIARKKDWDPKKYGGFDSPTVAYSVLVVAKVEKGKSKKLKSVKELLGITIMERSSFEKNPIDFLEAKGYKEVKKDLIIKLPKYSLFELENGRKRMLASAGELQKGNELALPSKYVNFLYLASHYEKLKGSPEDNEQKQLFVEQHKHYLDEIIEQISEFSKRVILADANLDKVLSAYNKHRDKPIREQAENIIHLFTLTNLGAPAAFKYFDTTIDRKRYTSTKEVLDATLIHQSITGLYETRIDLSQLGGDGGGGSGGGEAAAKGGVPWLMKKPLQLTVLVPLHEYQERLLQQTALPKEQKELLQKLFLKYDALWQHWENQVGHRRIKPHNIATGTLAPRPQKQYPINPKAKPSIQIVIDDLLKQGVLIQQNSTMNTPVYPVPKPDGKWRMVLDYREVNKTIPLIAAQNQHSAGILSSIYRGKYKTTLDLTNGFWAHPITPESYWLTAFTWQGKQYCWTRLPQGFLNSPALFNADVVDLLKEIPNVQAYVDDIYISHDDPQEHLEQLEKIFSILLNAGYVVSLKKSEIAQREVEFLGFNITKEGRGLTDTFKQKLLNITPPKDLKQLQSILGKLNFARNFIPNYSELVKPLYTIVAPANGKFISWTEDNSNQLQHIISVLNQADNLEERNPETRLIIKVNSSPSAGYIRYYNEGSKRPIMYVNYIFSKAEAKFTQTEKLLTTMHKGLIKAMDLAMGQEILVYSPIVSMTKIQRTPLPERKALPVRWITWMTYLEDPRIQFHYDKSLPELQQIPNVTEDVIAKTKHPSEFAMVFYTDGSAIKHPDVNKSHSAGMGIAQVQFIPEYKIVHQWSIPLGDHTAQLAEIAAVEFACKKALKISGPVLIVTDSFYVAESANKELPYWKSNGFLNNKKKPLRHVSKWKSIAECLQLKPDIIIMHEKGHQQPMTTLHTEGNNLADKLATQGSYVVHAGKRTADGSEFEKRTADGSEFESPKKKAKVE

SEQ ID NO: 460 - protein, 2185 aa, synthetic construct
MPAAKRVKLDGGDKKYSIGLDIGTNSVGWAVITDEYKVPSKKFKVLGNTDRHSIKKNLIGALLFDSGETAEATRLKRTARRRYTRRKNRICYLQEIFSNEMAKVDDSFFHRLEESFLVEEDKKHERHPIFGNIVDEVAYHEKYPTIYHLRKKLVDSTDKADLRLIYLALAHMIKFRGHFLIEGDLNPDNSDVDKLFIQLVQTYNQLFEENPINASGVDAKAILSARLSKSRRLENLIAQLPGEKKNGLFGNLIALSLGLTPNFKSNFDLAEDAKLQLSKDTYDDDLDNLLAQIGDQYADLFLAAKNLSDAILLSDILRVNTEITKAPLSASMIKRYDEHHQDLTLLKALVRQQLPEKYKEIFFDQSKNGYAGYIDGGASQEEFYKFIKPILEKMDGTEELLVKLNREDLLRKQRTFDNGSIPHQIHLGELHAILRRQEDFYPFLKDNREKIEKILTFRIPYYVGPLARGNSRFAWMTRKSEETITPWNFEEVVDKGASAQSFIERMTNFDKNLPNEKVLPKHSLLYEYFTVYNELTKVKYVTEGMRKPAFLSGEQKKAIVDLLFKTNRKVTVKQLKEDYFKKIECFDSVEISGVEDRFNASLGTYHDLLKIIKDKDFLDNEENEDILEDIVLTLTLFEDREMIEERLKTYAHLFDDKVMKQLKRRRYTGWGRLSRKLINGIRDKQSGKTILDFLKSDGFANRNFMQLIHDDSLTFKEDIQKAQVSGQGDSLHEHIANLAGSPAIKKGILQTVKVVDELVKVMGRHKPENIVIEMARENQTTQKGQKNSRERMKRIEEGIKELGSQILKEHPVENTQLQNEKLYLYYLQNGRDMYVDQELDINRLSDYDVDHIVPQSFLKDDSIDNKVLTRSDKARGKSDNVPSEEVVKKMKNYWRQLLNAKLITQRKFDNLTKAERGGLSELDKAGFIKRQLVETRQITKHVAQILDSRMNTKYDENDKLIREVKVITLKSKLVSDFRKDFQFYKVREINNYHHAHDAYLNAVVGTALIKKYPKLESEFVYGDYKVYDVRKMIAKSEQEIGKATAKYFFYSNIMNFFKTEITLANGEIRKRPLIETNGETGEIVWDKGRDFATVRKVLSMPQVNIVKKTEVQTGGFSKESILPKRNSDKLIARKKDWDPKKYGGFDSPTVAYSVLVVAKVEKGKSKKLKSVKELLGITIMERSSFEKNPIDFLEAKGYKEVKKDLIIKLPKYSLFELENGRKRMLASAGELQKGNELALPSKYVNFLYLASHYEKLKGSPEDNEQKQLFVEQHKHYLDEIIEQISEFSKRVILADANLDKVLSAYNKHRDKPIREQAENIIHLFTLTNLGAPAAFKYFDTTIDRKRYTSTKEVLDATLIHQSITGLYETRIDLSQLGGDGGGGGGSGGGGSGGGGSGGGGSGGMDPLQLLQPLEAEIKGTKLKAHWNSGATITCVPEAFLEDERPIQTMLIKTIHGEKQQDVYYLTFKVQGRKVEAEVLASPYDYILLNPSDVPWLMKKPLQLTVLVPLHEYQERLLQQTALPKEQKELLQKLFLKYDALWQHWENQVGHRRIKPHNIATGTLAPRPQKQYPINPKAKPSIQIVIDDLLKQGVLIQQNSTMNTPVYPVPKPDGKWRMVLDYREVNKTIPLIAAQNQHSAGILSSIYRGKYKTTLDLTNGFWAHPITPESYWLTAFTWQGKQYCWTRLPQGFLNSPALFNADVVDLLKEIPNVQAYVDDIYISHDDPQEHLEQLEKIFSILLNAGYVVSLKKSEIAQREVEFLGFNITKEGRGLTDTFKQKLLNITPPKDLKQLQSILGLLNFARNFIPNYSELVKPLYTIVAPANGKFISWTEDNSNQLQHIISVLNQADNLEERNPETRLIIKVNSSPSAGYIRYYNEGSKRPIMYVNYIFSKAEAKFTQTEKLLTTMHKGLIKAMDLAMGQEILVYSPIVSMTKIQRTPLPERKALPVRWITWMTYLEDPRIQFHYDKSLPELQQIPNVTEDVIAKTKHPSEFAMVFYTDGSAIKHPDVNKSHSAGMGIAQVQFIPEYKIVHQWSIPLGDHTAQLAEIAAVEFACKKALKISGPVLIVTDSFYVAESANKELPYWKSNGFLNNKKKPLRHVSKWKSIAECLQLKPDIIIMHEKGHQQPMTTLHTEGNNLADKLATQGSYVVHAGKRTADGSEFEKRTADGSEFESPKKKAKVE

SEQ ID NO: 461 - protein, 2180 aa, synthetic construct
MPAAKRVKLDGGDKKYSIGLDIGTNSVGWAVITDEYKVPSKKFKVLGNTDRHSIKKNLIGALLFDSGETAEATRLKRTARRRYTRRKNRICYLQEIFSNEMAKVDDSFFHRLEESFLVEEDKKHERHPIFGNIVDEVAYHEKYPTIYHLRKKLVDSTDKADLRLIYLALAHMIKFRGHFLIEGDLNPDNSDVDKLFIQLVQTYNQLFEENPINASGVDAKAILSARLSKSRRLENLIAQLPGEKKNGLFGNLIALSLGLTPNFKSNFDLAEDAKLQLSKDTYDDDLDNLLAQIGDQYADLFLAAKNLSDAILLSDILRVNTEITKAPLSASMIKRYDEHHQDLTLLKALVRQQLPEKYKEIFFDQSKNGYAGYIDGGASQEEFYKFIKPILEKMDGTEELLVKLNREDLLRKQRTFDNGSIPHQIHLGELHAILRRQEDFYPFLKDNREKIEKILTFRIPYYVGPLARGNSRFAWMTRKSEETITPWNFEEVVDKGASAQSFIERMTNFDKNLPNEKVLPKHSLLYEYFTVYNELTKVKYVTEGMRKPAFLSGEQKKAIVDLLFKTNRKVTVKQLKEDYFKKIECFDSVEISGVEDRFNASLGTYHDLLKIIKDKDFLDNEENEDILEDIVLTLTLFEDREMIEERLKTYAHLFDDKVMKQLKRRRYTGWGRLSRKLINGIRDKQSGKTILDFLKSDGFANRNFMQLIHDDSLTFKEDIQKAQVSGQGDSLHEHIANLAGSPAIKKGILQTVKVVDELVKVMGRHKPENIVIEMARENQTTQKGQKNSRERMKRIEEGIKELGSQILKEHPVENTQLQNEKLYLYYLQNGRDMYVDQELDINRLSDYDVDHIVPQSFLKDDSIDNKVLTRSDKARGKSDNVPSEEVVKKMKNYWRQLLNAKLITQRKFDNLTKAERGGLSELDKAGFIKRQLVETRQITKHVAQILDSRMNTKYDENDKLIREVKVITLKSKLVSDFRKDFQFYKVREINNYHHAHDAYLNAVVGTALIKKYPKLESEFVYGDYKVYDVRKMIAKSEQEIGKATAKYFFYSNIMNFFKTEITLANGEIRKRPLIETNGETGEIVWDKGRDFATVRKVLSMPQVNIVKKTEVQTGGFSKESILPKRNSDKLIARKKDWDPKKYGGFDSPTVAYSVLVVAKVEKGKSKKLKSVKELLGITIMERSSFEKNPIDFLEAKGYKEVKKDLIIKLPKYSLFELENGRKRMLASAGELQKGNELALPSKYVNFLYLASHYEKLKGSPEDNEQKQLFVEQHKHYLDEIIEQISEFSKRVILADANLDKVLSAYNKHRDKPIREQAENIIHLFTLTNLGAPAAFKYFDTTIDRKRYTSTKEVLDATLIHQSITGLYETRIDLSQLGGDGGGSSGSSGSSGSSGSSGGMDPLQLLQPLEAEIKGTKLKAHWNSGATITCVPEAFLEDERPIQTMLIKTIHGEKQQDVYYLTFKVQGRKVEAEVLASPYDYILLNPSDVPWLMKKPLQLTVLVPLHEYQERLLQQTALPKEQKELLQKLFLKYDALWQHWENQVGHRRIKPHNIATGTLAPRPQKQYPINPKAKPSIQIVIDDLLKQGVLIQQNSTMNTPVYPVPKPDGKWRMVLDYREVNKTIPLIAAQNQHSAGILSSIYRGKYKTTLDLTNGFWAHPITPESYWLTAFTWQGKQYCWTRLPQGFLNSPALFNADVVDLLKEIPNVQAYVDDIYISHDDPQEHLEQLEKIFSILLNAGYVVSLKKSEIAQREVEFLGFNITKEGRGLTDTFKQKLLNITPPKDLKQLQSILGLLNFARNFIPNYSELVKPLYTIVAPANGKFISWTEDNSNQLQHIISVLNQADNLEERNPETRLIIKVNSSPSAGYIRYYNEGSKRPIMYVNYIFSKAEAKFTQTEKLLTTMHKGLIKAMDLAMGQEILVYSPIVSMTKIQRTPLPERKALPVRWITWMTYLEDPRIQFHYDKSLPELQQIPNVTEDVIAKTKHPSEFAMVFYTDGSAIKHPDVNKSHSAGMGIAQVQFIPEYKIVHQWSIPLGDHTAQLAEIAAVEFACKKALKISGPVLIVTDSFYVAESANKELPYWKSNGFLNNKKKPLRHVSKWKSIAECLQLKPDIIIMHEKGHQQPMTTLHTEGNNLADKLATQGSYVVHAGKRTADGSEFEKRTADGSEFESPKKKAKVE

SEQ ID NO: 462 - protein, 2176 aa, synthetic construct
MPAAKRVKLDGGDKKYSIGLDIGTNSVGWAVITDEYKVPSKKFKVLGNTDRHSIKKNLIGALLFDSGETAEATRLKRTARRRYTRRKNRICYLQEIFSNEMAKVDDSFFHRLEESFLVEEDKKHERHPIFGNIVDEVAYHEKYPTIYHLRKKLVDSTDKADLRLIYLALAHMIKFRGHFLIEGDLNPDNSDVDKLFIQLVQTYNQLFEENPINASGVDAKAILSARLSKSRRLENLIAQLPGEKKNGLFGNLIALSLGLTPNFKSNFDLAEDAKLQLSKDTYDDDLDNLLAQIGDQYADLFLAAKNLSDAILLSDILRVNTEITKAPLSASMIKRYDEHHQDLTLLKALVRQQLPEKYKEIFFDQSKNGYAGYIDGGASQEEFYKFIKPILEKMDGTEELLVKLNREDLLRKQRTFDNGSIPHQIHLGELHAILRRQEDFYPFLKDNREKIEKILTFRIPYYVGPLARGNSRFAWMTRKSEETITPWNFEEVVDKGASAQSFIERMTNFDKNLPNEKVLPKHSLLYEYFTVYNELTKVKYVTEGMRKPAFLSGEQKKAIVDLLFKTNRKVTVKQLKEDYFKKIECFDSVEISGVEDRFNASLGTYHDLLKIIKDKDFLDNEENEDILEDIVLTLTLFEDREMIEERLKTYAHLFDDKVMKQLKRRRYTGWGRLSRKLINGIRDKQSGKTILDFLKSDGFANRNFMQLIHDDSLTFKEDIQKAQVSGQGDSLHEHIANLAGSPAIKKGILQTVKVVDELVKVMGRHKPENIVIEMARENQTTQKGQKNSRERMKRIEEGIKELGSQILKEHPVENTQLQNEKLYLYYLQNGRDMYVDQELDINRLSDYDVDHIVPQSFLKDDSIDNKVLTRSDKARGKSDNVPSEEVVKKMKNYWRQLLNAKLITQRKFDNLTKAERGGLSELDKAGFIKRQLVETRQITKHVAQILDSRMNTKYDENDKLIREVKVITLKSKLVSDFRKDFQFYKVREINNYHHAHDAYLNAVVGTALIKKYPKLESEFVYGDYKVYDVRKMIAKSEQEIGKATAKYFFYSNIMNFFKTEITLANGEIRKRPLIETNGETGEIVWDKGRDFATVRKVLSMPQVNIVKKTEVQTGGFSKESILPKRNSDKLIARKKDWDPKKYGGFDSPTVAYSVLVVAKVEKGKSKKLKSVKELLGITIMERSSFEKNPIDFLEAKGYKEVKKDLIIKLPKYSLFELENGRKRMLASAGELQKGNELALPSKYVNFLYLASHYEKLKGSPEDNEQKQLFVEQHKHYLDEIIEQISEFSKRVILADANLDKVLSAYNKHRDKPIREQAENIIHLFTLTNLGAPAAFKYFDTTIDRKRYTSTKEVLDATLIHQSITGLYETRIDLSQLGGDGGGGGEAAAKGSSGGMDPLQLLQPLEAEIKGTKLKAHWNSGATITCVPEAFLEDERPIQTMLIKTIHGEKQQDVYYLTFKVQGRKVEAEVLASPYDYILLNPSDVPWLMKKPLQLTVLVPLHEYQERLLQQTALPKEQKELLQKLFLKYDALWQHWENQVGHRRIKPHNIATGTLAPRPQKQYPINPKAKPSIQIVIDDLLKQGVLIQQNSTMNTPVYPVPKPDGKWRMVLDYREVNKTIPLIAAQNQHSAGILSSIYRGKYKTTLDLTNGFWAHPITPESYWLTAFTWQGKQYCWTRLPQGFLNSPALFNADVVDLLKEIPNVQAYVDDIYISHDDPQEHLEQLEKIFSILLNAGYVVSLKKSEIAQREVEFLGFNITKEGRGLTDTFKQKLLNITPPKDLKQLQSILGLLNFARNFIPNYSELVKPLYTIVAPANGKFISWTEDNSNQLQHIISVLNQADNLEERNPETRLIIKVNSSPSAGYIRYYNEGSKRPIMYVNYIFSKAEAKFTQTEKLLTTMHKGLIKAMDLAMGQEILVYSPIVSMTKIQRTPLPERKALPVRWITWMTYLEDPRIQFHYDKSLPELQQIPNVTEDVIAKTKHPSEFAMVFYTDGSAIKHPDVNKSHSAGMGIAQVQFIPEYKIVHQWSIPLGDHTAQLAEIAAVEFACKKALKISGPVLIVTDSFYVAESANKELPYWKSNGFLNNKKKPLRHVSKWKSIAECLQLKPDIIIMHEKGHQQPMTTLHTEGNNLADKLATQGSYVVHAGKRTADGSEFEKRTADGSEFESPKKKAKVE

SEQ ID NO: 463 - protein, 2176 aa, synthetic construct
MPAAKRVKLDGGDKKYSIGLDIGTNSVGWAVITDEYKVPSKKFKVLGNTDRHSIKKNLIGALLFDSGETAEATRLKRTARRRYTRRKNRICYLQEIFSNEMAKVDDSFFHRLEESFLVEEDKKHERHPIFGNIVDEVAYHEKYPTIYHLRKKLVDSTDKADLRLIYLALAHMIKFRGHFLIEGDLNPDNSDVDKLFIQLVQTYNQLFEENPINASGVDAKAILSARLSKSRRLENLIAQLPGEKKNGLFGNLIALSLGLTPNFKSNFDLAEDAKLQLSKDTYDDDLDNLLAQIGDQYADLFLAAKNLSDAILLSDILRVNTEITKAPLSASMIKRYDEHHQDLTLLKALVRQQLPEKYKEIFFDQSKNGYAGYIDGGASQEEFYKFIKPILEKMDGTEELLVKLNREDLLRKQRTFDNGSIPHQIHLGELHAILRRQEDFYPFLKDNREKIEKILTFRIPYYVGPLARGNSRFAWMTRKSEETITPWNFEEVVDKGASAQSFIERMTNFDKNLPNEKVLPKHSLLYEYFTVYNELTKVKYVTEGMRKPAFLSGEQKKAIVDLLFKTNRKVTVKQLKEDYFKKIECFDSVEISGVEDRFNASLGTYHDLLKIIKDKDFLDNEENEDILEDIVLTLTLFEDREMIEERLKTYAHLFDDKVMKQLKRRRYTGWGRLSRKLINGIRDKQSGKTILDFLKSDGFANRNFMQLIHDDSLTFKEDIQKAQVSGQGDSLHEHIANLAGSPAIKKGILQTVKVVDELVKVMGRHKPENIVIEMARENQTTQKGQKNSRERMKRIEEGIKELGSQILKEHPVENTQLQNEKLYLYYLQNGRDMYVDQELDINRLSDYDVDHIVPQSFLKDDSIDNKVLTRSDKARGKSDNVPSEEVVKKMKNYWRQLLNAKLITQRKFDNLTKAERGGLSELDKAGFIKRQLVETRQITKHVAQILDSRMNTKYDENDKLIREVKVITLKSKLVSDFRKDFQFYKVREINNYHHAHDAYLNAVVGTALIKKYPKLESEFVYGDYKVYDVRKMIAKSEQEIGKATAKYFFYSNIMNFFKTEITLANGEIRKRPLIETNGETGEIVWDKGRDFATVRKVLSMPQVNIVKKTEVQTGGFSKESILPKRNSDKLIARKKDWDPKKYGGFDSPTVAYSVLVVAKVEKGKSKKLKSVKELLGITIMERSSFEKNPIDFLEAKGYKEVKKDLIIKLPKYSLFELENGRKRMLASAGELQKGNELALPSKYVNFLYLASHYEKLKGSPEDNEQKQLFVEQHKHYLDEIIEQISEFSKRVILADANLDKVLSAYNKHRDKPIREQAENIIHLFTLTNLGAPAAFKYFDTTIDRKRYTSTKEVLDATLIHQSITGLYETRIDLSQLGGDGGGGGEAAAKPAPGGMDPLQLLQPLEAEIKGTKLKAHWNSGATITCVPEAFLEDERPIQTMLIKTIHGEKQQDVYYLTFKVQGRKVEAEVLASPYDYILLNPSDVPWLMKKPLQLTVLVPLHEYQERLLQQTALPKEQKELLQKLFLKYDALWQHWENQVGHRRIKPHNIATGTLAPRPQKQYPINPKAKPSIQIVIDDLLKQGVLIQQNSTMNTPVYPVPKPDGKWRMVLDYREVNKTIPLIAAQNQHSAGILSSIYRGKYKTTLDLTNGFWAHPITPESYWLTAFTWQGKQYCWTRLPQGFLNSPALFNADVVDLLKEIPNVQAYVDDIYISHDDPQEHLEQLEKIFSILLNAGYVVSLKKSEIAQREVEFLGFNITKEGRGLTDTFKQKLLNITPPKDLKQLQSILGLLNFARNFIPNYSELVKPLYTIVAPANGKFISWTEDNSNQLQHIISVLNQADNLEERNPETRLIIKVNSSPSAGYIRYYNEGSKRPIMYVNYIFSKAEAKFTQTEKLLTTMHKGLIKAMDLAMGQEILVYSPIVSMTKIQRTPLPERKALPVRWITWMTYLEDPRIQFHYDKSLPELQQIPNVTEDVIAKTKHPSEFAMVFYTDGSAIKHPDVNKSHSAGMGIAQVQFIPEYKIVHQWSIPLGDHTAQLAEIAAVEFACKKALKISGPVLIVTDSFYVAESANKELPYWKSNGFLNNKKKPLRHVSKWKSIAECLQLKPDIIIMHEKGHQQPMTTLHTEGNNLADKLATQGSYVVHAGKRTADGSEFEKRTADGSEFESPKKKAKVE

SEQ ID NO: 464 - protein, 2176 aa, synthetic construct
MPAAKRVKLDGGDKKYSIGLDIGTNSVGWAVITDEYKVPSKKFKVLGNTDRHSIKKNLIGALLFDSGETAEATRLKRTARRRYTRRKNRICYLQEIFSNEMAKVDDSFFHRLEESFLVEEDKKHERHPIFGNIVDEVAYHEKYPTIYHLRKKLVDSTDKADLRLIYLALAHMIKFRGHFLIEGDLNPDNSDVDKLFIQLVQTYNQLFEENPINASGVDAKAILSARLSKSRRLENLIAQLPGEKKNGLFGNLIALSLGLTPNFKSNFDLAEDAKLQLSKDTYDDDLDNLLAQIGDQYADLFLAAKNLSDAILLSDILRVNTEITKAPLSASMIKRYDEHHQDLTLLKALVRQQLPEKYKEIFFDQSKNGYAGYIDGGASQEEFYKFIKPILEKMDGTEELLVKLNREDLLRKQRTFDNGSIPHQIHLGELHAILRRQEDFYPFLKDNREKIEKILTFRIPYYVGPLARGNSRFAWMTRKSEETITPWNFEEVVDKGASAQSFIERMTNFDKNLPNEKVLPKHSLLYEYFTVYNELTKVKYVTEGMRKPAFLSGEQKKAIVDLLFKTNRKVTVKQLKEDYFKKIECFDSVEISGVEDRFNASLGTYHDLLKIIKDKDFLDNEENEDILEDIVLTLTLFEDREMIEERLKTYAHLFDDKVMKQLKRRRYTGWGRLSRKLINGIRDKQSGKTILDFLKSDGFANRNFMQLIHDDSLTFKEDIQKAQVSGQGDSLHEHIANLAGSPAIKKGILQTVKVVDELVKVMGRHKPENIVIEMARENQTTQKGQKNSRERMKRIEEGIKELGSQILKEHPVENTQLQNEKLYLYYLQNGRDMYVDQELDINRLSDYDVDHIVPQSFLKDDSIDNKVLTRSDKARGKSDNVPSEEVVKKMKNYWRQLLNAKLITQRKFDNLTKAERGGLSELDKAGFIKRQLVETRQITKHVAQILDSRMNTKYDENDKLIREVKVITLKSKLVSDFRKDFQFYKVREINNYHHAHDAYLNAVVGTALIKKYPKLESEFVYGDYKVYDVRKMIAKSEQEIGKATAKYFFYSNIMNFFKTEITLANGEIRKRPLIETNGETGEIVWDKGRDFATVRKVLSMPQVNIVKKTEVQTGGFSKESILPKRNSDKLIARKKDWDPKKYGGFDSPTVAYSVLVVAKVEKGKSKKLKSVKELLGITIMERSSFEKNPIDFLEAKGYKEVKKDLIIKLPKYSLFELENGRKRMLASAGELQKGNELALPSKYVNFLYLASHYEKLKGSPEDNEQKQLFVEQHKHYLDEIIEQISEFSKRVILADANLDKVLSAYNKHRDKPIREQAENIIHLFTLTNLGAPAAFKYFDTTIDRKRYTSTKEVLDATLIHQSITGLYETRIDLSQLGGDGGGGSEAAAKPAPGGMDPLQLLQPLEAEIKGTKLKAHWNSGATITCVPEAFLEDERPIQTMLIKTIHGEKQQDVYYLTFKVQGRKVEAEVLASPYDYILLNPSDVPWLMKKPLQLTVLVPLHEYQERLLQQTALPKEQKELLQKLFLKYDALWQHWENQVGHRRIKPHNIATGTLAPRPQKQYPINPKAKPSIQIVIDDLLKQGVLIQQNSTMNTPVYPVPKPDGKWRMVLDYREVNKTIPLIAAQNQHSAGILSSIYRGKYKTTLDLTNGFWAHPITPESYWLTAFTWQGKQYCWTRLPQGFLNSPALFNADVVDLLKEIPNVQAYVDDIYISHDDPQEHLEQLEKIFSILLNAGYVVSLKKSEIAQREVEFLGFNITKEGRGLTDTFKQKLLNITPPKDLKQLQSILGLLNFARNFIPNYSELVKPLYTIVAPANGKFISWTEDNSNQLQHIISVLNQADNLEERNPETRLIIKVNSSPSAGYIRYYNEGSKRPIMYVNYIFSKAEAKFTQTEKLLTTMHKGLIKAMDLAMGQEILVYSPIVSMTKIQRTPLPERKALPVRWITWMTYLEDPRIQFHYDKSLPELQQIPNVTEDVIAKTKHPSEFAMVFYTDGSAIKHPDVNKSHSAGMGIAQVQFIPEYKIVHQWSIPLGDHTAQLAEIAAVEFACKKALKISGPVLIVTDSFYVAESANKELPYWKSNGFLNNKKKPLRHVSKWKSIAECLQLKPDIIIMHEKGHQQPMTTLHTEGNNLADKLATQGSYVVHAGKRTADGSEFEKRTADGSEFESPKKKAKVE

SEQ ID NO: 465 - protein, 2170 aa, synthetic construct
MPAAKRVKLDGGDKKYSIGLDIGTNSVGWAVITDEYKVPSKKFKVLGNTDRHSIKKNLIGALLFDSGETAEATRLKRTARRRYTRRKNRICYLQEIFSNEMAKVDDSFFHRLEESFLVEEDKKHERHPIFGNIVDEVAYHEKYPTIYHLRKKLVDSTDKADLRLIYLALAHMIKFRGHFLIEGDLNPDNSDVDKLFIQLVQTYNQLFEENPINASGVDAKAILSARLSKSRRLENLIAQLPGEKKNGLFGNLIALSLGLTPNFKSNFDLAEDAKLQLSKDTYDDDLDNLLAQIGDQYADLFLAAKNLSDAILLSDILRVNTEITKAPLSASMIKRYDEHHQDLTLLKALVRQQLPEKYKEIFFDQSKNGYAGYIDGGASQEEFYKFIKPILEKMDGTEELLVKLNREDLLRKQRTFDNGSIPHQIHLGELHAILRRQEDFYPFLKDNREKIEKILTFRIPYYVGPLARGNSRFAWMTRKSEETITPWNFEEVVDKGASAQSFIERMTNFDKNLPNEKVLPKHSLLYEYFTVYNELTKVKYVTEGMRKPAFLSGEQKKAIVDLLFKTNRKVTVKQLKEDYFKKIECFDSVEISGVEDRFNASLGTYHDLLKIIKDKDFLDNEENEDILEDIVLTLTLFEDREMIEERLKTYAHLFDDKVMKQLKRRRYTGWGRLSRKLINGIRDKQSGKTILDFLKSDGFANRNFMQLIHDDSLTFKEDIQKAQVSGQGDSLHEHIANLAGSPAIKKGILQTVKVVDELVKVMGRHKPENIVIEMARENQTTQKGQKNSRERMKRIEEGIKELGSQILKEHPVENTQLQNEKLYLYYLQNGRDMYVDQELDINRLSDYDVDHIVPQSFLKDDSIDNKVLTRSDKARGKSDNVPSEEVVKKMKNYWRQLLNAKLITQRKFDNLTKAERGGLSELDKAGFIKRQLVETRQITKHVAQILDSRMNTKYDENDKLIREVKVITLKSKLVSDFRKDFQFYKVREINNYHHAHDAYLNAVVGTALIKKYPKLESEFVYGDYKVYDVRKMIAKSEQEIGKATAKYFFYSNIMNFFKTEITLANGEIRKRPLIETNGETGEIVWDKGRDFATVRKVLSMPQVNIVKKTEVQTGGFSKESILPKRNSDKLIARKKDWDPKKYGGFDSPTVAYSVLVVAKVEKGKSKKLKSVKELLGITIMERSSFEKNPIDFLEAKGYKEVKKDLIIKLPKYSLFELENGRKRMLASAGELQKGNELALPSKYVNFLYLASHYEKLKGSPEDNEQKQLFVEQHKHYLDEIIEQISEFSKRVILADANLDKVLSAYNKHRDKPIREQAENIIHLFTLTNLGAPAAFKYFDTTIDRKRYTSTKEVLDATLIHQSITGLYETRIDLSQLGGDGGEAAAKGGMDPLQLLQPLEAEIKGTKLKAHWNSGATITCVPEAFLEDERPIQTMLIKTIHGEKQQDVYYLTFKVQGRKVEAEVLASPYDYILLNPSDVPWLMKKPLQLTVLVPLHEYQERLLQQTALPKEQKELLQKLFLKYDALWQHWENQVGHRRIKPHNIATGTLAPRPQKQYPINPKAKPSIQIVIDDLLKQGVLIQQNSTMNTPVYPVPKPDGKWRMVLDYREVNKTIPLIAAQNQHSAGILSSIYRGKYKTTLDLTNGFWAHPITPESYWLTAFTWQGKQYCWTRLPQGFLNSPALFNADVVDLLKEIPNVQAYVDDIYISHDDPQEHLEQLEKIFSILLNAGYVVSLKKSEIAQREVEFLGFNITKEGRGLTDTFKQKLLNITPPKDLKQLQSILGLLNFARNFIPNYSELVKPLYTIVAPANGKFISWTEDNSNQLQHIISVLNQADNLEERNPETRLIIKVNSSPSAGYIRYYNEGSKRPIMYVNYIFSKAEAKFTQTEKLLTTMHKGLIKAMDLAMGQEILVYSPIVSMTKIQRTPLPERKALPVRWITWMTYLEDPRIQFHYDKSLPELQQIPNVTEDVIAKTKHPSEFAMVFYTDGSAIKHPDVNKSHSAGMGIAQVQFIPEYKIVHQWSIPLGDHTAQLAEIAAVEFACKKALKISGPVLIVTDSFYVAESANKELPYWKSNGFLNNKKKPLRHVSKWKSIAECLQLKPDIIIMHEKGHQQPMTTLHTEGNNLADKLATQGSYVVHAGKRTADGSEFEKRTADGSEFESPKKKAKVE

SEQ ID NO: 466 - protein, 2176 aa, synthetic construct
MPAAKRVKLDGGDKKYSIGLDIGTNSVGWAVITDEYKVPSKKFKVLGNTDRHSIKKNLIGALLFDSGETAEATRLKRTARRRYTRRKNRICYLQEIFSNEMAKVDDSFFHRLEESFLVEEDKKHERHPIFGNIVDEVAYHEKYPTIYHLRKKLVDSTDKADLRLIYLALAHMIKFRGHFLIEGDLNPDNSDVDKLFIQLVQTYNQLFEENPINASGVDAKAILSARLSKSRRLENLIAQLPGEKKNGLFGNLIALSLGLTPNFKSNFDLAEDAKLQLSKDTYDDDLDNLLAQIGDQYADLFLAAKNLSDAILLSDILRVNTEITKAPLSASMIKRYDEHHQDLTLLKALVRQQLPEKYKEIFFDQSKNGYAGYIDGGASQEEFYKFIKPILEKMDGTEELLVKLNREDLLRKQRTFDNGSIPHQIHLGELHAILRRQEDFYPFLKDNREKIEKILTFRIPYYVGPLARGNSRFAWMTRKSEETITPWNFEEVVDKGASAQSFIERMTNFDKNLPNEKVLPKHSLLYEYFTVYNELTKVKYVTEGMRKPAFLSGEQKKAIVDLLFKTNRKVTVKQLKEDYFKKIECFDSVEISGVEDRFNASLGTYHDLLKIIKDKDFLDNEENEDILEDIVLTLTLFEDREMIEERLKTYAHLFDDKVMKQLKRRRYTGWGRLSRKLINGIRDKQSGKTILDFLKSDGFANRNFMQLIHDDSLTFKEDIQKAQVSGQGDSLHEHIANLAGSPAIKKGILQTVKVVDELVKVMGRHKPENIVIEMARENQTTQKGQKNSRERMKRIEEGIKELGSQILKEHPVENTQLQNEKLYLYYLQNGRDMYVDQELDINRLSDYDVDHIVPQSFLKDDSIDNKVLTRSDKARGKSDNVPSEEVVKKMKNYWRQLLNAKLITQRKFDNLTKAERGGLSELDKAGFIKRQLVETRQITKHVAQILDSRMNTKYDENDKLIREVKVITLKSKLVSDFRKDFQFYKVREINNYHHAHDAYLNAVVGTALIKKYPKLESEFVYGDYKVYDVRKMIAKSEQEIGKATAKYFFYSNIMNFFKTEITLANGEIRKRPLIETNGETGEIVWDKGRDFATVRKVLSMPQVNIVKKTEVQTGGFSKESILPKRNSDKLIARKKDWDPKKYGGFDSPTVAYSVLVVAKVEKGKSKKLKSVKELLGITIMERSSFEKNPIDFLEAKGYKEVKKDLIIKLPKYSLFELENGRKRMLASAGELQKGNELALPSKYVNFLYLASHYEKLKGSPEDNEQKQLFVEQHKHYLDEIIEQISEFSKRVILADANLDKVLSAYNKHRDKPIREQAENIIHLFTLTNLGAPAAFKYFDTTIDRKRYTSTKEVLDATLIHQSITGLYETRIDLSQLGGDGGGGSGSSEAAAKGGMDPLQLLQPLEAEIKGTKLKAHWNSGATITCVPEAFLEDERPIQTMLIKTIHGEKQQDVYYLTFKVQGRKVEAEVLASPYDYILLNPSDVPWLMKKPLQLTVLVPLHEYQERLLQQTALPKEQKELLQKLFLKYDALWQHWENQVGHRRIKPHNIATGTLAPRPQKQYPINPKAKPSIQIVIDDLLKQGVLIQQNSTMNTPVYPVPKPDGKWRMVLDYREVNKTIPLIAAQNQHSAGILSSIYRGKYKTTLDLTNGFWAHPITPESYWLTAFTWQGKQYCWTRLPQGFLNSPALFNADVVDLLKEIPNVQAYVDDIYISHDDPQEHLEQLEKIFSILLNAGYVVSLKKSEIAQREVEFLGFNITKEGRGLTDTFKQKLLNITPPKDLKQLQSILGLLNFARNFIPNYSELVKPLYTIVAPANGKFISWTEDNSNQLQHIISVLNQADNLEERNPETRLIIKVNSSPSAGYIRYYNEGSKRPIMYVNYIFSKAEAKFTQTEKLLTTMHKGLIKAMDLAMGQEILVYSPIVSMTKIQRTPLPERKALPVRWITWMTYLEDPRIQFHYDKSLPELQQIPNVTEDVIAKTKHPSEFAMVFYTDGSAIKHPDVNKSHSAGMGIAQVQFIPEYKIVHQWSIPLGDHTAQLAEIAAVEFACKKALKISGPVLIVTDSFYVAESANKELPYWKSNGFLNNKKKPLRHVSKWKSIAECLQLKPDIIIMHEKGHQQPMTTLHTEGNNLADKLATQGSYVVHAGKRTADGSEFEKRTADGSEFESPKKKAKVE

SEQ ID NO: 467 - protein, 2177 aa, synthetic construct
MPAAKRVKLDGGDKKYSIGLDIGTNSVGWAVITDEYKVPSKKFKVLGNTDRHSIKKNLIGALLFDSGETAEATRLKRTARRRYTRRKNRICYLQEIFSNEMAKVDDSFFHRLEESFLVEEDKKHERHPIFGNIVDEVAYHEKYPTIYHLRKKLVDSTDKADLRLIYLALAHMIKFRGHFLIEGDLNPDNSDVDKLFIQLVQTYNQLFEENPINASGVDAKAILSARLSKSRRLENLIAQLPGEKKNGLFGNLIALSLGLTPNFKSNFDLAEDAKLQLSKDTYDDDLDNLLAQIGDQYADLFLAAKNLSDAILLSDILRVNTEITKAPLSASMIKRYDEHHQDLTLLKALVRQQLPEKYKEIFFDQSKNGYAGYIDGGASQEEFYKFIKPILEKMDGTEELLVKLNREDLLRKQRTFDNGSIPHQIHLGELHAILRRQEDFYPFLKDNREKIEKILTFRIPYYVGPLARGNSRFAWMTRKSEETITPWNFEEVVDKGASAQSFIERMTNFDKNLPNEKVLPKHSLLYEYFTVYNELTKVKYVTEGMRKPAFLSGEQKKAIVDLLFKTNRKVTVKQLKEDYFKKIECFDSVEISGVEDRFNASLGTYHDLLKIIKDKDFLDNEENEDILEDIVLTLTLFEDREMIEERLKTYAHLFDDKVMKQLKRRRYTGWGRLSRKLINGIRDKQSGKTILDFLKSDGFANRNFMQLIHDDSLTFKEDIQKAQVSGQGDSLHEHIANLAGSPAIKKGILQTVKVVDELVKVMGRHKPENIVIEMARENQTTQKGQKNSRERMKRIEEGIKELGSQILKEHPVENTQLQNEKLYLYYLQNGRDMYVDQELDINRLSDYDVDHIVPQSFLKDDSIDNKVLTRSDKARGKSDNVPSEEVVKKMKNYWRQLLNAKLITQRKFDNLTKAERGGLSELDKAGFIKRQLVETRQITKHVAQILDSRMNTKYDENDKLIREVKVITLKSKLVSDFRKDFQFYKVREINNYHHAHDAYLNAVVGTALIKKYPKLESEFVYGDYKVYDVRKMIAKSEQEIGKATAKYFFYSNIMNFFKTEITLANGEIRKRPLIETNGETGEIVWDKGRDFATVRKVLSMPQVNIVKKTEVQTGGFSKESILPKRNSDKLIARKKDWDPKKYGGFDSPTVAYSVLVVAKVEKGKSKKLKSVKELLGITIMERSSFEKNPIDFLEAKGYKEVKKDLIIKLPKYSLFELENGRKRMLASAGELQKGNELALPSKYVNFLYLASHYEKLKGSPEDNEQKQLFVEQHKHYLDEIIEQISEFSKRVILADANLDKVLSAYNKHRDKPIREQAENIIHLFTLTNLGAPAAFKYFDTTIDRKRYTSTKEVLDATLIHQSITGLYETRIDLSQLGGDGGGSSGSSGSSGSSGGMDPLQLLQPLEAEIKGTKLKAHWNSGATITCVPEAFLEDERPIQTMLIKTIHGEKQQDVYYLTFKVQGRKVEAEVLASPYDYILLNPSDVPWLMKKPLQLTVLVPLHEYQERLLQQTALPKEQKELLQKLFLKYDALWQHWENQVGHRRIKPHNIATGTLAPRPQKQYPINPKAKPSIQIVIDDLLKQGVLIQQNSTMNTPVYPVPKPDGKWRMVLDYREVNKTIPLIAAQNQHSAGILSSIYRGKYKTTLDLTNGFWAHPITPESYWLTAFTWQGKQYCWTRLPQGFLNSPALFNADVVDLLKEIPNVQAYVDDIYISHDDPQEHLEQLEKIFSILLNAGYVVSLKKSEIAQREVEFLGFNITKEGRGLTDTFKQKLLNITPPKDLKQLQSILGLLNFARNFIPNYSELVKPLYTIVAPANGKFISWTEDNSNQLQHIISVLNQADNLEERNPETRLIIKVNSSPSAGYIRYYNEGSKRPIMYVNYIFSKAEAKFTQTEKLLTTMHKGLIKAMDLAMGQEILVYSPIVSMTKIQRTPLPERKALPVRWITWMTYLEDPRIQFHYDKSLPELQQIPNVTEDVIAKTKHPSEFAMVFYTDGSAIKHPDVNKSHSAGMGIAQVQFIPEYKIVHQWSIPLGDHTAQLAEIAAVEFACKKALKISGPVLIVTDSFYVAESANKELPYWKSNGFLNNKKKPLRHVSKWKSIAECLQLKPDIIIMHEKGHQQPMTTLHTEGNNLADKLATQGSYVVHAGKRTADGSEFEKRTADGSEFESPKKKAKVE

SEQ ID NO: 468 - protein, 2177 aa, synthetic construct
MPAAKRVKLDGGDKKYSIGLDIGTNSVGWAVITDEYKVPSKKFKVLGNTDRHSIKKNLIGALLFDSGETAEATRLKRTARRRYTRRKNRICYLQEIFSNEMAKVDDSFFHRLEESFLVEEDKKHERHPIFGNIVDEVAYHEKYPTIYHLRKKLVDSTDKADLRLIYLALAHMIKFRGHFLIEGDLNPDNSDVDKLFIQLVQTYNQLFEENPINASGVDAKAILSARLSKSRRLENLIAQLPGEKKNGLFGNLIALSLGLTPNFKSNFDLAEDAKLQLSKDTYDDDLDNLLAQIGDQYADLFLAAKNLSDAILLSDILRVNTEITKAPLSASMIKRYDEHHQDLTLLKALVRQQLPEKYKEIFFDQSKNGYAGYIDGGASQEEFYKFIKPILEKMDGTEELLVKLNREDLLRKQRTFDNGSIPHQIHLGELHAILRRQEDFYPFLKDNREKIEKILTFRIPYYVGPLARGNSRFAWMTRKSEETITPWNFEEVVDKGASAQSFIERMTNFDKNLPNEKVLPKHSLLYEYFTVYNELTKVKYVTEGMRKPAFLSGEQKKAIVDLLFKTNRKVTVKQLKEDYFKKIECFDSVEISGVEDRFNASLGTYHDLLKIIKDKDFLDNEENEDILEDIVLTLTLFEDREMIEERLKTYAHLFDDKVMKQLKRRRYTGWGRLSRKLINGIRDKQSGKTILDFLKSDGFANRNFMQLIHDDSLTFKEDIQKAQVSGQGDSLHEHIANLAGSPAIKKGILQTVKVVDELVKVMGRHKPENIVIEMARENQTTQKGQKNSRERMKRIEEGIKELGSQILKEHPVENTQLQNEKLYLYYLQNGRDMYVDQELDINRLSDYDVDHIVPQSFLKDDSIDNKVLTRSDKARGKSDNVPSEEVVKKMKNYWRQLLNAKLITQRKFDNLTKAERGGLSELDKAGFIKRQLVETRQITKHVAQILDSRMNTKYDENDKLIREVKVITLKSKLVSDFRKDFQFYKVREINNYHHAHDAYLNAVVGTALIKKYPKLESEFVYGDYKVYDVRKMIAKSEQEIGKATAKYFFYSNIMNFFKTEITLANGEIRKRPLIETNGETGEIVWDKGRDFATVRKVLSMPQVNIVKKTEVQTGGFSKESILPKRNSDKLIARKKDWDPKKYGGFDSPTVAYSVLVVAKVEKGKSKKLKSVKELLGITIMERSSFEKNPIDFLEAKGYKEVKKDLIIKLPKYSLFELENGRKRMLASAGELQKGNELALPSKYVNFLYLASHYEKLKGSPEDNEQKQLFVEQHKHYLDEIIEQISEFSKRVILADANLDKVLSAYNKHRDKPIREQAENIIHLFTLTNLGAPAAFKYFDTTIDRKRYTSTKEVLDATLIHQSITGLYETRIDLSQLGGDGGGSAGSAAGSGEFGGMDPLQLLQPLEAEIKGTKLKAHWNSGATITCVPEAFLEDERPIQTMLIKTIHGEKQQDVYYLTFKVQGRKVEAEVLASPYDYILLNPSDVPWLMKKPLQLTVLVPLHEYQERLLQQTALPKEQKELLQKLFLKYDALWQHWENQVGHRRIKPHNIATGTLAPRPQKQYPINPKAKPSIQIVIDDLLKQGVLIQQNSTMNTPVYPVPKPDGKWRMVLDYREVNKTIPLIAAQNQHSAGILSSIYRGKYKTTLDLTNGFWAHPITPESYWLTAFTWQGKQYCWTRLPQGFLNSPALFNADVVDLLKEIPNVQAYVDDIYISHDDPQEHLEQLEKIFSILLNAGYVVSLKKSEIAQREVEFLGFNITKEGRGLTDTFKQKLLNITPPKDLKQLQSILGLLNFARNFIPNYSELVKPLYTIVAPANGKFISWTEDNSNQLQHIISVLNQADNLEERNPETRLIIKVNSSPSAGYIRYYNEGSKRPIMYVNYIFSKAEAKFTQTEKLLTTMHKGLIKAMDLAMGQEILVYSPIVSMTKIQRTPLPERKALPVRWITWMTYLEDPRIQFHYDKSLPELQQIPNVTEDVIAKTKHPSEFAMVFYTDGSAIKHPDVNKSHSAGMGIAQVQFIPEYKIVHQWSIPLGDHTAQLAEIAAVEFACKKALKISGPVLIVTDSFYVAESANKELPYWKSNGFLNNKKKPLRHVSKWKSIAECLQLKPDIIIMHEKGHQQPMTTLHTEGNNLADKLATQGSYVVHAGKRTADGSEFEKRTADGSEFESPKKKAKVE

SEQ ID NO: 469 - protein, 2171 aa, synthetic construct
MPAAKRVKLDGGDKKYSIGLDIGTNSVGWAVITDEYKVPSKKFKVLGNTDRHSIKKNLIGALLFDSGETAEATRLKRTARRRYTRRKNRICYLQEIFSNEMAKVDDSFFHRLEESFLVEEDKKHERHPIFGNIVDEVAYHEKYPTIYHLRKKLVDSTDKADLRLIYLALAHMIKFRGHFLIEGDLNPDNSDVDKLFIQLVQTYNQLFEENPINASGVDAKAILSARLSKSRRLENLIAQLPGEKKNGLFGNLIALSLGLTPNFKSNFDLAEDAKLQLSKDTYDDDLDNLLAQIGDQYADLFLAAKNLSDAILLSDILRVNTEITKAPLSASMIKRYDEHHQDLTLLKALVRQQLPEKYKEIFFDQSKNGYAGYIDGGASQEEFYKFIKPILEKMDGTEELLVKLNREDLLRKQRTFDNGSIPHQIHLGELHAILRRQEDFYPFLKDNREKIEKILTFRIPYYVGPLARGNSRFAWMTRKSEETITPWNFEEVVDKGASAQSFIERMTNFDKNLPNEKVLPKHSLLYEYFTVYNELTKVKYVTEGMRKPAFLSGEQKKAIVDLLFKTNRKVTVKQLKEDYFKKIECFDSVEISGVEDRFNASLGTYHDLLKIIKDKDFLDNEENEDILEDIVLTLTLFEDREMIEERLKTYAHLFDDKVMKQLKRRRYTGWGRLSRKLINGIRDKQSGKTILDFLKSDGFANRNFMQLIHDDSLTFKEDIQKAQVSGQGDSLHEHIANLAGSPAIKKGILQTVKVVDELVKVMGRHKPENIVIEMARENQTTQKGQKNSRERMKRIEEGIKELGSQILKEHPVENTQLQNEKLYLYYLQNGRDMYVDQELDINRLSDYDVDHIVPQSFLKDDSIDNKVLTRSDKARGKSDNVPSEEVVKKMKNYWRQLLNAKLITQRKFDNLTKAERGGLSELDKAGFIKRQLVETRQITKHVAQILDSRMNTKYDENDKLIREVKVITLKSKLVSDFRKDFQFYKVREINNYHHAHDAYLNAVVGTALIKKYPKLESEFVYGDYKVYDVRKMIAKSEQEIGKATAKYFFYSNIMNFFKTEITLANGEIRKRPLIETNGETGEIVWDKGRDFATVRKVLSMPQVNIVKKTEVQTGGFSKESILPKRNSDKLIARKKDWDPKKYGGFDSPTVAYSVLVVAKVEKGKSKKLKSVKELLGITIMERSSFEKNPIDFLEAKGYKEVKKDLIIKLPKYSLFELENGRKRMLASAGELQKGNELALPSKYVNFLYLASHYEKLKGSPEDNEQKQLFVEQHKHYLDEIIEQISEFSKRVILADANLDKVLSAYNKHRDKPIREQAENIIHLFTLTNLGAPAAFKYFDTTIDRKRYTSTKEVLDATLIHQSITGLYETRIDLSQLGGDGGGGSGGSGGMDPLQLLQPLEAEIKGTKLKAHWNSGATITCVPEAFLEDERPIQTMLIKTIHGEKQQDVYYLTFKVQGRKVEAEVLASPYDYILLNPSDVPWLMKKPLQLTVLVPLHEYQERLLQQTALPKEQKELLQKLFLKYDALWQHWENQVGHRRIKPHNIATGTLAPRPQKQYPINPKAKPSIQIVIDDLLKQGVLIQQNSTMNTPVYPVPKPDGKWRMVLDYREVNKTIPLIAAQNQHSAGILSSIYRGKYKTTLDLTNGFWAHPITPESYWLTAFTWQGKQYCWTRLPQGFLNSPALFNADVVDLLKEIPNVQAYVDDIYISHDDPQEHLEQLEKIFSILLNAGYVVSLKKSEIAQREVEFLGFNITKEGRGLTDTFKQKLLNITPPKDLKQLQSILGLLNFARNFIPNYSELVKPLYTIVAPANGKFISWTEDNSNQLQHIISVLNQADNLEERNPETRLIIKVNSSPSAGYIRYYNEGSKRPIMYVNYIFSKAEAKFTQTEKLLTTMHKGLIKAMDLAMGQEILVYSPIVSMTKIQRTPLPERKALPVRWITWMTYLEDPRIQFHYDKSLPELQQIPNVTEDVIAKTKHPSEFAMVFYTDGSAIKHPDVNKSHSAGMGIAQVQFIPEYKIVHQWSIPLGDHTAQLAEIAAVEFACKKALKISGPVLIVTDSFYVAESANKELPYWKSNGFLNNKKKPLRHVSKWKSIAECLQLKPDIIIMHEKGHQQPMTTLHTEGNNLADKLATQGSYVVHAGKRTADGSEFEKRTADGSEFESPKKKAKVE

SEQ ID NO: 470 - protein, 2176 aa, synthetic construct
MPAAKRVKLDGGDKKYSIGLDIGTNSVGWAVITDEYKVPSKKFKVLGNTDRHSIKKNLIGALLFDSGETAEATRLKRTARRRYTRRKNRICYLQEIFSNEMAKVDDSFFHRLEESFLVEEDKKHERHPIFGNIVDEVAYHEKYPTIYHLRKKLVDSTDKADLRLIYLALAHMIKFRGHFLIEGDLNPDNSDVDKLFIQLVQTYNQLFEENPINASGVDAKAILSARLSKSRRLENLIAQLPGEKKNGLFGNLIALSLGLTPNFKSNFDLAEDAKLQLSKDTYDDDLDNLLAQIGDQYADLFLAAKNLSDAILLSDILRVNTEITKAPLSASMIKRYDEHHQDLTLLKALVRQQLPEKYKEIFFDQSKNGYAGYIDGGASQEEFYKFIKPILEKMDGTEELLVKLNREDLLRKQRTFDNGSIPHQIHLGELHAILRRQEDFYPFLKDNREKIEKILTFRIPYYVGPLARGNSRFAWMTRKSEETITPWNFEEVVDKGASAQSFIERMTNFDKNLPNEKVLPKHSLLYEYFTVYNELTKVKYVTEGMRKPAFLSGEQKKAIVDLLFKTNRKVTVKQLKEDYFKKIECFDSVEISGVEDRFNASLGTYHDLLKIIKDKDFLDNEENEDILEDIVLTLTLFEDREMIEERLKTYAHLFDDKVMKQLKRRRYTGWGRLSRKLINGIRDKQSGKTILDFLKSDGFANRNFMQLIHDDSLTFKEDIQKAQVSGQGDSLHEHIANLAGSPAIKKGILQTVKVVDELVKVMGRHKPENIVIEMARENQTTQKGQKNSRERMKRIEEGIKELGSQILKEHPVENTQLQNEKLYLYYLQNGRDMYVDQELDINRLSDYDVDHIVPQSFLKDDSIDNKVLTRSDKARGKSDNVPSEEVVKKMKNYWRQLLNAKLITQRKFDNLTKAERGGLSELDKAGFIKRQLVETRQITKHVAQILDSRMNTKYDENDKLIREVKVITLKSKLVSDFRKDFQFYKVREINNYHHAHDAYLNAVVGTALIKKYPKLESEFVYGDYKVYDVRKMIAKSEQEIGKATAKYFFYSNIMNFFKTEITLANGEIRKRPLIETNGETGEIVWDKGRDFATVRKVLSMPQVNIVKKTEVQTGGFSKESILPKRNSDKLIARKKDWDPKKYGGFDSPTVAYSVLVVAKVEKGKSKKLKSVKELLGITIMERSSFEKNPIDFLEAKGYKEVKKDLIIKLPKYSLFELENGRKRMLASAGELQKGNELALPSKYVNFLYLASHYEKLKGSPEDNEQKQLFVEQHKHYLDEIIEQISEFSKRVILADANLDKVLSAYNKHRDKPIREQAENIIHLFTLTNLGAPAAFKYFDTTIDRKRYTSTKEVLDATLIHQSITGLYETRIDLSQLGGDGGGGGEAAAKGGSGGMDPLQLLQPLEAEIKGTKLKAHWNSGATITCVPEAFLEDERPIQTMLIKTIHGEKQQDVYYLTFKVQGRKVEAEVLASPYDYILLNPSDVPWLMKKPLQLTVLVPLHEYQERLLQQTALPKEQKELLQKLFLKYDALWQHWENQVGHRRIKPHNIATGTLAPRPQKQYPINPKAKPSIQIVIDDLLKQGVLIQQNSTMNTPVYPVPKPDGKWRMVLDYREVNKTIPLIAAQNQHSAGILSSIYRGKYKTTLDLTNGFWAHPITPESYWLTAFTWQGKQYCWTRLPQGFLNSPALFNADVVDLLKEIPNVQAYVDDIYISHDDPQEHLEQLEKIFSILLNAGYVVSLKKSEIAQREVEFLGFNITKEGRGLTDTFKQKLLNITPPKDLKQLQSILGLLNFARNFIPNYSELVKPLYTIVAPANGKFISWTEDNSNQLQHIISVLNQADNLEERNPETRLIIKVNSSPSAGYIRYYNEGSKRPIMYVNYIFSKAEAKFTQTEKLLTTMHKGLIKAMDLAMGQEILVYSPIVSMTKIQRTPLPERKALPVRWITWMTYLEDPRIQFHYDKSLPELQQIPNVTEDVIAKTKHPSEFAMVFYTDGSAIKHPDVNKSHSAGMGIAQVQFIPEYKIVHQWSIPLGDHTAQLAEIAAVEFACKKALKISGPVLIVTDSFYVAESANKELPYWKSNGFLNNKKKPLRHVSKWKSIAECLQLKPDIIIMHEKGHQQPMTTLHTEGNNLADKLATQGSYVVHAGKRTADGSEFEKRTADGSEFESPKKKAKVE

SEQ ID NO: 471 - protein, 2174 aa, synthetic construct
MPAAKRVKLDGGDKKYSIGLDIGTNSVGWAVITDEYKVPSKKFKVLGNTDRHSIKKNLIGALLFDSGETAEATRLKRTARRRYTRRKNRICYLQEIFSNEMAKVDDSFFHRLEESFLVEEDKKHERHPIFGNIVDEVAYHEKYPTIYHLRKKLVDSTDKADLRLIYLALAHMIKFRGHFLIEGDLNPDNSDVDKLFIQLVQTYNQLFEENPINASGVDAKAILSARLSKSRRLENLIAQLPGEKKNGLFGNLIALSLGLTPNFKSNFDLAEDAKLQLSKDTYDDDLDNLLAQIGDQYADLFLAAKNLSDAILLSDILRVNTEITKAPLSASMIKRYDEHHQDLTLLKALVRQQLPEKYKEIFFDQSKNGYAGYIDGGASQEEFYKFIKPILEKMDGTEELLVKLNREDLLRKQRTFDNGSIPHQIHLGELHAILRRQEDFYPFLKDNREKIEKILTFRIPYYVGPLARGNSRFAWMTRKSEETITPWNFEEVVDKGASAQSFIERMTNFDKNLPNEKVLPKHSLLYEYFTVYNELTKVKYVTEGMRKPAFLSGEQKKAIVDLLFKTNRKVTVKQLKEDYFKKIECFDSVEISGVEDRFNASLGTYHDLLKIIKDKDFLDNEENEDILEDIVLTLTLFEDREMIEERLKTYAHLFDDKVMKQLKRRRYTGWGRLSRKLINGIRDKQSGKTILDFLKSDGFANRNFMQLIHDDSLTFKEDIQKAQVSGQGDSLHEHIANLAGSPAIKKGILQTVKVVDELVKVMGRHKPENIVIEMARENQTTQKGQKNSRERMKRIEEGIKELGSQILKEHPVENTQLQNEKLYLYYLQNGRDMYVDQELDINRLSDYDVDHIVPQSFLKDDSIDNKVLTRSDKARGKSDNVPSEEVVKKMKNYWRQLLNAKLITQRKFDNLTKAERGGLSELDKAGFIKRQLVETRQITKHVAQILDSRMNTKYDENDKLIREVKVITLKSKLVSDFRKDFQFYKVREINNYHHAHDAYLNAVVGTALIKKYPKLESEFVYGDYKVYDVRKMIAKSEQEIGKATAKYFFYSNIMNFFKTEITLANGEIRKRPLIETNGETGEIVWDKGRDFATVRKVLSMPQVNIVKKTEVQTGGFSKESILPKRNSDKLIARKKDWDPKKYGGFDSPTVAYSVLVVAKVEKGKSKKLKSVKELLGITIMERSSFEKNPIDFLEAKGYKEVKKDLIIKLPKYSLFELENGRKRMLASAGELQKGNELALPSKYVNFLYLASHYEKLKGSPEDNEQKQLFVEQHKHYLDEIIEQISEFSKRVILADANLDKVLSAYNKHRDKPIREQAENIIHLFTLTNLGAPAAFKYFDTTIDRKRYTSTKEVLDATLIHQSITGLYETRIDLSQLGGDGGPAPAPAPAPGGMDPLQLLQPLEAEIKGTKLKAHWNSGATITCVPEAFLEDERPIQTMLIKTIHGEKQQDVYYLTFKVQGRKVEAEVLASPYDYILLNPSDVPWLMKKPLQLTVLVPLHEYQERLLQQTALPKEQKELLQKLFLKYDALWQHWENQVGHRRIKPHNIATGTLAPRPQKQYPINPKAKPSIQIVIDDLLKQGVLIQQNSTMNTPVYPVPKPDGKWRMVLDYREVNKTIPLIAAQNQHSAGILSSIYRGKYKTTLDLTNGFWAHPITPESYWLTAFTWQGKQYCWTRLPQGFLNSPALFNADVVDLLKEIPNVQAYVDDIYISHDDPQEHLEQLEKIFSILLNAGYVVSLKKSEIAQREVEFLGFNITKEGRGLTDTFKQKLLNITPPKDLKQLQSILGLLNFARNFIPNYSELVKPLYTIVAPANGKFISWTEDNSNQLQHIISVLNQADNLEERNPETRLIIKVNSSPSAGYIRYYNEGSKRPIMYVNYIFSKAEAKFTQTEKLLTTMHKGLIKAMDLAMGQEILVYSPIVSMTKIQRTPLPERKALPVRWITWMTYLEDPRIQFHYDKSLPELQQIPNVTEDVIAKTKHPSEFAMVFYTDGSAIKHPDVNKSHSAGMGIAQVQFIPEYKIVHQWSIPLGDHTAQLAEIAAVEFACKKALKISGPVLIVTDSFYVAESANKELPYWKSNGFLNNKKKPLRHVSKWKSIAECLQLKPDIIIMHEKGHQQPMTTLHTEGNNLADKLATQGSYVVHAGKRTADGSEFEKRTADGSEFESPKKKAKVE

SEQ ID NO: 472 - protein, 2174 aa, synthetic construct
MPAAKRVKLDGGDKKYSIGLDIGTNSVGWAVITDEYKVPSKKFKVLGNTDRHSIKKNLIGALLFDSGETAEATRLKRTARRRYTRRKNRICYLQEIFSNEMAKVDDSFFHRLEESFLVEEDKKHERHPIFGNIVDEVAYHEKYPTIYHLRKKLVDSTDKADLRLIYLALAHMIKFRGHFLIEGDLNPDNSDVDKLFIQLVQTYNQLFEENPINASGVDAKAILSARLSKSRRLENLIAQLPGEKKNGLFGNLIALSLGLTPNFKSNFDLAEDAKLQLSKDTYDDDLDNLLAQIGDQYADLFLAAKNLSDAILLSDILRVNTEITKAPLSASMIKRYDEHHQDLTLLKALVRQQLPEKYKEIFFDQSKNGYAGYIDGGASQEEFYKFIKPILEKMDGTEELLVKLNREDLLRKQRTFDNGSIPHQIHLGELHAILRRQEDFYPFLKDNREKIEKILTFRIPYYVGPLARGNSRFAWMTRKSEETITPWNFEEVVDKGASAQSFIERMTNFDKNLPNEKVLPKHSLLYEYFTVYNELTKVKYVTEGMRKPAFLSGEQKKAIVDLLFKTNRKVTVKQLKEDYFKKIECFDSVEISGVEDRFNASLGTYHDLLKIIKDKDFLDNEENEDILEDIVLTLTLFEDREMIEERLKTYAHLFDDKVMKQLKRRRYTGWGRLSRKLINGIRDKQSGKTILDFLKSDGFANRNFMQLIHDDSLTFKEDIQKAQVSGQGDSLHEHIANLAGSPAIKKGILQTVKVVDELVKVMGRHKPENIVIEMARENQTTQKGQKNSRERMKRIEEGIKELGSQILKEHPVENTQLQNEKLYLYYLQNGRDMYVDQELDINRLSDYDVDHIVPQSFLKDDSIDNKVLTRSDKARGKSDNVPSEEVVKKMKNYWRQLLNAKLITQRKFDNLTKAERGGLSELDKAGFIKRQLVETRQITKHVAQILDSRMNTKYDENDKLIREVKVITLKSKLVSDFRKDFQFYKVREINNYHHAHDAYLNAVVGTALIKKYPKLESEFVYGDYKVYDVRKMIAKSEQEIGKATAKYFFYSNIMNFFKTEITLANGEIRKRPLIETNGETGEIVWDKGRDFATVRKVLSMPQVNIVKKTEVQTGGFSKESILPKRNSDKLIARKKDWDPKKYGGFDSPTVAYSVLVVAKVEKGKSKKLKSVKELLGITIMERSSFEKNPIDFLEAKGYKEVKKDLIIKLPKYSLFELENGRKRMLASAGELQKGNELALPSKYVNFLYLASHYEKLKGSPEDNEQKQLFVEQHKHYLDEIIEQISEFSKRVILADANLDKVLSAYNKHRDKPIREQAENIIHLFTLTNLGAPAAFKYFDTTIDRKRYTSTKEVLDATLIHQSITGLYETRIDLSQLGGDGGGSSGGSGGGGGMDPLQLLQPLEAEIKGTKLKAHWNSGATITCVPEAFLEDERPIQTMLIKTIHGEKQQDVYYLTFKVQGRKVEAEVLASPYDYILLNPSDVPWLMKKPLQLTVLVPLHEYQERLLQQTALPKEQKELLQKLFLKYDALWQHWENQVGHRRIKPHNIATGTLAPRPQKQYPINPKAKPSIQIVIDDLLKQGVLIQQNSTMNTPVYPVPKPDGKWRMVLDYREVNKTIPLIAAQNQHSAGILSSIYRGKYKTTLDLTNGFWAHPITPESYWLTAFTWQGKQYCWTRLPQGFLNSPALFNADVVDLLKEIPNVQAYVDDIYISHDDPQEHLEQLEKIFSILLNAGYVVSLKKSEIAQREVEFLGFNITKEGRGLTDTFKQKLLNITPPKDLKQLQSILGLLNFARNFIPNYSELVKPLYTIVAPANGKFISWTEDNSNQLQHIISVLNQADNLEERNPETRLIIKVNSSPSAGYIRYYNEGSKRPIMYVNYIFSKAEAKFTQTEKLLTTMHKGLIKAMDLAMGQEILVYSPIVSMTKIQRTPLPERKALPVRWITWMTYLEDPRIQFHYDKSLPELQQIPNVTEDVIAKTKHPSEFAMVFYTDGSAIKHPDVNKSHSAGMGIAQVQFIPEYKIVHQWSIPLGDHTAQLAEIAAVEFACKKALKISGPVLIVTDSFYVAESANKELPYWKSNGFLNNKKKPLRHVSKWKSIAECLQLKPDIIIMHEKGHQQPMTTLHTEGNNLADKLATQGSYVVHAGKRTADGSEFEKRTADGSEFESPKKKAKVE

SEQ ID NO: 473 - protein, 2174 aa, synthetic construct
MPAAKRVKLDGGDKKYSIGLDIGTNSVGWAVITDEYKVPSKKFKVLGNTDRHSIKKNLIGALLFDSGETAEATRLKRTARRRYTRRKNRICYLQEIFSNEMAKVDDSFFHRLEESFLVEEDKKHERHPIFGNIVDEVAYHEKYPTIYHLRKKLVDSTDKADLRLIYLALAHMIKFRGHFLIEGDLNPDNSDVDKLFIQLVQTYNQLFEENPINASGVDAKAILSARLSKSRRLENLIAQLPGEKKNGLFGNLIALSLGLTPNFKSNFDLAEDAKLQLSKDTYDDDLDNLLAQIGDQYADLFLAAKNLSDAILLSDILRVNTEITKAPLSASMIKRYDEHHQDLTLLKALVRQQLPEKYKEIFFDQSKNGYAGYIDGGASQEEFYKFIKPILEKMDGTEELLVKLNREDLLRKQRTFDNGSIPHQIHLGELHAILRRQEDFYPFLKDNREKIEKILTFRIPYYVGPLARGNSRFAWMTRKSEETITPWNFEEVVDKGASAQSFIERMTNFDKNLPNEKVLPKHSLLYEYFTVYNELTKVKYVTEGMRKPAFLSGEQKKAIVDLLFKTNRKVTVKQLKEDYFKKIECFDSVEISGVEDRFNASLGTYHDLLKIIKDKDFLDNEENEDILEDIVLTLTLFEDREMIEERLKTYAHLFDDKVMKQLKRRRYTGWGRLSRKLINGIRDKQSGKTILDFLKSDGFANRNFMQLIHDDSLTFKEDIQKAQVSGQGDSLHEHIANLAGSPAIKKGILQTVKVVDELVKVMGRHKPENIVIEMARENQTTQKGQKNSRERMKRIEEGIKELGSQILKEHPVENTQLQNEKLYLYYLQNGRDMYVDQELDINRLSDYDVDHIVPQSFLKDDSIDNKVLTRSDKARGKSDNVPSEEVVKKMKNYWRQLLNAKLITQRKFDNLTKAERGGLSELDKAGFIKRQLVETRQITKHVAQILDSRMNTKYDENDKLIREVKVITLKSKLVSDFRKDFQFYKVREINNYHHAHDAYLNAVVGTALIKKYPKLESEFVYGDYKVYDVRKMIAKSEQEIGKATAKYFFYSNIMNFFKTEITLANGEIRKRPLIETNGETGEIVWDKGRDFATVRKVLSMPQVNIVKKTEVQTGGFSKESILPKRNSDKLIARKKDWDPKKYGGFDSPTVAYSVLVVAKVEKGKSKKLKSVKELLGITIMERSSFEKNPIDFLEAKGYKEVKKDLIIKLPKYSLFELENGRKRMLASAGELQKGNELALPSKYVNFLYLASHYEKLKGSPEDNEQKQLFVEQHKHYLDEIIEQISEFSKRVILADANLDKVLSAYNKHRDKPIREQAENIIHLFTLTNLGAPAAFKYFDTTIDRKRYTSTKEVLDATLIHQSITGLYETRIDLSQLGGDGGPAPGSSGGSGGMDPLQLLQPLEAEIKGTKLKAHWNSGATITCVPEAFLEDERPIQTMLIKTIHGEKQQDVYYLTFKVQGRKVEAEVLASPYDYILLNPSDVPWLMKKPLQLTVLVPLHEYQERLLQQTALPKEQKELLQKLFLKYDALWQHWENQVGHRRIKPHNIATGTLAPRPQKQYPINPKAKPSIQIVIDDLLKQGVLIQQNSTMNTPVYPVPKPDGKWRMVLDYREVNKTIPLIAAQNQHSAGILSSIYRGKYKTTLDLTNGFWAHPITPESYWLTAFTWQGKQYCWTRLPQGFLNSPALFNADVVDLLKEIPNVQAYVDDIYISHDDPQEHLEQLEKIFSILLNAGYVVSLKKSEIAQREVEFLGFNITKEGRGLTDTFKQKLLNITPPKDLKQLQSILGLLNFARNFIPNYSELVKPLYTIVAPANGKFISWTEDNSNQLQHIISVLNQADNLEERNPETRLIIKVNSSPSAGYIRYYNEGSKRPIMYVNYIFSKAEAKFTQTEKLLTTMHKGLIKAMDLAMGQEILVYSPIVSMTKIQRTPLPERKALPVRWITWMTYLEDPRIQFHYDKSLPELQQIPNVTEDVIAKTKHPSEFAMVFYTDGSAIKHPDVNKSHSAGMGIAQVQFIPEYKIVHQWSIPLGDHTAQLAEIAAVEFACKKALKISGPVLIVTDSFYVAESANKELPYWKSNGFLNNKKKPLRHVSKWKSIAECLQLKPDIIIMHEKGHQQPMTTLHTEGNNLADKLATQGSYVVHAGKRTADGSEFEKRTADGSEFESPKKKAKVE

SEQ ID NO: 474 - protein, 2176 aa, synthetic construct
MPAAKRVKLDGGDKKYSIGLDIGTNSVGWAVITDEYKVPSKKFKVLGNTDRHSIKKNLIGALLFDSGETAEATRLKRTARRRYTRRKNRICYLQEIFSNEMAKVDDSFFHRLEESFLVEEDKKHERHPIFGNIVDEVAYHEKYPTIYHLRKKLVDSTDKADLRLIYLALAHMIKFRGHFLIEGDLNPDNSDVDKLFIQLVQTYNQLFEENPINASGVDAKAILSARLSKSRRLENLIAQLPGEKKNGLFGNLIALSLGLTPNFKSNFDLAEDAKLQLSKDTYDDDLDNLLAQIGDQYADLFLAAKNLSDAILLSDILRVNTEITKAPLSASMIKRYDEHHQDLTLLKALVRQQLPEKYKEIFFDQSKNGYAGYIDGGASQEEFYKFIKPILEKMDGTEELLVKLNREDLLRKQRTFDNGSIPHQIHLGELHAILRRQEDFYPFLKDNREKIEKILTFRIPYYVGPLARGNSRFAWMTRKSEETITPWNFEEVVDKGASAQSFIERMTNFDKNLPNEKVLPKHSLLYEYFTVYNELTKVKYVTEGMRKPAFLSGEQKKAIVDLLFKTNRKVTVKQLKEDYFKKIECFDSVEISGVEDRFNASLGTYHDLLKIIKDKDFLDNEENEDILEDIVLTLTLFEDREMIEERLKTYAHLFDDKVMKQLKRRRYTGWGRLSRKLINGIRDKQSGKTILDFLKSDGFANRNFMQLIHDDSLTFKEDIQKAQVSGQGDSLHEHIANLAGSPAIKKGILQTVKVVDELVKVMGRHKPENIVIEMARENQTTQKGQKNSRERMKRIEEGIKELGSQILKEHPVENTQLQNEKLYLYYLQNGRDMYVDQELDINRLSDYDVDHIVPQSFLKDDSIDNKVLTRSDKARGKSDNVPSEEVVKKMKNYWRQLLNAKLITQRKFDNLTKAERGGLSELDKAGFIKRQLVETRQITKHVAQILDSRMNTKYDENDKLIREVKVITLKSKLVSDFRKDFQFYKVREINNYHHAHDAYLNAVVGTALIKKYPKLESEFVYGDYKVYDVRKMIAKSEQEIGKATAKYFFYSNIMNFFKTEITLANGEIRKRPLIETNGETGEIVWDKGRDFATVRKVLSMPQVNIVKKTEVQTGGFSKESILPKRNSDKLIARKKDWDPKKYGGFDSPTVAYSVLVVAKVEKGKSKKLKSVKELLGITIMERSSFEKNPIDFLEAKGYKEVKKDLIIKLPKYSLFELENGRKRMLASAGELQKGNELALPSKYVNFLYLASHYEKLKGSPEDNEQKQLFVEQHKHYLDEIIEQISEFSKRVILADANLDKVLSAYNKHRDKPIREQAENIIHLFTLTNLGAPAAFKYFDTTIDRKRYTSTKEVLDATLIHQSITGLYETRIDLSQLGGDGGPAPGGSEAAAKGGMDPLQLLQPLEAEIKGTKLKAHWNSGATITCVPEAFLEDERPIQTMLIKTIHGEKQQDVYYLTFKVQGRKVEAEVLASPYDYILLNPSDVPWLMKKPLQLTVLVPLHEYQERLLQQTALPKEQKELLQKLFLKYDALWQHWENQVGHRRIKPHNIATGTLAPRPQKQYPINPKAKPSIQIVIDDLLKQGVLIQQNSTMNTPVYPVPKPDGKWRMVLDYREVNKTIPLIAAQNQHSAGILSSIYRGKYKTTLDLTNGFWAHPITPESYWLTAFTWQGKQYCWTRLPQGFLNSPALFNADVVDLLKEIPNVQAYVDDIYISHDDPQEHLEQLEKIFSILLNAGYVVSLKKSEIAQREVEFLGFNITKEGRGLTDTFKQKLLNITPPKDLKQLQSILGLLNFARNFIPNYSELVKPLYTIVAPANGKFISWTEDNSNQLQHIISVLNQADNLEERNPETRLIIKVNSSPSAGYIRYYNEGSKRPIMYVNYIFSKAEAKFTQTEKLLTTMHKGLIKAMDLAMGQEILVYSPIVSMTKIQRTPLPERKALPVRWITWMTYLEDPRIQFHYDKSLPELQQIPNVTEDVIAKTKHPSEFAMVFYTDGSAIKHPDVNKSHSAGMGIAQVQFIPEYKIVHQWSIPLGDHTAQLAEIAAVEFACKKALKISGPVLIVTDSFYVAESANKELPYWKSNGFLNNKKKPLRHVSKWKSIAECLQLKPDIIIMHEKGHQQPMTTLHTEGNNLADKLATQGSYVVHAGKRTADGSEFEKRTADGSEFESPKKKAKVE

SEQ ID NO: 475 - protein, 2176 aa, synthetic construct
MPAAKRVKLDGGDKKYSIGLDIGTNSVGWAVITDEYKVPSKKFKVLGNTDRHSIKKNLIGALLFDSGETAEATRLKRTARRRYTRRKNRICYLQEIFSNEMAKVDDSFFHRLEESFLVEEDKKHERHPIFGNIVDEVAYHEKYPTIYHLRKKLVDSTDKADLRLIYLALAHMIKFRGHFLIEGDLNPDNSDVDKLFIQLVQTYNQLFEENPINASGVDAKAILSARLSKSRRLENLIAQLPGEKKNGLFGNLIALSLGLTPNFKSNFDLAEDAKLQLSKDTYDDDLDNLLAQIGDQYADLFLAAKNLSDAILLSDILRVNTEITKAPLSASMIKRYDEHHQDLTLLKALVRQQLPEKYKEIFFDQSKNGYAGYIDGGASQEEFYKFIKPILEKMDGTEELLVKLNREDLLRKQRTFDNGSIPHQIHLGELHAILRRQEDFYPFLKDNREKIEKILTFRIPYYVGPLARGNSRFAWMTRKSEETITPWNFEEVVDKGASAQSFIERMTNFDKNLPNEKVLPKHSLLYEYFTVYNELTKVKYVTEGMRKPAFLSGEQKKAIVDLLFKTNRKVTVKQLKEDYFKKIECFDSVEISGVEDRFNASLGTYHDLLKIIKDKDFLDNEENEDILEDIVLTLTLFEDREMIEERLKTYAHLFDDKVMKQLKRRRYTGWGRLSRKLINGIRDKQSGKTILDFLKSDGFANRNFMQLIHDDSLTFKEDIQKAQVSGQGDSLHEHIANLAGSPAIKKGILQTVKVVDELVKVMGRHKPENIVIEMARENQTTQKGQKNSRERMKRIEEGIKELGSQILKEHPVENTQLQNEKLYLYYLQNGRDMYVDQELDINRLSDYDVDHIVPQSFLKDDSIDNKVLTRSDKARGKSDNVPSEEVVKKMKNYWRQLLNAKLITQRKFDNLTKAERGGLSELDKAGFIKRQLVETRQITKHVAQILDSRMNTKYDENDKLIREVKVITLKSKLVSDFRKDFQFYKVREINNYHHAHDAYLNAVVGTALIKKYPKLESEFVYGDYKVYDVRKMIAKSEQEIGKATAKYFFYSNIMNFFKTEITLANGEIRKRPLIETNGETGEIVWDKGRDFATVRKVLSMPQVNIVKKTEVQTGGFSKESILPKRNSDKLIARKKDWDPKKYGGFDSPTVAYSVLVVAKVEKGKSKKLKSVKELLGITIMERSSFEKNPIDFLEAKGYKEVKKDLIIKLPKYSLFELENGRKRMLASAGELQKGNELALPSKYVNFLYLASHYEKLKGSPEDNEQKQLFVEQHKHYLDEIIEQISEFSKRVILADANLDKVLSAYNKHRDKPIREQAENIIHLFTLTNLGAPAAFKYFDTTIDRKRYTSTKEVLDATLIHQSITGLYETRIDLSQLGGDGGEAAAKGGGGSSGGMDPLQLLQPLEAEIKGTKLKAHWNSGATITCVPEAFLEDERPIQTMLIKTIHGEKQQDVYYLTFKVQGRKVEAEVLASPYDYILLNPSDVPWLMKKPLQLTVLVPLHEYQERLLQQTALPKEQKELLQKLFLKYDALWQHWENQVGHRRIKPHNIATGTLAPRPQKQYPINPKAKPSIQIVIDDLLKQGVLIQQNSTMNTPVYPVPKPDGKWRMVLDYREVNKTIPLIAAQNQHSAGILSSIYRGKYKTTLDLTNGFWAHPITPESYWLTAFTWQGKQYCWTRLPQGFLNSPALFNADVVDLLKEIPNVQAYVDDIYISHDDPQEHLEQLEKIFSILLNAGYVVSLKKSEIAQREVEFLGFNITKEGRGLTDTFKQKLLNITPPKDLKQLQSILGLLNFARNFIPNYSELVKPLYTIVAPANGKFISWTEDNSNQLQHIISVLNQADNLEERNPETRLIIKVNSSPSAGYIRYYNEGSKRPIMYVNYIFSKAEAKFTQTEKLLTTMHKGLIKAMDLAMGQEILVYSPIVSMTKIQRTPLPERKALPVRWITWMTYLEDPRIQFHYDKSLPELQQIPNVTEDVIAKTKHPSEFAMVFYTDGSAIKHPDVNKSHSAGMGIAQVQFIPEYKIVHQWSIPLGDHTAQLAEIAAVEFACKKALKISGPVLIVTDSFYVAESANKELPYWKSNGFLNNKKKPLRHVSKWKSIAECLQLKPDIIIMHEKGHQQPMTTLHTEGNNLADKLATQGSYVVHAGKRTADGSEFEKRTADGSEFESPKKKAKVE

SEQ ID NO: 476 - protein, 2174 aa, synthetic construct
MPAAKRVKLDGGDKKYSIGLDIGTNSVGWAVITDEYKVPSKKFKVLGNTDRHSIKKNLIGALLFDSGETAEATRLKRTARRRYTRRKNRICYLQEIFSNEMAKVDDSFFHRLEESFLVEEDKKHERHPIFGNIVDEVAYHEKYPTIYHLRKKLVDSTDKADLRLIYLALAHMIKFRGHFLIEGDLNPDNSDVDKLFIQLVQTYNQLFEENPINASGVDAKAILSARLSKSRRLENLIAQLPGEKKNGLFGNLIALSLGLTPNFKSNFDLAEDAKLQLSKDTYDDDLDNLLAQIGDQYADLFLAAKNLSDAILLSDILRVNTEITKAPLSASMIKRYDEHHQDLTLLKALVRQQLPEKYKEIFFDQSKNGYAGYIDGGASQEEFYKFIKPILEKMDGTEELLVKLNREDLLRKQRTFDNGSIPHQIHLGELHAILRRQEDFYPFLKDNREKIEKILTFRIPYYVGPLARGNSRFAWMTRKSEETITPWNFEEVVDKGASAQSFIERMTNFDKNLPNEKVLPKHSLLYEYFTVYNELTKVKYVTEGMRKPAFLSGEQKKAIVDLLFKTNRKVTVKQLKEDYFKKIECFDSVEISGVEDRFNASLGTYHDLLKIIKDKDFLDNEENEDILEDIVLTLTLFEDREMIEERLKTYAHLFDDKVMKQLKRRRYTGWGRLSRKLINGIRDKQSGKTILDFLKSDGFANRNFMQLIHDDSLTFKEDIQKAQVSGQGDSLHEHIANLAGSPAIKKGILQTVKVVDELVKVMGRHKPENIVIEMARENQTTQKGQKNSRERMKRIEEGIKELGSQILKEHPVENTQLQNEKLYLYYLQNGRDMYVDQELDINRLSDYDVDHIVPQSFLKDDSIDNKVLTRSDKARGKSDNVPSEEVVKKMKNYWRQLLNAKLITQRKFDNLTKAERGGLSELDKAGFIKRQLVETRQITKHVAQILDSRMNTKYDENDKLIREVKVITLKSKLVSDFRKDFQFYKVREINNYHHAHDAYLNAVVGTALIKKYPKLESEFVYGDYKVYDVRKMIAKSEQEIGKATAKYFFYSNIMNFFKTEITLANGEIRKRPLIETNGETGEIVWDKGRDFATVRKVLSMPQVNIVKKTEVQTGGFSKESILPKRNSDKLIARKKDWDPKKYGGFDSPTVAYSVLVVAKVEKGKSKKLKSVKELLGITIMERSSFEKNPIDFLEAKGYKEVKKDLIIKLPKYSLFELENGRKRMLASAGELQKGNELALPSKYVNFLYLASHYEKLKGSPEDNEQKQLFVEQHKHYLDEIIEQISEFSKRVILADANLDKVLSAYNKHRDKPIREQAENIIHLFTLTNLGAPAAFKYFDTTIDRKRYTSTKEVLDATLIHQSITGLYETRIDLSQLGGDGGGSSGGGGGSGGMDPLQLLQPLEAEIKGTKLKAHWNSGATITCVPEAFLEDERPIQTMLIKTIHGEKQQDVYYLTFKVQGRKVEAEVLASPYDYILLNPSDVPWLMKKPLQLTVLVPLHEYQERLLQQTALPKEQKELLQKLFLKYDALWQHWENQVGHRRIKPHNIATGTLAPRPQKQYPINPKAKPSIQIVIDDLLKQGVLIQQNSTMNTPVYPVPKPDGKWRMVLDYREVNKTIPLIAAQNQHSAGILSSIYRGKYKTTLDLTNGFWAHPITPESYWLTAFTWQGKQYCWTRLPQGFLNSPALFNADVVDLLKEIPNVQAYVDDIYISHDDPQEHLEQLEKIFSILLNAGYVVSLKKSEIAQREVEFLGFNITKEGRGLTDTFKQKLLNITPPKDLKQLQSILGLLNFARNFIPNYSELVKPLYTIVAPANGKFISWTEDNSNQLQHIISVLNQADNLEERNPETRLIIKVNSSPSAGYIRYYNEGSKRPIMYVNYIFSKAEAKFTQTEKLLTTMHKGLIKAMDLAMGQEILVYSPIVSMTKIQRTPLPERKALPVRWITWMTYLEDPRIQFHYDKSLPELQQIPNVTEDVIAKTKHPSEFAMVFYTDGSAIKHPDVNKSHSAGMGIAQVQFIPEYKIVHQWSIPLGDHTAQLAEIAAVEFACKKALKISGPVLIVTDSFYVAESANKELPYWKSNGFLNNKKKPLRHVSKWKSIAECLQLKPDIIIMHEKGHQQPMTTLHTEGNNLADKLATQGSYVVHAGKRTADGSEFEKRTADGSEFESPKKKAKVE

SEQ ID NO: 477 - protein, 2171 aa, synthetic construct
MPAAKRVKLDGGDKKYSIGLDIGTNSVGWAVITDEYKVPSKKFKVLGNTDRHSIKKNLIGALLFDSGETAEATRLKRTARRRYTRRKNRICYLQEIFSNEMAKVDDSFFHRLEESFLVEEDKKHERHPIFGNIVDEVAYHEKYPTIYHLRKKLVDSTDKADLRLIYLALAHMIKFRGHFLIEGDLNPDNSDVDKLFIQLVQTYNQLFEENPINASGVDAKAILSARLSKSRRLENLIAQLPGEKKNGLFGNLIALSLGLTPNFKSNFDLAEDAKLQLSKDTYDDDLDNLLAQIGDQYADLFLAAKNLSDAILLSDILRVNTEITKAPLSASMIKRYDEHHQDLTLLKALVRQQLPEKYKEIFFDQSKNGYAGYIDGGASQEEFYKFIKPILEKMDGTEELLVKLNREDLLRKQRTFDNGSIPHQIHLGELHAILRRQEDFYPFLKDNREKIEKILTFRIPYYVGPLARGNSRFAWMTRKSEETITPWNFEEVVDKGASAQSFIERMTNFDKNLPNEKVLPKHSLLYEYFTVYNELTKVKYVTEGMRKPAFLSGEQKKAIVDLLFKTNRKVTVKQLKEDYFKKIECFDSVEISGVEDRFNASLGTYHDLLKIIKDKDFLDNEENEDILEDIVLTLTLFEDREMIEERLKTYAHLFDDKVMKQLKRRRYTGWGRLSRKLINGIRDKQSGKTILDFLKSDGFANRNFMQLIHDDSLTFKEDIQKAQVSGQGDSLHEHIANLAGSPAIKKGILQTVKVVDELVKVMGRHKPENIVIEMARENQTTQKGQKNSRERMKRIEEGIKELGSQILKEHPVENTQLQNEKLYLYYLQNGRDMYVDQELDINRLSDYDVDHIVPQSFLKDDSIDNKVLTRSDKARGKSDNVPSEEVVKKMKNYWRQLLNAKLITQRKFDNLTKAERGGLSELDKAGFIKRQLVETRQITKHVAQILDSRMNTKYDENDKLIREVKVITLKSKLVSDFRKDFQFYKVREINNYHHAHDAYLNAVVGTALIKKYPKLESEFVYGDYKVYDVRKMIAKSEQEIGKATAKYFFYSNIMNFFKTEITLANGEIRKRPLIETNGETGEIVWDKGRDFATVRKVLSMPQVNIVKKTEVQTGGFSKESILPKRNSDKLIARKKDWDPKKYGGFDSPTVAYSVLVVAKVEKGKSKKLKSVKELLGITIMERSSFEKNPIDFLEAKGYKEVKKDLIIKLPKYSLFELENGRKRMLASAGELQKGNELALPSKYVNFLYLASHYEKLKGSPEDNEQKQLFVEQHKHYLDEIIEQISEFSKRVILADANLDKVLSAYNKHRDKPIREQAENIIHLFTLTNLGAPAAFKYFDTTIDRKRYTSTKEVLDATLIHQSITGLYETRIDLSQLGGDGGGSSPAPGGMDPLQLLQPLEAEIKGTKLKAHWNSGATITCVPEAFLEDERPIQTMLIKTIHGEKQQDVYYLTFKVQGRKVEAEVLASPYDYILLNPSDVPWLMKKPLQLTVLVPLHEYQERLLQQTALPKEQKELLQKLFLKYDALWQHWENQVGHRRIKPHNIATGTLAPRPQKQYPINPKAKPSIQIVIDDLLKQGVLIQQNSTMNTPVYPVPKPDGKWRMVLDYREVNKTIPLIAAQNQHSAGILSSIYRGKYKTTLDLTNGFWAHPITPESYWLTAFTWQGKQYCWTRLPQGFLNSPALFNADVVDLLKEIPNVQAYVDDIYISHDDPQEHLEQLEKIFSILLNAGYVVSLKKSEIAQREVEFLGFNITKEGRGLTDTFKQKLLNITPPKDLKQLQSILGLLNFARNFIPNYSELVKPLYTIVAPANGKFISWTEDNSNQLQHIISVLNQADNLEERNPETRLIIKVNSSPSAGYIRYYNEGSKRPIMYVNYIFSKAEAKFTQTEKLLTTMHKGLIKAMDLAMGQEILVYSPIVSMTKIQRTPLPERKALPVRWITWMTYLEDPRIQFHYDKSLPELQQIPNVTEDVIAKTKHPSEFAMVFYTDGSAIKHPDVNKSHSAGMGIAQVQFIPEYKIVHQWSIPLGDHTAQLAEIAAVEFACKKALKISGPVLIVTDSFYVAESANKELPYWKSNGFLNNKKKPLRHVSKWKSIAECLQLKPDIIIMHEKGHQQPMTTLHTEGNNLADKLATQGSYVVHAGKRTADGSEFEKRTADGSEFESPKKKAKVE

SEQ ID NO: 478 - protein, 2178 aa, synthetic construct
MPAAKRVKLDGGDKKYSIGLDIGTNSVGWAVITDEYKVPSKKFKVLGNTDRHSIKKNLIGALLFDSGETAEATRLKRTARRRYTRRKNRICYLQEIFSNEMAKVDDSFFHRLEESFLVEEDKKHERHPIFGNIVDEVAYHEKYPTIYHLRKKLVDSTDKADLRLIYLALAHMIKFRGHFLIEGDLNPDNSDVDKLFIQLVQTYNQLFEENPINASGVDAKAILSARLSKSRRLENLIAQLPGEKKNGLFGNLIALSLGLTPNFKSNFDLAEDAKLQLSKDTYDDDLDNLLAQIGDQYADLFLAAKNLSDAILLSDILRVNTEITKAPLSASMIKRYDEHHQDLTLLKALVRQQLPEKYKEIFFDQSKNGYAGYIDGGASQEEFYKFIKPILEKMDGTEELLVKLNREDLLRKQRTFDNGSIPHQIHLGELHAILRRQEDFYPFLKDNREKIEKILTFRIPYYVGPLARGNSRFAWMTRKSEETITPWNFEEVVDKGASAQSFIERMTNFDKNLPNEKVLPKHSLLYEYFTVYNELTKVKYVTEGMRKPAFLSGEQKKAIVDLLFKTNRKVTVKQLKEDYFKKIECFDSVEISGVEDRFNASLGTYHDLLKIIKDKDFLDNEENEDILEDIVLTLTLFEDREMIEERLKTYAHLFDDKVMKQLKRRRYTGWGRLSRKLINGIRDKQSGKTILDFLKSDGFANRNFMQLIHDDSLTFKEDIQKAQVSGQGDSLHEHIANLAGSPAIKKGILQTVKVVDELVKVMGRHKPENIVIEMARENQTTQKGQKNSRERMKRIEEGIKELGSQILKEHPVENTQLQNEKLYLYYLQNGRDMYVDQELDINRLSDYDVDHIVPQSFLKDDSIDNKVLTRSDKARGKSDNVPSEEVVKKMKNYWRQLLNAKLITQRKFDNLTKAERGGLSELDKAGFIKRQLVETRQITKHVAQILDSRMNTKYDENDKLIREVKVITLKSKLVSDFRKDFQFYKVREINNYHHAHDAYLNAVVGTALIKKYPKLESEFVYGDYKVYDVRKMIAKSEQEIGKATAKYFFYSNIMNFFKTEITLANGEIRKRPLIETNGETGEIVWDKGRDFATVRKVLSMPQVNIVKKTEVQTGGFSKESILPKRNSDKLIARKKDWDPKKYGGFDSPTVAYSVLVVAKVEKGKSKKLKSVKELLGITIMERSSFEKNPIDFLEAKGYKEVKKDLIIKLPKYSLFELENGRKRMLASAGELQKGNELALPSKYVNFLYLASHYEKLKGSPEDNEQKQLFVEQHKHYLDEIIEQISEFSKRVILADANLDKVLSAYNKHRDKPIREQAENIIHLFTLTNLGAPAAFKYFDTTIDRKRYTSTKEVLDATLIHQSITGLYETRIDLSQLGGDGGPAPAPAPAPAPAPGGMDPLQLLQPLEAEIKGTKLKAHWNSGATITCVPEAFLEDERPIQTMLIKTIHGEKQQDVYYLTFKVQGRKVEAEVLASPYDYILLNPSDVPWLMKKPLQLTVLVPLHEYQERLLQQTALPKEQKELLQKLFLKYDALWQHWENQVGHRRIKPHNIATGTLAPRPQKQYPINPKAKPSIQIVIDDLLKQGVLIQQNSTMNTPVYPVPKPDGKWRMVLDYREVNKTIPLIAAQNQHSAGILSSIYRGKYKTTLDLTNGFWAHPITPESYWLTAFTWQGKQYCWTRLPQGFLNSPALFNADVVDLLKEIPNVQAYVDDIYISHDDPQEHLEQLEKIFSILLNAGYVVSLKKSEIAQREVEFLGFNITKEGRGLTDTFKQKLLNITPPKDLKQLQSILGLLNFARNFIPNYSELVKPLYTIVAPANGKFISWTEDNSNQLQHIISVLNQADNLEERNPETRLIIKVNSSPSAGYIRYYNEGSKRPIMYVNYIFSKAEAKFTQTEKLLTTMHKGLIKAMDLAMGQEILVYSPIVSMTKIQRTPLPERKALPVRWITWMTYLEDPRIQFHYDKSLPELQQIPNVTEDVIAKTKHPSEFAMVFYTDGSAIKHPDVNKSHSAGMGIAQVQFIPEYKIVHQWSIPLGDHTAQLAEIAAVEFACKKALKISGPVLIVTDSFYVAESANKELPYWKSNGFLNNKKKPLRHVSKWKSIAECLQLKPDIIIMHEKGHQQPMTTLHTEGNNLADKLATQGSYVVHAGKRTADGSEFEKRTADGSEFESPKKKAKVE

SEQ ID NO: 479 - protein, 2170 aa, synthetic construct
MPAAKRVKLDGGDKKYSIGLDIGTNSVGWAVITDEYKVPSKKFKVLGNTDRHSIKKNLIGALLFDSGETAEATRLKRTARRRYTRRKNRICYLQEIFSNEMAKVDDSFFHRLEESFLVEEDKKHERHPIFGNIVDEVAYHEKYPTIYHLRKKLVDSTDKADLRLIYLALAHMIKFRGHFLIEGDLNPDNSDVDKLFIQLVQTYNQLFEENPINASGVDAKAILSARLSKSRRLENLIAQLPGEKKNGLFGNLIALSLGLTPNFKSNFDLAEDAKLQLSKDTYDDDLDNLLAQIGDQYADLFLAAKNLSDAILLSDILRVNTEITKAPLSASMIKRYDEHHQDLTLLKALVRQQLPEKYKEIFFDQSKNGYAGYIDGGASQEEFYKFIKPILEKMDGTEELLVKLNREDLLRKQRTFDNGSIPHQIHLGELHAILRRQEDFYPFLKDNREKIEKILTFRIPYYVGPLARGNSRFAWMTRKSEETITPWNFEEVVDKGASAQSFIERMTNFDKNLPNEKVLPKHSLLYEYFTVYNELTKVKYVTEGMRKPAFLSGEQKKAIVDLLFKTNRKVTVKQLKEDYFKKIECFDSVEISGVEDRFNASLGTYHDLLKIIKDKDFLDNEENEDILEDIVLTLTLFEDREMIEERLKTYAHLFDDKVMKQLKRRRYTGWGRLSRKLINGIRDKQSGKTILDFLKSDGFANRNFMQLIHDDSLTFKEDIQKAQVSGQGDSLHEHIANLAGSPAIKKGILQTVKVVDELVKVMGRHKPENIVIEMARENQTTQKGQKNSRERMKRIEEGIKELGSQILKEHPVENTQLQNEKLYLYYLQNGRDMYVDQELDINRLSDYDVDHIVPQSFLKDDSIDNKVLTRSDKARGKSDNVPSEEVVKKMKNYWRQLLNAKLITQRKFDNLTKAERGGLSELDKAGFIKRQLVETRQITKHVAQILDSRMNTKYDENDKLIREVKVITLKSKLVSDFRKDFQFYKVREINNYHHAHDAYLNAVVGTALIKKYPKLESEFVYGDYKVYDVRKMIAKSEQEIGKATAKYFFYSNIMNFFKTEITLANGEIRKRPLIETNGETGEIVWDKGRDFATVRKVLSMPQVNIVKKTEVQTGGFSKESILPKRNSDKLIARKKDWDPKKYGGFDSPTVAYSVLVVAKVEKGKSKKLKSVKELLGITIMERSSFEKNPIDFLEAKGYKEVKKDLIIKLPKYSLFELENGRKRMLASAGELQKGNELALPSKYVNFLYLASHYEKLKGSPEDNEQKQLFVEQHKHYLDEIIEQISEFSKRVILADANLDKVLSAYNKHRDKPIREQAENIIHLFTLTNLGAPAAFKYFDTTIDRKRYTSTKEVLDATLIHQSITGLYETRIDLSQLGGDGGGGGGGGGMDPLQLLQPLEAEIKGTKLKAHWNSGATITCVPEAFLEDERPIQTMLIKTIHGEKQQDVYYLTFKVQGRKVEAEVLASPYDYILLNPSDVPWLMKKPLQLTVLVPLHEYQERLLQQTALPKEQKELLQKLFLKYDALWQHWENQVGHRRIKPHNIATGTLAPRPQKQYPINPKAKPSIQIVIDDLLKQGVLIQQNSTMNTPVYPVPKPDGKWRMVLDYREVNKTIPLIAAQNQHSAGILSSIYRGKYKTTLDLTNGFWAHPITPESYWLTAFTWQGKQYCWTRLPQGFLNSPALFNADVVDLLKEIPNVQAYVDDIYISHDDPQEHLEQLEKIFSILLNAGYVVSLKKSEIAQREVEFLGFNITKEGRGLTDTFKQKLLNITPPKDLKQLQSILGLLNFARNFIPNYSELVKPLYTIVAPANGKFISWTEDNSNQLQHIISVLNQADNLEERNPETRLIIKVNSSPSAGYIRYYNEGSKRPIMYVNYIFSKAEAKFTQTEKLLTTMHKGLIKAMDLAMGQEILVYSPIVSMTKIQRTPLPERKALPVRWITWMTYLEDPRIQFHYDKSLPELQQIPNVTEDVIAKTKHPSEFAMVFYTDGSAIKHPDVNKSHSAGMGIAQVQFIPEYKIVHQWSIPLGDHTAQLAEIAAVEFACKKALKISGPVLIVTDSFYVAESANKELPYWKSNGFLNNKKKPLRHVSKWKSIAECLQLKPDIIIMHEKGHQQPMTTLHTEGNNLADKLATQGSYVVHAGKRTADGSEFEKRTADGSEFESPKKKAKVE

SEQ ID NO: 480 - protein, 2211 aa, synthetic construct
MPAAKRVKLDGGDKKYSIGLDIGTNSVGWAVITDEYKVPSKKFKVLGNTDRHSIKKNLIGALLFDSGETAEATRLKRTARRRYTRRKNRICYLQEIFSNEMAKVDDSFFHRLEESFLVEEDKKHERHPIFGNIVDEVAYHEKYPTIYHLRKKLVDSTDKADLRLIYLALAHMIKFRGHFLIEGDLNPDNSDVDKLFIQLVQTYNQLFEENPINASGVDAKAILSARLSKSRRLENLIAQLPGEKKNGLFGNLIALSLGLTPNFKSNFDLAEDAKLQLSKDTYDDDLDNLLAQIGDQYADLFLAAKNLSDAILLSDILRVNTEITKAPLSASMIKRYDEHHQDLTLLKALVRQQLPEKYKEIFFDQSKNGYAGYIDGGASQEEFYKFIKPILEKMDGTEELLVKLNREDLLRKQRTFDNGSIPHQIHLGELHAILRRQEDFYPFLKDNREKIEKILTFRIPYYVGPLARGNSRFAWMTRKSEETITPWNFEEVVDKGASAQSFIERMTNFDKNLPNEKVLPKHSLLYEYFTVYNELTKVKYVTEGMRKPAFLSGEQKKAIVDLLFKTNRKVTVKQLKEDYFKKIECFDSVEISGVEDRFNASLGTYHDLLKIIKDKDFLDNEENEDILEDIVLTLTLFEDREMIEERLKTYAHLFDDKVMKQLKRRRYTGWGRLSRKLINGIRDKQSGKTILDFLKSDGFANRNFMQLIHDDSLTFKEDIQKAQVSGQGDSLHEHIANLAGSPAIKKGILQTVKVVDELVKVMGRHKPENIVIEMARENQTTQKGQKNSRERMKRIEEGIKELGSQILKEHPVENTQLQNEKLYLYYLQNGRDMYVDQELDINRLSDYDVDHIVPQSFLKDDSIDNKVLTRSDKARGKSDNVPSEEVVKKMKNYWRQLLNAKLITQRKFDNLTKAERGGLSELDKAGFIKRQLVETRQITKHVAQILDSRMNTKYDENDKLIREVKVITLKSKLVSDFRKDFQFYKVREINNYHHAHDAYLNAVVGTALIKKYPKLESEFVYGDYKVYDVRKMIAKSEQEIGKATAKYFFYSNIMNFFKTEITLANGEIRKRPLIETNGETGEIVWDKGRDFATVRKVLSMPQVNIVKKTEVQTGGFSKESILPKRNSDKLIARKKDWDPKKYGGFDSPTVAYSVLVVAKVEKGKSKKLKSVKELLGITIMERSSFEKNPIDFLEAKGYKEVKKDLIIKLPKYSLFELENGRKRMLASAGELQKGNELALPSKYVNFLYLASHYEKLKGSPEDNEQKQLFVEQHKHYLDEIIEQISEFSKRVILADANLDKVLSAYNKHRDKPIREQAENIIHLFTLTNLGAPAAFKYFDTTIDRKRYTSTKEVLDATLIHQSITGLYETRIDLSQLGGDGGAEAAAKEAAAKEAAAKEAAAKALEAEAAAKEAAAKEAAAKEAAAKAGGMDPLQLLQPLEAEIKGTKLKAHWNSGATITCVPEAFLEDERPIQTMLIKTIHGEKQQDVYYLTFKVQGRKVEAEVLASPYDYILLNPSDVPWLMKKPLQLTVLVPLHEYQERLLQQTALPKEQKELLQKLFLKYDALWQHWENQVGHRRIKPHNIATGTLAPRPQKQYPINPKAKPSIQIVIDDLLKQGVLIQQNSTMNTPVYPVPKPDGKWRMVLDYREVNKTIPLIAAQNQHSAGILSSIYRGKYKTTLDLTNGFWAHPITPESYWLTAFTWQGKQYCWTRLPQGFLNSPALFNADVVDLLKEIPNVQAYVDDIYISHDDPQEHLEQLEKIFSILLNAGYVVSLKKSEIAQREVEFLGFNITKEGRGLTDTFKQKLLNITPPKDLKQLQSILGKLNFARNFIPNYSELVKPLYTIVAPANGKFISWTEDNSNQLQHIISVLNQADNLEERNPETRLIIKVNSSPSAGYIRYYNEGSKRPIMYVNYIFSKAEAKFTQTEKLLTTMHKGLIKAMDLAMGQEILVYSPIVSMTKIQRTPLPERKALPVRWITWMTYLEDPRIQFHYDKSLPELQQIPNVTEDVIAKTKHPSEFAMVFYTDGSAIKHPDVNKSHSAGMGIAQVQFIPEYKIVHQWSIPLGDHTAQLAEIAAVEFACKKALKISGPVLIVTDSFYVAESANKELPYWKSNGFLNNKKKPLRHVSKWKSIAECLQLKPDIIIMHEKGHQQPMTTLHTEGNNLADKLATQGSYVVHAGKRTADGSEFEKRTADGSEFESPKKKAKVE

SEQ ID NO: 481 - protein, 2195 aa, synthetic construct
MPAAKRVKLDGGDKKYSIGLDIGTNSVGWAVITDEYKVPSKKFKVLGNTDRHSIKKNLIGALLFDSGETAEATRLKRTARRRYTRRKNRICYLQEIFSNEMAKVDDSFFHRLEESFLVEEDKKHERHPIFGNIVDEVAYHEKYPTIYHLRKKLVDSTDKADLRLIYLALAHMIKFRGHFLIEGDLNPDNSDVDKLFIQLVQTYNQLFEENPINASGVDAKAILSARLSKSRRLENLIAQLPGEKKNGLFGNLIALSLGLTPNFKSNFDLAEDAKLQLSKDTYDDDLDNLLAQIGDQYADLFLAAKNLSDAILLSDILRVNTEITKAPLSASMIKRYDEHHQDLTLLKALVRQQLPEKYKEIFFDQSKNGYAGYIDGGASQEEFYKFIKPILEKMDGTEELLVKLNREDLLRKQRTFDNGSIPHQIHLGELHAILRRQEDFYPFLKDNREKIEKILTFRIPYYVGPLARGNSRFAWMTRKSEETITPWNFEEVVDKGASAQSFIERMTNFDKNLPNEKVLPKHSLLYEYFTVYNELTKVKYVTEGMRKPAFLSGEQKKAIVDLLFKTNRKVTVKQLKEDYFKKIECFDSVEISGVEDRFNASLGTYHDLLKIIKDKDFLDNEENEDILEDIVLTLTLFEDREMIEERLKTYAHLFDDKVMKQLKRRRYTGWGRLSRKLINGIRDKQSGKTILDFLKSDGFANRNFMQLIHDDSLTFKEDIQKAQVSGQGDSLHEHIANLAGSPAIKKGILQTVKVVDELVKVMGRHKPENIVIEMARENQTTQKGQKNSRERMKRIEEGIKELGSQILKEHPVENTQLQNEKLYLYYLQNGRDMYVDQELDINRLSDYDVDHIVPQSFLKDDSIDNKVLTRSDKARGKSDNVPSEEVVKKMKNYWRQLLNAKLITQRKFDNLTKAERGGLSELDKAGFIKRQLVETRQITKHVAQILDSRMNTKYDENDKLIREVKVITLKSKLVSDFRKDFQFYKVREINNYHHAHDAYLNAVVGTALIKKYPKLESEFVYGDYKVYDVRKMIAKSEQEIGKATAKYFFYSNIMNFFKTEITLANGEIRKRPLIETNGETGEIVWDKGRDFATVRKVLSMPQVNIVKKTEVQTGGFSKESILPKRNSDKLIARKKDWDPKKYGGFDSPTVAYSVLVVAKVEKGKSKKLKSVKELLGITIMERSSFEKNPIDFLEAKGYKEVKKDLIIKLPKYSLFELENGRKRMLASAGELQKGNELALPSKYVNFLYLASHYEKLKGSPEDNEQKQLFVEQHKHYLDEIIEQISEFSKRVILADANLDKVLSAYNKHRDKPIREQAENIIHLFTLTNLGAPAAFKYFDTTIDRKRYTSTKEVLDATLIHQSITGLYETRIDLSQLGGDGGEAAAKEAAAKEAAAKEAAAKEAAAKEAAAKGGMDPLQLLQPLEAEIKGTKLKAHWNSGATITCVPEAFLEDERPIQTMLIKTIHGEKQQDVYYLTFKVQGRKVEAEVLASPYDYILLNPSDVPWLMKKPLQLTVLVPLHEYQERLLQQTALPKEQKELLQKLFLKYDALWQHWENQVGHRRIKPHNIATGTLAPRPQKQYPINPKAKPSIQIVIDDLLKQGVLIQQNSTMNTPVYPVPKPDGKWRMVLDYREVNKTIPLIAAQNQHSAGILSSIYRGKYKTTLDLTNGFWAHPITPESYWLTAFTWQGKQYCWTRLPQGFLNSPALFNADVVDLLKEIPNVQAYVDDIYISHDDPQEHLEQLEKIFSILLNAGYVVSLKKSEIAQREVEFLGFNITKEGRGLTDTFKQKLLNITPPKDLKQLQSILGKLNFARNFIPNYSELVKPLYTIVAPANGKFISWTEDNSNQLQHIISVLNQADNLEERNPETRLIIKVNSSPSAGYIRYYNEGSKRPIMYVNYIFSKAEAKFTQTEKLLTTMHKGLIKAMDLAMGQEILVYSPIVSMTKIQRTPLPERKALPVRWITWMTYLEDPRIQFHYDKSLPELQQIPNVTEDVIAKTKHPSEFAMVFYTDGSAIKHPDVNKSHSAGMGIAQVQFIPEYKIVHQWSIPLGDHTAQLAEIAAVEFACKKALKISGPVLIVTDSFYVAESANKELPYWKSNGFLNNKKKPLRHVSKWKSIAECLQLKPDIIIMHEKGHQQPMTTLHTEGNNLADKLATQGSYVVHAGKRTADGSEFEKRTADGSEFESPKKKAKVE

SEQ ID NO: 482 - protein, 2176 aa, synthetic construct
MPAAKRVKLDGGDKKYSIGLDIGTNSVGWAVITDEYKVPSKKFKVLGNTDRHSIKKNLIGALLFDSGETAEATRLKRTARRRYTRRKNRICYLQEIFSNEMAKVDDSFFHRLEESFLVEEDKKHERHPIFGNIVDEVAYHEKYPTIYHLRKKLVDSTDKADLRLIYLALAHMIKFRGHFLIEGDLNPDNSDVDKLFIQLVQTYNQLFEENPINASGVDAKAILSARLSKSRRLENLIAQLPGEKKNGLFGNLIALSLGLTPNFKSNFDLAEDAKLQLSKDTYDDDLDNLLAQIGDQYADLFLAAKNLSDAILLSDILRVNTEITKAPLSASMIKRYDEHHQDLTLLKALVRQQLPEKYKEIFFDQSKNGYAGYIDGGASQEEFYKFIKPILEKMDGTEELLVKLNREDLLRKQRTFDNGSIPHQIHLGELHAILRRQEDFYPFLKDNREKIEKILTFRIPYYVGPLARGNSRFAWMTRKSEETITPWNFEEVVDKGASAQSFIERMTNFDKNLPNEKVLPKHSLLYEYFTVYNELTKVKYVTEGMRKPAFLSGEQKKAIVDLLFKTNRKVTVKQLKEDYFKKIECFDSVEISGVEDRFNASLGTYHDLLKIIKDKDFLDNEENEDILEDIVLTLTLFEDREMIEERLKTYAHLFDDKVMKQLKRRRYTGWGRLSRKLINGIRDKQSGKTILDFLKSDGFANRNFMQLIHDDSLTFKEDIQKAQVSGQGDSLHEHIANLAGSPAIKKGILQTVKVVDELVKVMGRHKPENIVIEMARENQTTQKGQKNSRERMKRIEEGIKELGSQILKEHPVENTQLQNEKLYLYYLQNGRDMYVDQELDINRLSDYDVDHIVPQSFLKDDSIDNKVLTRSDKARGKSDNVPSEEVVKKMKNYWRQLLNAKLITQRKFDNLTKAERGGLSELDKAGFIKRQLVETRQITKHVAQILDSRMNTKYDENDKLIREVKVITLKSKLVSDFRKDFQFYKVREINNYHHAHDAYLNAVVGTALIKKYPKLESEFVYGDYKVYDVRKMIAKSEQEIGKATAKYFFYSNIMNFFKTEITLANGEIRKRPLIETNGETGEIVWDKGRDFATVRKVLSMPQVNIVKKTEVQTGGFSKESILPKRNSDKLIARKKDWDPKKYGGFDSPTVAYSVLVVAKVEKGKSKKLKSVKELLGITIMERSSFEKNPIDFLEAKGYKEVKKDLIIKLPKYSLFELENGRKRMLASAGELQKGNELALPSKYVNFLYLASHYEKLKGSPEDNEQKQLFVEQHKHYLDEIIEQISEFSKRVILADANLDKVLSAYNKHRDKPIREQAENIIHLFTLTNLGAPAAFKYFDTTIDRKRYTSTKEVLDATLIHQSITGLYETRIDLSQLGGDGGEAAAKGGSPAPGGMDPLQLLQPLEAEIKGTKLKAHWNSGATITCVPEAFLEDERPIQTMLIKTIHGEKQQDVYYLTFKVQGRKVEAEVLASPYDYILLNPSDVPWLMKKPLQLTVLVPLHEYQERLLQQTALPKEQKELLQKLFLKYDALWQHWENQVGHRRIKPHNIATGTLAPRPQKQYPINPKAKPSIQIVIDDLLKQGVLIQQNSTMNTPVYPVPKPDGKWRMVLDYREVNKTIPLIAAQNQHSAGILSSIYRGKYKTTLDLTNGFWAHPITPESYWLTAFTWQGKQYCWTRLPQGFLNSPALFNADVVDLLKEIPNVQAYVDDIYISHDDPQEHLEQLEKIFSILLNAGYVVSLKKSEIAQREVEFLGFNITKEGRGLTDTFKQKLLNITPPKDLKQLQSILGKLNFARNFIPNYSELVKPLYTIVAPANGKFISWTEDNSNQLQHIISVLNQADNLEERNPETRLIIKVNSSPSAGYIRYYNEGSKRPIMYVNYIFSKAEAKFTQTEKLLTTMHKGLIKAMDLAMGQEILVYSPIVSMTKIQRTPLPERKALPVRWITWMTYLEDPRIQFHYDKSLPELQQIPNVTEDVIAKTKHPSEFAMVFYTDGSAIKHPDVNKSHSAGMGIAQVQFIPEYKIVHQWSIPLGDHTAQLAEIAAVEFACKKALKISGPVLIVTDSFYVAESANKELPYWKSNGFLNNKKKPLRHVSKWKSIAECLQLKPDIIIMHEKGHQQPMTTLHTEGNNLADKLATQGSYVVHAGKRTADGSEFEKRTADGSEFESPKKKAKVE

SEQ ID NO: 483 - protein, 2174 aa, synthetic construct
MPAAKRVKLDGGDKKYSIGLDIGTNSVGWAVITDEYKVPSKKFKVLGNTDRHSIKKNLIGALLFDSGETAEATRLKRTARRRYTRRKNRICYLQEIFSNEMAKVDDSFFHRLEESFLVEEDKKHERHPIFGNIVDEVAYHEKYPTIYHLRKKLVDSTDKADLRLIYLALAHMIKFRGHFLIEGDLNPDNSDVDKLFIQLVQTYNQLFEENPINASGVDAKAILSARLSKSRRLENLIAQLPGEKKNGLFGNLIALSLGLTPNFKSNFDLAEDAKLQLSKDTYDDDLDNLLAQIGDQYADLFLAAKNLSDAILLSDILRVNTEITKAPLSASMIKRYDEHHQDLTLLKALVRQQLPEKYKEIFFDQSKNGYAGYIDGGASQEEFYKFIKPILEKMDGTEELLVKLNREDLLRKQRTFDNGSIPHQIHLGELHAILRRQEDFYPFLKDNREKIEKILTFRIPYYVGPLARGNSRFAWMTRKSEETITPWNFEEVVDKGASAQSFIERMTNFDKNLPNEKVLPKHSLLYEYFTVYNELTKVKYVTEGMRKPAFLSGEQKKAIVDLLFKTNRKVTVKQLKEDYFKKIECFDSVEISGVEDRFNASLGTYHDLLKIIKDKDFLDNEENEDILEDIVLTLTLFEDREMIEERLKTYAHLFDDKVMKQLKRRRYTGWGRLSRKLINGIRDKQSGKTILDFLKSDGFANRNFMQLIHDDSLTFKEDIQKAQVSGQGDSLHEHIANLAGSPAIKKGILQTVKVVDELVKVMGRHKPENIVIEMARENQTTQKGQKNSRERMKRIEEGIKELGSQILKEHPVENTQLQNEKLYLYYLQNGRDMYVDQELDINRLSDYDVDHIVPQSFLKDDSIDNKVLTRSDKARGKSDNVPSEEVVKKMKNYWRQLLNAKLITQRKFDNLTKAERGGLSELDKAGFIKRQLVETRQITKHVAQILDSRMNTKYDENDKLIREVKVITLKSKLVSDFRKDFQFYKVREINNYHHAHDAYLNAVVGTALIKKYPKLESEFVYGDYKVYDVRKMIAKSEQEIGKATAKYFFYSNIMNFFKTEITLANGEIRKRPLIETNGETGEIVWDKGRDFATVRKVLSMPQVNIVKKTEVQTGGFSKESILPKRNSDKLIARKKDWDPKKYGGFDSPTVAYSVLVVAKVEKGKSKKLKSVKELLGITIMERSSFEKNPIDFLEAKGYKEVKKDLIIKLPKYSLFELENGRKRMLASAGELQKGNELALPSKYVNFLYLASHYEKLKGSPEDNEQKQLFVEQHKHYLDEIIEQISEFSKRVILADANLDKVLSAYNKHRDKPIREQAENIIHLFTLTNLGAPAAFKYFDTTIDRKRYTSTKEVLDATLIHQSITGLYETRIDLSQLGGDGGGGSGSSPAPGGMDPLQLLQPLEAEIKGTKLKAHWNSGATITCVPEAFLEDERPIQTMLIKTIHGEKQQDVYYLTFKVQGRKVEAEVLASPYDYILLNPSDVPWLMKKPLQLTVLVPLHEYQERLLQQTALPKEQKELLQKLFLKYDALWQHWENQVGHRRIKPHNIATGTLAPRPQKQYPINPKAKPSIQIVIDDLLKQGVLIQQNSTMNTPVYPVPKPDGKWRMVLDYREVNKTIPLIAAQNQHSAGILSSIYRGKYKTTLDLTNGFWAHPITPESYWLTAFTWQGKQYCWTRLPQGFLNSPALFNADVVDLLKEIPNVQAYVDDIYISHDDPQEHLEQLEKIFSILLNAGYVVSLKKSEIAQREVEFLGFNITKEGRGLTDTFKQKLLNITPPKDLKQLQSILGKLNFARNFIPNYSELVKPLYTIVAPANGKFISWTEDNSNQLQHIISVLNQADNLEERNPETRLIIKVNSSPSAGYIRYYNEGSKRPIMYVNYIFSKAEAKFTQTEKLLTTMHKGLIKAMDLAMGQEILVYSPIVSMTKIQRTPLPERKALPVRWITWMTYLEDPRIQFHYDKSLPELQQIPNVTEDVIAKTKHPSEFAMVFYTDGSAIKHPDVNKSHSAGMGIAQVQFIPEYKIVHQWSIPLGDHTAQLAEIAAVEFACKKALKISGPVLIVTDSFYVAESANKELPYWKSNGFLNNKKKPLRHVSKWKSIAECLQLKPDIIIMHEKGHQQPMTTLHTEGNNLADKLATQGSYVVHAGKRTADGSEFEKRTADGSEFESPKKKAKVE

SEQ ID NO: 484 - protein, 2171 aa, synthetic construct
MPAAKRVKLDGGDKKYSIGLDIGTNSVGWAVITDEYKVPSKKFKVLGNTDRHSIKKNLIGALLFDSGETAEATRLKRTARRRYTRRKNRICYLQEIFSNEMAKVDDSFFHRLEESFLVEEDKKHERHPIFGNIVDEVAYHEKYPTIYHLRKKLVDSTDKADLRLIYLALAHMIKFRGHFLIEGDLNPDNSDVDKLFIQLVQTYNQLFEENPINASGVDAKAILSARLSKSRRLENLIAQLPGEKKNGLFGNLIALSLGLTPNFKSNFDLAEDAKLQLSKDTYDDDLDNLLAQIGDQYADLFLAAKNLSDAILLSDILRVNTEITKAPLSASMIKRYDEHHQDLTLLKALVRQQLPEKYKEIFFDQSKNGYAGYIDGGASQEEFYKFIKPILEKMDGTEELLVKLNREDLLRKQRTFDNGSIPHQIHLGELHAILRRQEDFYPFLKDNREKIEKILTFRIPYYVGPLARGNSRFAWMTRKSEETITPWNFEEVVDKGASAQSFIERMTNFDKNLPNEKVLPKHSLLYEYFTVYNELTKVKYVTEGMRKPAFLSGEQKKAIVDLLFKTNRKVTVKQLKEDYFKKIECFDSVEISGVEDRFNASLGTYHDLLKIIKDKDFLDNEENEDILEDIVLTLTLFEDREMIEERLKTYAHLFDDKVMKQLKRRRYTGWGRLSRKLINGIRDKQSGKTILDFLKSDGFANRNFMQLIHDDSLTFKEDIQKAQVSGQGDSLHEHIANLAGSPAIKKGILQTVKVVDELVKVMGRHKPENIVIEMARENQTTQKGQKNSRERMKRIEEGIKELGSQILKEHPVENTQLQNEKLYLYYLQNGRDMYVDQELDINRLSDYDVDHIVPQSFLKDDSIDNKVLTRSDKARGKSDNVPSEEVVKKMKNYWRQLLNAKLITQRKFDNLTKAERGGLSELDKAGFIKRQLVETRQITKHVAQILDSRMNTKYDENDKLIREVKVITLKSKLVSDFRKDFQFYKVREINNYHHAHDAYLNAVVGTALIKKYPKLESEFVYGDYKVYDVRKMIAKSEQEIGKATAKYFFYSNIMNFFKTEITLANGEIRKRPLIETNGETGEIVWDKGRDFATVRKVLSMPQVNIVKKTEVQTGGFSKESILPKRNSDKLIARKKDWDPKKYGGFDSPTVAYSVLVVAKVEKGKSKKLKSVKELLGITIMERSSFEKNPIDFLEAKGYKEVKKDLIIKLPKYSLFELENGRKRMLASAGELQKGNELALPSKYVNFLYLASHYEKLKGSPEDNEQKQLFVEQHKHYLDEIIEQISEFSKRVILADANLDKVLSAYNKHRDKPIREQAENIIHLFTLTNLGAPAAFKYFDTTIDRKRYTSTKEVLDATLIHQSITGLYETRIDLSQLGGDGGGGGGGGGGMDPLQLLQPLEAEIKGTKLKAHWNSGATITCVPEAFLEDERPIQTMLIKTIHGEKQQDVYYLTFKVQGRKVEAEVLASPYDYILLNPSDVPWLMKKPLQLTVLVPLHEYQERLLQQTALPKEQKELLQKLFLKYDALWQHWENQVGHRRIKPHNIATGTLAPRPQKQYPINPKAKPSIQIVIDDLLKQGVLIQQNSTMNTPVYPVPKPDGKWRMVLDYREVNKTIPLIAAQNQHSAGILSSIYRGKYKTTLDLTNGFWAHPITPESYWLTAFTWQGKQYCWTRLPQGFLNSPALFNADVVDLLKEIPNVQAYVDDIYISHDDPQEHLEQLEKIFSILLNAGYVVSLKKSEIAQREVEFLGFNITKEGRGLTDTFKQKLLNITPPKDLKQLQSILGKLNFARNFIPNYSELVKPLYTIVAPANGKFISWTEDNSNQLQHIISVLNQADNLEERNPETRLIIKVNSSPSAGYIRYYNEGSKRPIMYVNYIFSKAEAKFTQTEKLLTTMHKGLIKAMDLAMGQEILVYSPIVSMTKIQRTPLPERKALPVRWITWMTYLEDPRIQFHYDKSLPELQQIPNVTEDVIAKTKHPSEFAMVFYTDGSAIKHPDVNKSHSAGMGIAQVQFIPEYKIVHQWSIPLGDHTAQLAEIAAVEFACKKALKISGPVLIVTDSFYVAESANKELPYWKSNGFLNNKKKPLRHVSKWKSIAECLQLKPDIIIMHEKGHQQPMTTLHTEGNNLADKLATQGSYVVHAGKRTADGSEFEKRTADGSEFESPKKKAKVE

SEQ ID NO: 485 - protein, 2176 aa, synthetic construct
MPAAKRVKLDGGDKKYSIGLDIGTNSVGWAVITDEYKVPSKKFKVLGNTDRHSIKKNLIGALLFDSGETAEATRLKRTARRRYTRRKNRICYLQEIFSNEMAKVDDSFFHRLEESFLVEEDKKHERHPIFGNIVDEVAYHEKYPTIYHLRKKLVDSTDKADLRLIYLALAHMIKFRGHFLIEGDLNPDNSDVDKLFIQLVQTYNQLFEENPINASGVDAKAILSARLSKSRRLENLIAQLPGEKKNGLFGNLIALSLGLTPNFKSNFDLAEDAKLQLSKDTYDDDLDNLLAQIGDQYADLFLAAKNLSDAILLSDILRVNTEITKAPLSASMIKRYDEHHQDLTLLKALVRQQLPEKYKEIFFDQSKNGYAGYIDGGASQEEFYKFIKPILEKMDGTEELLVKLNREDLLRKQRTFDNGSIPHQIHLGELHAILRRQEDFYPFLKDNREKIEKILTFRIPYYVGPLARGNSRFAWMTRKSEETITPWNFEEVVDKGASAQSFIERMTNFDKNLPNEKVLPKHSLLYEYFTVYNELTKVKYVTEGMRKPAFLSGEQKKAIVDLLFKTNRKVTVKQLKEDYFKKIECFDSVEISGVEDRFNASLGTYHDLLKIIKDKDFLDNEENEDILEDIVLTLTLFEDREMIEERLKTYAHLFDDKVMKQLKRRRYTGWGRLSRKLINGIRDKQSGKTILDFLKSDGFANRNFMQLIHDDSLTFKEDIQKAQVSGQGDSLHEHIANLAGSPAIKKGILQTVKVVDELVKVMGRHKPENIVIEMARENQTTQKGQKNSRERMKRIEEGIKELGSQILKEHPVENTQLQNEKLYLYYLQNGRDMYVDQELDINRLSDYDVDHIVPQSFLKDDSIDNKVLTRSDKARGKSDNVPSEEVVKKMKNYWRQLLNAKLITQRKFDNLTKAERGGLSELDKAGFIKRQLVETRQITKHVAQILDSRMNTKYDENDKLIREVKVITLKSKLVSDFRKDFQFYKVREINNYHHAHDAYLNAVVGTALIKKYPKLESEFVYGDYKVYDVRKMIAKSEQEIGKATAKYFFYSNIMNFFKTEITLANGEIRKRPLIETNGETGEIVWDKGRDFATVRKVLSMPQVNIVKKTEVQTGGFSKESILPKRNSDKLIARKKDWDPKKYGGFDSPTVAYSVLVVAKVEKGKSKKLKSVKELLGITIMERSSFEKNPIDFLEAKGYKEVKKDLIIKLPKYSLFELENGRKRMLASAGELQKGNELALPSKYVNFLYLASHYEKLKGSPEDNEQKQLFVEQHKHYLDEIIEQISEFSKRVILADANLDKVLSAYNKHRDKPIREQAENIIHLFTLTNLGAPAAFKYFDTTIDRKRYTSTKEVLDATLIHQSITGLYETRIDLSQLGGDGGGSSGGGEAAAKGGMDPLQLLQPLEAEIKGTKLKAHWNSGATITCVPEAFLEDERPIQTMLIKTIHGEKQQDVYYLTFKVQGRKVEAEVLASPYDYILLNPSDVPWLMKKPLQLTVLVPLHEYQERLLQQTALPKEQKELLQKLFLKYDALWQHWENQVGHRRIKPHNIATGTLAPRPQKQYPINPKAKPSIQIVIDDLLKQGVLIQQNSTMNTPVYPVPKPDGKWRMVLDYREVNKTIPLIAAQNQHSAGILSSIYRGKYKTTLDLTNGFWAHPITPESYWLTAFTWQGKQYCWTRLPQGFLNSPALFNADVVDLLKEIPNVQAYVDDIYISHDDPQEHLEQLEKIFSILLNAGYVVSLKKSEIAQREVEFLGFNITKEGRGLTDTFKQKLLNITPPKDLKQLQSILGKLNFARNFIPNYSELVKPLYTIVAPANGKFISWTEDNSNQLQHIISVLNQADNLEERNPETRLIIKVNSSPSAGYIRYYNEGSKRPIMYVNYIFSKAEAKFTQTEKLLTTMHKGLIKAMDLAMGQEILVYSPIVSMTKIQRTPLPERKALPVRWITWMTYLEDPRIQFHYDKSLPELQQIPNVTEDVIAKTKHPSEFAMVFYTDGSAIKHPDVNKSHSAGMGIAQVQFIPEYKIVHQWSIPLGDHTAQLAEIAAVEFACKKALKISGPVLIVTDSFYVAESANKELPYWKSNGFLNNKKKPLRHVSKWKSIAECLQLKPDIIIMHEKGHQQPMTTLHTEGNNLADKLATQGSYVVHAGKRTADGSEFEKRTADGSEFESPKKKAKVE

SEQ ID NO: 486 - protein, 2176 aa, synthetic construct
MPAAKRVKLDGGDKKYSIGLDIGTNSVGWAVITDEYKVPSKKFKVLGNTDRHSIKKNLIGALLFDSGETAEATRLKRTARRRYTRRKNRICYLQEIFSNEMAKVDDSFFHRLEESFLVEEDKKHERHPIFGNIVDEVAYHEKYPTIYHLRKKLVDSTDKADLRLIYLALAHMIKFRGHFLIEGDLNPDNSDVDKLFIQLVQTYNQLFEENPINASGVDAKAILSARLSKSRRLENLIAQLPGEKKNGLFGNLIALSLGLTPNFKSNFDLAEDAKLQLSKDTYDDDLDNLLAQIGDQYADLFLAAKNLSDAILLSDILRVNTEITKAPLSASMIKRYDEHHQDLTLLKALVRQQLPEKYKEIFFDQSKNGYAGYIDGGASQEEFYKFIKPILEKMDGTEELLVKLNREDLLRKQRTFDNGSIPHQIHLGELHAILRRQEDFYPFLKDNREKIEKILTFRIPYYVGPLARGNSRFAWMTRKSEETITPWNFEEVVDKGASAQSFIERMTNFDKNLPNEKVLPKHSLLYEYFTVYNELTKVKYVTEGMRKPAFLSGEQKKAIVDLLFKTNRKVTVKQLKEDYFKKIECFDSVEISGVEDRFNASLGTYHDLLKIIKDKDFLDNEENEDILEDIVLTLTLFEDREMIEERLKTYAHLFDDKVMKQLKRRRYTGWGRLSRKLINGIRDKQSGKTILDFLKSDGFANRNFMQLIHDDSLTFKEDIQKAQVSGQGDSLHEHIANLAGSPAIKKGILQTVKVVDELVKVMGRHKPENIVIEMARENQTTQKGQKNSRERMKRIEEGIKELGSQILKEHPVENTQLQNEKLYLYYLQNGRDMYVDQELDINRLSDYDVDHIVPQSFLKDDSIDNKVLTRSDKARGKSDNVPSEEVVKKMKNYWRQLLNAKLITQRKFDNLTKAERGGLSELDKAGFIKRQLVETRQITKHVAQILDSRMNTKYDENDKLIREVKVITLKSKLVSDFRKDFQFYKVREINNYHHAHDAYLNAVVGTALIKKYPKLESEFVYGDYKVYDVRKMIAKSEQEIGKATAKYFFYSNIMNFFKTEITLANGEIRKRPLIETNGETGEIVWDKGRDFATVRKVLSMPQVNIVKKTEVQTGGFSKESILPKRNSDKLIARKKDWDPKKYGGFDSPTVAYSVLVVAKVEKGKSKKLKSVKELLGITIMERSSFEKNPIDFLEAKGYKEVKKDLIIKLPKYSLFELENGRKRMLASAGELQKGNELALPSKYVNFLYLASHYEKLKGSPEDNEQKQLFVEQHKHYLDEIIEQISEFSKRVILADANLDKVLSAYNKHRDKPIREQAENIIHLFTLTNLGAPAAFKYFDTTIDRKRYTSTKEVLDATLIHQSITGLYETRIDLSQLGGDGGPAPAPAPAPAPGGMDPLQLLQPLEAEIKGTKLKAHWNSGATITCVPEAFLEDERPIQTMLIKTIHGEKQQDVYYLTFKVQGRKVEAEVLASPYDYILLNPSDVPWLMKKPLQLTVLVPLHEYQERLLQQTALPKEQKELLQKLFLKYDALWQHWENQVGHRRIKPHNIATGTLAPRPQKQYPINPKAKPSIQIVIDDLLKQGVLIQQNSTMNTPVYPVPKPDGKWRMVLDYREVNKTIPLIAAQNQHSAGILSSIYRGKYKTTLDLTNGFWAHPITPESYWLTAFTWQGKQYCWTRLPQGFLNSPALFNADVVDLLKEIPNVQAYVDDIYISHDDPQEHLEQLEKIFSILLNAGYVVSLKKSEIAQREVEFLGFNITKEGRGLTDTFKQKLLNITPPKDLKQLQSILGKLNFARNFIPNYSELVKPLYTIVAPANGKFISWTEDNSNQLQHIISVLNQADNLEERNPETRLIIKVNSSPSAGYIRYYNEGSKRPIMYVNYIFSKAEAKFTQTEKLLTTMHKGLIKAMDLAMGQEILVYSPIVSMTKIQRTPLPERKALPVRWITWMTYLEDPRIQFHYDKSLPELQQIPNVTEDVIAKTKHPSEFAMVFYTDGSAIKHPDVNKSHSAGMGIAQVQFIPEYKIVHQWSIPLGDHTAQLAEIAAVEFACKKALKISGPVLIVTDSFYVAESANKELPYWKSNGFLNNKKKPLRHVSKWKSIAECLQLKPDIIIMHEKGHQQPMTTLHTEGNNLADKLATQGSYVVHAGKRTADGSEFEKRTADGSEFESPKKKAKVE

SEQ ID NO: 487 - protein, 2177 aa, synthetic construct
MPAAKRVKLDGGDKKYSIGLDIGTNSVGWAVITDEYKVPSKKFKVLGNTDRHSIKKNLIGALLFDSGETAEATRLKRTARRRYTRRKNRICYLQEIFSNEMAKVDDSFFHRLEESFLVEEDKKHERHPIFGNIVDEVAYHEKYPTIYHLRKKLVDSTDKADLRLIYLALAHMIKFRGHFLIEGDLNPDNSDVDKLFIQLVQTYNQLFEENPINASGVDAKAILSARLSKSRRLENLIAQLPGEKKNGLFGNLIALSLGLTPNFKSNFDLAEDAKLQLSKDTYDDDLDNLLAQIGDQYADLFLAAKNLSDAILLSDILRVNTEITKAPLSASMIKRYDEHHQDLTLLKALVRQQLPEKYKEIFFDQSKNGYAGYIDGGASQEEFYKFIKPILEKMDGTEELLVKLNREDLLRKQRTFDNGSIPHQIHLGELHAILRRQEDFYPFLKDNREKIEKILTFRIPYYVGPLARGNSRFAWMTRKSEETITPWNFEEVVDKGASAQSFIERMTNFDKNLPNEKVLPKHSLLYEYFTVYNELTKVKYVTEGMRKPAFLSGEQKKAIVDLLFKTNRKVTVKQLKEDYFKKIECFDSVEISGVEDRFNASLGTYHDLLKIIKDKDFLDNEENEDILEDIVLTLTLFEDREMIEERLKTYAHLFDDKVMKQLKRRRYTGWGRLSRKLINGIRDKQSGKTILDFLKSDGFANRNFMQLIHDDSLTFKEDIQKAQVSGQGDSLHEHIANLAGSPAIKKGILQTVKVVDELVKVMGRHKPENIVIEMARENQTTQKGQKNSRERMKRIEEGIKELGSQILKEHPVENTQLQNEKLYLYYLQNGRDMYVDQELDINRLSDYDVDHIVPQSFLKDDSIDNKVLTRSDKARGKSDNVPSEEVVKKMKNYWRQLLNAKLITQRKFDNLTKAERGGLSELDKAGFIKRQLVETRQITKHVAQILDSRMNTKYDENDKLIREVKVITLKSKLVSDFRKDFQFYKVREINNYHHAHDAYLNAVVGTALIKKYPKLESEFVYGDYKVYDVRKMIAKSEQEIGKATAKYFFYSNIMNFFKTEITLANGEIRKRPLIETNGETGEIVWDKGRDFATVRKVLSMPQVNIVKKTEVQTGGFSKESILPKRNSDKLIARKKDWDPKKYGGFDSPTVAYSVLVVAKVEKGKSKKLKSVKELLGITIMERSSFEKNPIDFLEAKGYKEVKKDLIIKLPKYSLFELENGRKRMLASAGELQKGNELALPSKYVNFLYLASHYEKLKGSPEDNEQKQLFVEQHKHYLDEIIEQISEFSKRVILADANLDKVLSAYNKHRDKPIREQAENIIHLFTLTNLGAPAAFKYFDTTIDRKRYTSTKEVLDATLIHQSITGLYETRIDLSQLGGDGGGGSGGSGGSGGSGGMDPLQLLQPLEAEIKGTKLKAHWNSGATITCVPEAFLEDERPIQTMLIKTIHGEKQQDVYYLTFKVQGRKVEAEVLASPYDYILLNPSDVPWLMKKPLQLTVLVPLHEYQERLLQQTALPKEQKELLQKLFLKYDALWQHWENQVGHRRIKPHNIATGTLAPRPQKQYPINPKAKPSIQIVIDDLLKQGVLIQQNSTMNTPVYPVPKPDGKWRMVLDYREVNKTIPLIAAQNQHSAGILSSIYRGKYKTTLDLTNGFWAHPITPESYWLTAFTWQGKQYCWTRLPQGFLNSPALFNADVVDLLKEIPNVQAYVDDIYISHDDPQEHLEQLEKIFSILLNAGYVVSLKKSEIAQREVEFLGFNITKEGRGLTDTFKQKLLNITPPKDLKQLQSILGKLNFARNFIPNYSELVKPLYTIVAPANGKFISWTEDNSNQLQHIISVLNQADNLEERNPETRLIIKVNSSPSAGYIRYYNEGSKRPIMYVNYIFSKAEAKFTQTEKLLTTMHKGLIKAMDLAMGQEILVYSPIVSMTKIQRTPLPERKALPVRWITWMTYLEDPRIQFHYDKSLPELQQIPNVTEDVIAKTKHPSEFAMVFYTDGSAIKHPDVNKSHSAGMGIAQVQFIPEYKIVHQWSIPLGDHTAQLAEIAAVEFACKKALKISGPVLIVTDSFYVAESANKELPYWKSNGFLNNKKKPLRHVSKWKSIAECLQLKPDIIIMHEKGHQQPMTTLHTEGNNLADKLATQGSYVVHAGKRTADGSEFEKRTADGSEFESPKKKAKVE

SEQ ID NO: 488 - protein, 2171 aa, synthetic construct
MPAAKRVKLDGGDKKYSIGLDIGTNSVGWAVITDEYKVPSKKFKVLGNTDRHSIKKNLIGALLFDSGETAEATRLKRTARRRYTRRKNRICYLQEIFSNEMAKVDDSFFHRLEESFLVEEDKKHERHPIFGNIVDEVAYHEKYPTIYHLRKKLVDSTDKADLRLIYLALAHMIKFRGHFLIEGDLNPDNSDVDKLFIQLVQTYNQLFEENPINASGVDAKAILSARLSKSRRLENLIAQLPGEKKNGLFGNLIALSLGLTPNFKSNFDLAEDAKLQLSKDTYDDDLDNLLAQIGDQYADLFLAAKNLSDAILLSDILRVNTEITKAPLSASMIKRYDEHHQDLTLLKALVRQQLPEKYKEIFFDQSKNGYAGYIDGGASQEEFYKFIKPILEKMDGTEELLVKLNREDLLRKQRTFDNGSIPHQIHLGELHAILRRQEDFYPFLKDNREKIEKILTFRIPYYVGPLARGNSRFAWMTRKSEETITPWNFEEVVDKGASAQSFIERMTNFDKNLPNEKVLPKHSLLYEYFTVYNELTKVKYVTEGMRKPAFLSGEQKKAIVDLLFKTNRKVTVKQLKEDYFKKIECFDSVEISGVEDRFNASLGTYHDLLKIIKDKDFLDNEENEDILEDIVLTLTLFEDREMIEERLKTYAHLFDDKVMKQLKRRRYTGWGRLSRKLINGIRDKQSGKTILDFLKSDGFANRNFMQLIHDDSLTFKEDIQKAQVSGQGDSLHEHIANLAGSPAIKKGILQTVKVVDELVKVMGRHKPENIVIEMARENQTTQKGQKNSRERMKRIEEGIKELGSQILKEHPVENTQLQNEKLYLYYLQNGRDMYVDQELDINRLSDYDVDHIVPQSFLKDDSIDNKVLTRSDKARGKSDNVPSEEVVKKMKNYWRQLLNAKLITQRKFDNLTKAERGGLSELDKAGFIKRQLVETRQITKHVAQILDSRMNTKYDENDKLIREVKVITLKSKLVSDFRKDFQFYKVREINNYHHAHDAYLNAVVGTALIKKYPKLESEFVYGDYKVYDVRKMIAKSEQEIGKATAKYFFYSNIMNFFKTEITLANGEIRKRPLIETNGETGEIVWDKGRDFATVRKVLSMPQVNIVKKTEVQTGGFSKESILPKRNSDKLIARKKDWDPKKYGGFDSPTVAYSVLVVAKVEKGKSKKLKSVKELLGITIMERSSFEKNPIDFLEAKGYKEVKKDLIIKLPKYSLFELENGRKRMLASAGELQKGNELALPSKYVNFLYLASHYEKLKGSPEDNEQKQLFVEQHKHYLDEIIEQISEFSKRVILADANLDKVLSAYNKHRDKPIREQAENIIHLFTLTNLGAPAAFKYFDTTIDRKRYTSTKEVLDATLIHQSITGLYETRIDLSQLGGDGGGGGGGSGGMDPLQLLQPLEAEIKGTKLKAHWNSGATITCVPEAFLEDERPIQTMLIKTIHGEKQQDVYYLTFKVQGRKVEAEVLASPYDYILLNPSDVPWLMKKPLQLTVLVPLHEYQERLLQQTALPKEQKELLQKLFLKYDALWQHWENQVGHRRIKPHNIATGTLAPRPQKQYPINPKAKPSIQIVIDDLLKQGVLIQQNSTMNTPVYPVPKPDGKWRMVLDYREVNKTIPLIAAQNQHSAGILSSIYRGKYKTTLDLTNGFWAHPITPESYWLTAFTWQGKQYCWTRLPQGFLNSPALFNADVVDLLKEIPNVQAYVDDIYISHDDPQEHLEQLEKIFSILLNAGYVVSLKKSEIAQREVEFLGFNITKEGRGLTDTFKQKLLNITPPKDLKQLQSILGKLNFARNFIPNYSELVKPLYTIVAPANGKFISWTEDNSNQLQHIISVLNQADNLEERNPETRLIIKVNSSPSAGYIRYYNEGSKRPIMYVNYIFSKAEAKFTQTEKLLTTMHKGLIKAMDLAMGQEILVYSPIVSMTKIQRTPLPERKALPVRWITWMTYLEDPRIQFHYDKSLPELQQIPNVTEDVIAKTKHPSEFAMVFYTDGSAIKHPDVNKSHSAGMGIAQVQFIPEYKIVHQWSIPLGDHTAQLAEIAAVEFACKKALKISGPVLIVTDSFYVAESANKELPYWKSNGFLNNKKKPLRHVSKWKSIAECLQLKPDIIIMHEKGHQQPMTTLHTEGNNLADKLATQGSYVVHAGKRTADGSEFEKRTADGSEFESPKKKAKVE

SEQ ID NO: 489 - protein, 2211 aa, synthetic construct
MPAAKRVKLDGGDKKYSIGLDIGTNSVGWAVITDEYKVPSKKFKVLGNTDRHSIKKNLIGALLFDSGETAEATRLKRTARRRYTRRKNRICYLQEIFSNEMAKVDDSFFHRLEESFLVEEDKKHERHPIFGNIVDEVAYHEKYPTIYHLRKKLVDSTDKADLRLIYLALAHMIKFRGHFLIEGDLNPDNSDVDKLFIQLVQTYNQLFEENPINASGVDAKAILSARLSKSRRLENLIAQLPGEKKNGLFGNLIALSLGLTPNFKSNFDLAEDAKLQLSKDTYDDDLDNLLAQIGDQYADLFLAAKNLSDAILLSDILRVNTEITKAPLSASMIKRYDEHHQDLTLLKALVRQQLPEKYKEIFFDQSKNGYAGYIDGGASQEEFYKFIKPILEKMDGTEELLVKLNREDLLRKQRTFDNGSIPHQIHLGELHAILRRQEDFYPFLKDNREKIEKILTFRIPYYVGPLARGNSRFAWMTRKSEETITPWNFEEVVDKGASAQSFIERMTNFDKNLPNEKVLPKHSLLYEYFTVYNELTKVKYVTEGMRKPAFLSGEQKKAIVDLLFKTNRKVTVKQLKEDYFKKIECFDSVEISGVEDRFNASLGTYHDLLKIIKDKDFLDNEENEDILEDIVLTLTLFEDREMIEERLKTYAHLFDDKVMKQLKRRRYTGWGRLSRKLINGIRDKQSGKTILDFLKSDGFANRNFMQLIHDDSLTFKEDIQKAQVSGQGDSLHEHIANLAGSPAIKKGILQTVKVVDELVKVMGRHKPENIVIEMARENQTTQKGQKNSRERMKRIEEGIKELGSQILKEHPVENTQLQNEKLYLYYLQNGRDMYVDQELDINRLSDYDVDHIVPQSFLKDDSIDNKVLTRSDKARGKSDNVPSEEVVKKMKNYWRQLLNAKLITQRKFDNLTKAERGGLSELDKAGFIKRQLVETRQITKHVAQILDSRMNTKYDENDKLIREVKVITLKSKLVSDFRKDFQFYKVREINNYHHAHDAYLNAVVGTALIKKYPKLESEFVYGDYKVYDVRKMIAKSEQEIGKATAKYFFYSNIMNFFKTEITLANGEIRKRPLIETNGETGEIVWDKGRDFATVRKVLSMPQVNIVKKTEVQTGGFSKESILPKRNSDKLIARKKDWDPKKYGGFDSPTVAYSVLVVAKVEKGKSKKLKSVKELLGITIMERSSFEKNPIDFLEAKGYKEVKKDLIIKLPKYSLFELENGRKRMLASAGELQKGNELALPSKYVNFLYLASHYEKLKGSPEDNEQKQLFVEQHKHYLDEIIEQISEFSKRVILADANLDKVLSAYNKHRDKPIREQAENIIHLFTLTNLGAPAAFKYFDTTIDRKRYTSTKEVLDATLIHQSITGLYETRIDLSQLGGDGGAEAAAKEAAAKEAAAKEAAAKALEAEAAAKEAAAKEAAAKEAAAKAGGMDPLQLLQPLEAEIKGTKLKAHWNSGATITCVPQAFLEEEVPIKNIWIKTIHGEKEQPVYYLTFKIQGRKVEAEVISSPYDYILVSPSDIPWLMKKPLQLTTLVPLQEYEERLLKQTMLTGSYKEKLQSLFLKYDALWQHWENQVGHRRIKPHHIATGTVNPRPQKQYPINPKAKASIQTVINDLLKQGVLIQQNSIMNTPVYPVPKPDGKWRMVLDYREVNKTIPLIAAQNQHSAGILSSIFRGKYKTTLDLSNGFWAHSITPESYWLTAFTWLGQQYCWTRLPQGFLNSPALFTADVVDLLKEVPNVQVYVDDIYISHDDPREHLEQLEKVFSLLLNAGYVVSLKKSEIAQHEVEFLGFNITKEGRGLTETFKQKLLNITPPRDLKQLQSILGLLNFARNFIPNFSELVKPLYNIIATANGKYITWTTDNSQQLQNIISMLNSAENLEERNPEVRLIMKVNTSPSAGYIRFYNEFAKRPIMYLNYVYTKAEVKFTNTEKLLTTIHKGLIKALDLGMGQEILVYSPIVSMTKIQKTPLPERKALPIRWITWMSYLEDPRIQFHYDKTLPELQQVPTVTDDIIAKIKHPSEFSMVFYTDGSAIKHPNVNKSHNAGMGIAQVQFKPEFTVINTWSIPLGDHTAQLAEVAAVEFACKKALKIDGPVLIVTDSFYVAESVNKELPYWQSNGFFNNKKKPLKHVSKWKSIADCIQLKPDIIIIHEKGHQPTASTFHTEGNNLADKLATQGSYVVNAGKRTADGSEFEKRTADGSEFESPKKKAKVE

SEQ ID NO: 490 - protein, 2190 aa, synthetic construct
MPAAKRVKLDGGDKKYSIGLDIGTNSVGWAVITDEYKVPSKKFKVLGNTDRHSIKKNLIGALLFDSGETAEATRLKRTARRRYTRRKNRICYLQEIFSNEMAKVDDSFFHRLEESFLVEEDKKHERHPIFGNIVDEVAYHEKYPTIYHLRKKLVDSTDKADLRLIYLALAHMIKFRGHFLIEGDLNPDNSDVDKLFIQLVQTYNQLFEENPINASGVDAKAILSARLSKSRRLENLIAQLPGEKKNGLFGNLIALSLGLTPNFKSNFDLAEDAKLQLSKDTYDDDLDNLLAQIGDQYADLFLAAKNLSDAILLSDILRVNTEITKAPLSASMIKRYDEHHQDLTLLKALVRQQLPEKYKEIFFDQSKNGYAGYIDGGASQEEFYKFIKPILEKMDGTEELLVKLNREDLLRKQRTFDNGSIPHQIHLGELHAILRRQEDFYPFLKDNREKIEKILTFRIPYYVGPLARGNSRFAWMTRKSEETITPWNFEEVVDKGASAQSFIERMTNFDKNLPNEKVLPKHSLLYEYFTVYNELTKVKYVTEGMRKPAFLSGEQKKAIVDLLFKTNRKVTVKQLKEDYFKKIECFDSVEISGVEDRFNASLGTYHDLLKIIKDKDFLDNEENEDILEDIVLTLTLFEDREMIEERLKTYAHLFDDKVMKQLKRRRYTGWGRLSRKLINGIRDKQSGKTILDFLKSDGFANRNFMQLIHDDSLTFKEDIQKAQVSGQGDSLHEHIANLAGSPAIKKGILQTVKVVDELVKVMGRHKPENIVIEMARENQTTQKGQKNSRERMKRIEEGIKELGSQILKEHPVENTQLQNEKLYLYYLQNGRDMYVDQELDINRLSDYDVDHIVPQSFLKDDSIDNKVLTRSDKARGKSDNVPSEEVVKKMKNYWRQLLNAKLITQRKFDNLTKAERGGLSELDKAGFIKRQLVETRQITKHVAQILDSRMNTKYDENDKLIREVKVITLKSKLVSDFRKDFQFYKVREINNYHHAHDAYLNAVVGTALIKKYPKLESEFVYGDYKVYDVRKMIAKSEQEIGKATAKYFFYSNIMNFFKTEITLANGEIRKRPLIETNGETGEIVWDKGRDFATVRKVLSMPQVNIVKKTEVQTGGFSKESILPKRNSDKLIARKKDWDPKKYGGFDSPTVAYSVLVVAKVEKGKSKKLKSVKELLGITIMERSSFEKNPIDFLEAKGYKEVKKDLIIKLPKYSLFELENGRKRMLASAGELQKGNELALPSKYVNFLYLASHYEKLKGSPEDNEQKQLFVEQHKHYLDEIIEQISEFSKRVILADANLDKVLSAYNKHRDKPIREQAENIIHLFTLTNLGAPAAFKYFDTTIDRKRYTSTKEVLDATLIHQSITGLYETRIDLSQLGGDGGEAAAKEAAAKEAAAKEAAAKEAAAKGGMDPLQLLQPLEAEIKGTKLKAHWNSGATITCVPQAFLEEEVPIKNIWIKTIHGEKEQPVYYLTFKIQGRKVEAEVISSPYDYILVSPSDIPWLMKKPLQLTTLVPLQEYEERLLKQTMLTGSYKEKLQSLFLKYDALWQHWENQVGHRRIKPHHIATGTVNPRPQKQYPINPKAKASIQTVINDLLKQGVLIQQNSIMNTPVYPVPKPDGKWRMVLDYREVNKTIPLIAAQNQHSAGILSSIFRGKYKTTLDLSNGFWAHSITPESYWLTAFTWLGQQYCWTRLPQGFLNSPALFTADVVDLLKEVPNVQVYVDDIYISHDDPREHLEQLEKVFSLLLNAGYVVSLKKSEIAQHEVEFLGFNITKEGRGLTETFKQKLLNITPPRDLKQLQSILGLLNFARNFIPNFSELVKPLYNIIATANGKYITWTTDNSQQLQNIISMLNSAENLEERNPEVRLIMKVNTSPSAGYIRFYNEFAKRPIMYLNYVYTKAEVKFTNTEKLLTTIHKGLIKALDLGMGQEILVYSPIVSMTKIQKTPLPERKALPIRWITWMSYLEDPRIQFHYDKTLPELQQVPTVTDDIIAKIKHPSEFSMVFYTDGSAIKHPNVNKSHNAGMGIAQVQFKPEFTVINTWSIPLGDHTAQLAEVAAVEFACKKALKIDGPVLIVTDSFYVAESVNKELPYWQSNGFFNNKKKPLKHVSKWKSIADCIQLKPDIIIIHEKGHQPTASTFHTEGNNLADKLATQGSYVVNAGKRTADGSEFEKRTADGSEFESPKKKAKVE

SEQ ID NO: 491 - protein, 2176 aa, synthetic construct
MPAAKRVKLDGGDKKYSIGLDIGTNSVGWAVITDEYKVPSKKFKVLGNTDRHSIKKNLIGALLFDSGETAEATRLKRTARRRYTRRKNRICYLQEIFSNEMAKVDDSFFHRLEESFLVEEDKKHERHPIFGNIVDEVAYHEKYPTIYHLRKKLVDSTDKADLRLIYLALAHMIKFRGHFLIEGDLNPDNSDVDKLFIQLVQTYNQLFEENPINASGVDAKAILSARLSKSRRLENLIAQLPGEKKNGLFGNLIALSLGLTPNFKSNFDLAEDAKLQLSKDTYDDDLDNLLAQIGDQYADLFLAAKNLSDAILLSDILRVNTEITKAPLSASMIKRYDEHHQDLTLLKALVRQQLPEKYKEIFFDQSKNGYAGYIDGGASQEEFYKFIKPILEKMDGTEELLVKLNREDLLRKQRTFDNGSIPHQIHLGELHAILRRQEDFYPFLKDNREKIEKILTFRIPYYVGPLARGNSRFAWMTRKSEETITPWNFEEVVDKGASAQSFIERMTNFDKNLPNEKVLPKHSLLYEYFTVYNELTKVKYVTEGMRKPAFLSGEQKKAIVDLLFKTNRKVTVKQLKEDYFKKIECFDSVEISGVEDRFNASLGTYHDLLKIIKDKDFLDNEENEDILEDIVLTLTLFEDREMIEERLKTYAHLFDDKVMKQLKRRRYTGWGRLSRKLINGIRDKQSGKTILDFLKSDGFANRNFMQLIHDDSLTFKEDIQKAQVSGQGDSLHEHIANLAGSPAIKKGILQTVKVVDELVKVMGRHKPENIVIEMARENQTTQKGQKNSRERMKRIEEGIKELGSQILKEHPVENTQLQNEKLYLYYLQNGRDMYVDQELDINRLSDYDVDHIVPQSFLKDDSIDNKVLTRSDKARGKSDNVPSEEVVKKMKNYWRQLLNAKLITQRKFDNLTKAERGGLSELDKAGFIKRQLVETRQITKHVAQILDSRMNTKYDENDKLIREVKVITLKSKLVSDFRKDFQFYKVREINNYHHAHDAYLNAVVGTALIKKYPKLESEFVYGDYKVYDVRKMIAKSEQEIGKATAKYFFYSNIMNFFKTEITLANGEIRKRPLIETNGETGEIVWDKGRDFATVRKVLSMPQVNIVKKTEVQTGGFSKESILPKRNSDKLIARKKDWDPKKYGGFDSPTVAYSVLVVAKVEKGKSKKLKSVKELLGITIMERSSFEKNPIDFLEAKGYKEVKKDLIIKLPKYSLFELENGRKRMLASAGELQKGNELALPSKYVNFLYLASHYEKLKGSPEDNEQKQLFVEQHKHYLDEIIEQISEFSKRVILADANLDKVLSAYNKHRDKPIREQAENIIHLFTLTNLGAPAAFKYFDTTIDRKRYTSTKEVLDATLIHQSITGLYETRIDLSQLGGDGGEAAAKGGGPAPGGMDPLQLLQPLEAEIKGTKLKAHWNSGATITCVPQAFLEEEVPIKNIWIKTIHGEKEQPVYYLTFKIQGRKVEAEVISSPYDYILVSPSDIPWLMKKPLQLTTLVPLQEYEERLLKQTMLTGSYKEKLQSLFLKYDALWQHWENQVGHRRIKPHHIATGTVNPRPQKQYPINPKAKASIQTVINDLLKQGVLIQQNSIMNTPVYPVPKPDGKWRMVLDYREVNKTIPLIAAQNQHSAGILSSIFRGKYKTTLDLSNGFWAHSITPESYWLTAFTWLGQQYCWTRLPQGFLNSPALFTADVVDLLKEVPNVQVYVDDIYISHDDPREHLEQLEKVFSLLLNAGYVVSLKKSEIAQHEVEFLGFNITKEGRGLTETFKQKLLNITPPRDLKQLQSILGLLNFARNFIPNFSELVKPLYNIIATANGKYITWTTDNSQQLQNIISMLNSAENLEERNPEVRLIMKVNTSPSAGYIRFYNEFAKRPIMYLNYVYTKAEVKFTNTEKLLTTIHKGLIKALDLGMGQEILVYSPIVSMTKIQKTPLPERKALPIRWITWMSYLEDPRIQFHYDKTLPELQQVPTVTDDIIAKIKHPSEFSMVFYTDGSAIKHPNVNKSHNAGMGIAQVQFKPEFTVINTWSIPLGDHTAQLAEVAAVEFACKKALKIDGPVLIVTDSFYVAESVNKELPYWQSNGFFNNKKKPLKHVSKWKSIADCIQLKPDIIIIHEKGHQPTASTFHTEGNNLADKLATQGSYVVNAGKRTADGSEFEKRTADGSEFESPKKKAKVE

SEQ ID NO: 492 - protein, 2180 aa, synthetic construct
MPAAKRVKLDGGDKKYSIGLDIGTNSVGWAVITDEYKVPSKKFKVLGNTDRHSIKKNLIGALLFDSGETAEATRLKRTARRRYTRRKNRICYLQEIFSNEMAKVDDSFFHRLEESFLVEEDKKHERHPIFGNIVDEVAYHEKYPTIYHLRKKLVDSTDKADLRLIYLALAHMIKFRGHFLIEGDLNPDNSDVDKLFIQLVQTYNQLFEENPINASGVDAKAILSARLSKSRRLENLIAQLPGEKKNGLFGNLIALSLGLTPNFKSNFDLAEDAKLQLSKDTYDDDLDNLLAQIGDQYADLFLAAKNLSDAILLSDILRVNTEITKAPLSASMIKRYDEHHQDLTLLKALVRQQLPEKYKEIFFDQSKNGYAGYIDGGASQEEFYKFIKPILEKMDGTEELLVKLNREDLLRKQRTFDNGSIPHQIHLGELHAILRRQEDFYPFLKDNREKIEKILTFRIPYYVGPLARGNSRFAWMTRKSEETITPWNFEEVVDKGASAQSFIERMTNFDKNLPNEKVLPKHSLLYEYFTVYNELTKVKYVTEGMRKPAFLSGEQKKAIVDLLFKTNRKVTVKQLKEDYFKKIECFDSVEISGVEDRFNASLGTYHDLLKIIKDKDFLDNEENEDILEDIVLTLTLFEDREMIEERLKTYAHLFDDKVMKQLKRRRYTGWGRLSRKLINGIRDKQSGKTILDFLKSDGFANRNFMQLIHDDSLTFKEDIQKAQVSGQGDSLHEHIANLAGSPAIKKGILQTVKVVDELVKVMGRHKPENIVIEMARENQTTQKGQKNSRERMKRIEEGIKELGSQILKEHPVENTQLQNEKLYLYYLQNGRDMYVDQELDINRLSDYDVDHIVPQSFLKDDSIDNKVLTRSDKARGKSDNVPSEEVVKKMKNYWRQLLNAKLITQRKFDNLTKAERGGLSELDKAGFIKRQLVETRQITKHVAQILDSRMNTKYDENDKLIREVKVITLKSKLVSDFRKDFQFYKVREINNYHHAHDAYLNAVVGTALIKKYPKLESEFVYGDYKVYDVRKMIAKSEQEIGKATAKYFFYSNIMNFFKTEITLANGEIRKRPLIETNGETGEIVWDKGRDFATVRKVLSMPQVNIVKKTEVQTGGFSKESILPKRNSDKLIARKKDWDPKKYGGFDSPTVAYSVLVVAKVEKGKSKKLKSVKELLGITIMERSSFEKNPIDFLEAKGYKEVKKDLIIKLPKYSLFELENGRKRMLASAGELQKGNELALPSKYVNFLYLASHYEKLKGSPEDNEQKQLFVEQHKHYLDEIIEQISEFSKRVILADANLDKVLSAYNKHRDKPIREQAENIIHLFTLTNLGAPAAFKYFDTTIDRKRYTSTKEVLDATLIHQSITGLYETRIDLSQLGGDGGGSSGSSGSSGSSGSSGGMDPLQLLQPLEAEIKGTKLKAHWNSGATITCVPQAFLEEEVPIKNIWIKTIHGEKEQPVYYLTFKIQGRKVEAEVISSPYDYILVSPSDIPWLMKKPLQLTTLVPLQEYEERLLKQTMLTGSYKEKLQSLFLKYDALWQHWENQVGHRRIKPHHIATGTVNPRPQKQYPINPKAKASIQTVINDLLKQGVLIQQNSIMNTPVYPVPKPDGKWRMVLDYREVNKTIPLIAAQNQHSAGILSSIFRGKYKTTLDLSNGFWAHSITPESYWLTAFTWLGQQYCWTRLPQGFLNSPALFTADVVDLLKEVPNVQVYVDDIYISHDDPREHLEQLEKVFSLLLNAGYVVSLKKSEIAQHEVEFLGFNITKEGRGLTETFKQKLLNITPPRDLKQLQSILGLLNFARNFIPNFSELVKPLYNIIATANGKYITWTTDNSQQLQNIISMLNSAENLEERNPEVRLIMKVNTSPSAGYIRFYNEFAKRPIMYLNYVYTKAEVKFTNTEKLLTTIHKGLIKALDLGMGQEILVYSPIVSMTKIQKTPLPERKALPIRWITWMSYLEDPRIQFHYDKTLPELQQVPTVTDDIIAKIKHPSEFSMVFYTDGSAIKHPNVNKSHNAGMGIAQVQFKPEFTVINTWSIPLGDHTAQLAEVAAVEFACKKALKIDGPVLIVTDSFYVAESVNKELPYWQSNGFFNNKKKPLKHVSKWKSIADCIQLKPDIIIIHEKGHQPTASTFHTEGNNLADKLATQGSYVVNAGKRTADGSEFEKRTADGSEFESPKKKAKVE

SEQ ID NO: 493 - protein, 2176 aa, synthetic construct
MPAAKRVKLDGGDKKYSIGLDIGTNSVGWAVITDEYKVPSKKFKVLGNTDRHSIKKNLIGALLFDSGETAEATRLKRTARRRYTRRKNRICYLQEIFSNEMAKVDDSFFHRLEESFLVEEDKKHERHPIFGNIVDEVAYHEKYPTIYHLRKKLVDSTDKADLRLIYLALAHMIKFRGHFLIEGDLNPDNSDVDKLFIQLVQTYNQLFEENPINASGVDAKAILSARLSKSRRLENLIAQLPGEKKNGLFGNLIALSLGLTPNFKSNFDLAEDAKLQLSKDTYDDDLDNLLAQIGDQYADLFLAAKNLSDAILLSDILRVNTEITKAPLSASMIKRYDEHHQDLTLLKALVRQQLPEKYKEIFFDQSKNGYAGYIDGGASQEEFYKFIKPILEKMDGTEELLVKLNREDLLRKQRTFDNGSIPHQIHLGELHAILRRQEDFYPFLKDNREKIEKILTFRIPYYVGPLARGNSRFAWMTRKSEETITPWNFEEVVDKGASAQSFIERMTNFDKNLPNEKVLPKHSLLYEYFTVYNELTKVKYVTEGMRKPAFLSGEQKKAIVDLLFKTNRKVTVKQLKEDYFKKIECFDSVEISGVEDRFNASLGTYHDLLKIIKDKDFLDNEENEDILEDIVLTLTLFEDREMIEERLKTYAHLFDDKVMKQLKRRRYTGWGRLSRKLINGIRDKQSGKTILDFLKSDGFANRNFMQLIHDDSLTFKEDIQKAQVSGQGDSLHEHIANLAGSPAIKKGILQTVKVVDELVKVMGRHKPENIVIEMARENQTTQKGQKNSRERMKRIEEGIKELGSQILKEHPVENTQLQNEKLYLYYLQNGRDMYVDQELDINRLSDYDVDHIVPQSFLKDDSIDNKVLTRSDKARGKSDNVPSEEVVKKMKNYWRQLLNAKLITQRKFDNLTKAERGGLSELDKAGFIKRQLVETRQITKHVAQILDSRMNTKYDENDKLIREVKVITLKSKLVSDFRKDFQFYKVREINNYHHAHDAYLNAVVGTALIKKYPKLESEFVYGDYKVYDVRKMIAKSEQEIGKATAKYFFYSNIMNFFKTEITLANGEIRKRPLIETNGETGEIVWDKGRDFATVRKVLSMPQVNIVKKTEVQTGGFSKESILPKRNSDKLIARKKDWDPKKYGGFDSPTVAYSVLVVAKVEKGKSKKLKSVKELLGITIMERSSFEKNPIDFLEAKGYKEVKKDLIIKLPKYSLFELENGRKRMLASAGELQKGNELALPSKYVNFLYLASHYEKLKGSPEDNEQKQLFVEQHKHYLDEIIEQISEFSKRVILADANLDKVLSAYNKHRDKPIREQAENIIHLFTLTNLGAPAAFKYFDTTIDRKRYTSTKEVLDATLIHQSITGLYETRIDLSQLGGDGGEAAAKGGSPAPGGMDPLQLLQPLEAEIKGTKLKAHWNSGATITCVPQAFLEEEVPIKNIWIKTIHGEKEQPVYYLTFKIQGRKVEAEVISSPYDYILVSPSDIPWLMKKPLQLTTLVPLQEYEERLLKQTMLTGSYKEKLQSLFLKYDALWQHWENQVGHRRIKPHHIATGTVNPRPQKQYPINPKAKASIQTVINDLLKQGVLIQQNSIMNTPVYPVPKPDGKWRMVLDYREVNKTIPLIAAQNQHSAGILSSIFRGKYKTTLDLSNGFWAHSITPESYWLTAFTWLGQQYCWTRLPQGFLNSPALFTADVVDLLKEVPNVQVYVDDIYISHDDPREHLEQLEKVFSLLLNAGYVVSLKKSEIAQHEVEFLGFNITKEGRGLTETFKQKLLNITPPRDLKQLQSILGLLNFARNFIPNFSELVKPLYNIIATANGKYITWTTDNSQQLQNIISMLNSAENLEERNPEVRLIMKVNTSPSAGYIRFYNEFAKRPIMYLNYVYTKAEVKFTNTEKLLTTIHKGLIKALDLGMGQEILVYSPIVSMTKIQKTPLPERKALPIRWITWMSYLEDPRIQFHYDKTLPELQQVPTVTDDIIAKIKHPSEFSMVFYTDGSAIKHPNVNKSHNAGMGIAQVQFKPEFTVINTWSIPLGDHTAQLAEVAAVEFACKKALKIDGPVLIVTDSFYVAESVNKELPYWQSNGFFNNKKKPLKHVSKWKSIADCIQLKPDIIIIHEKGHQPTASTFHTEGNNLADKLATQGSYVVNAGKRTADGSEFEKRTADGSEFESPKKKAKVE

SEQ ID NO: 494 - protein, 2181 aa, synthetic construct
MPAAKRVKLDGGDKKYSIGLDIGTNSVGWAVITDEYKVPSKKFKVLGNTDRHSIKKNLIGALLFDSGETAEATRLKRTARRRYTRRKNRICYLQEIFSNEMAKVDDSFFHRLEESFLVEEDKKHERHPIFGNIVDEVAYHEKYPTIYHLRKKLVDSTDKADLRLIYLALAHMIKFRGHFLIEGDLNPDNSDVDKLFIQLVQTYNQLFEENPINASGVDAKAILSARLSKSRRLENLIAQLPGEKKNGLFGNLIALSLGLTPNFKSNFDLAEDAKLQLSKDTYDDDLDNLLAQIGDQYADLFLAAKNLSDAILLSDILRVNTEITKAPLSASMIKRYDEHHQDLTLLKALVRQQLPEKYKEIFFDQSKNGYAGYIDGGASQEEFYKFIKPILEKMDGTEELLVKLNREDLLRKQRTFDNGSIPHQIHLGELHAILRRQEDFYPFLKDNREKIEKILTFRIPYYVGPLARGNSRFAWMTRKSEETITPWNFEEVVDKGASAQSFIERMTNFDKNLPNEKVLPKHSLLYEYFTVYNELTKVKYVTEGMRKPAFLSGEQKKAIVDLLFKTNRKVTVKQLKEDYFKKIECFDSVEISGVEDRFNASLGTYHDLLKIIKDKDFLDNEENEDILEDIVLTLTLFEDREMIEERLKTYAHLFDDKVMKQLKRRRYTGWGRLSRKLINGIRDKQSGKTILDFLKSDGFANRNFMQLIHDDSLTFKEDIQKAQVSGQGDSLHEHIANLAGSPAIKKGILQTVKVVDELVKVMGRHKPENIVIEMARENQTTQKGQKNSRERMKRIEEGIKELGSQILKEHPVENTQLQNEKLYLYYLQNGRDMYVDQELDINRLSDYDVDHIVPQSFLKDDSIDNKVLTRSDKARGKSDNVPSEEVVKKMKNYWRQLLNAKLITQRKFDNLTKAERGGLSELDKAGFIKRQLVETRQITKHVAQILDSRMNTKYDENDKLIREVKVITLKSKLVSDFRKDFQFYKVREINNYHHAHDAYLNAVVGTALIKKYPKLESEFVYGDYKVYDVRKMIAKSEQEIGKATAKYFFYSNIMNFFKTEITLANGEIRKRPLIETNGETGEIVWDKGRDFATVRKVLSMPQVNIVKKTEVQTGGFSKESILPKRNSDKLIARKKDWDPKKYGGFDSPTVAYSVLVVAKVEKGKSKKLKSVKELLGITIMERSSFEKNPIDFLEAKGYKEVKKDLIIKLPKYSLFELENGRKRMLASAGELQKGNELALPSKYVNFLYLASHYEKLKGSPEDNEQKQLFVEQHKHYLDEIIEQISEFSKRVILADANLDKVLSAYNKHRDKPIREQAENIIHLFTLTNLGAPAAFKYFDTTIDRKRYTSTKEVLDATLIHQSITGLYETRIDLSQLGGDGGSGSETPGTSESATPESGGMDPLQLLQPLEAEIKGTKLKAHWNSGATITCVPQAFLEEEVPIKNIWIKTIHGEKEQPVYYLTFKIQGRKVEAEVISSPYDYILVSPSDIPWLMKKPLQLTTLVPLQEYEERLLKQTMLTGSYKEKLQSLFLKYDALWQHWENQVGHRRIKPHHIATGTVNPRPQKQYPINPKAKASIQTVINDLLKQGVLIQQNSIMNTPVYPVPKPDGKWRMVLDYREVNKTIPLIAAQNQHSAGILSSIFRGKYKTTLDLSNGFWAHSITPESYWLTAFTWLGQQYCWTRLPQGFLNSPALFTADVVDLLKEVPNVQVYVDDIYISHDDPREHLEQLEKVFSLLLNAGYVVSLKKSEIAQHEVEFLGFNITKEGRGLTETFKQKLLNITPPRDLKQLQSILGLLNFARNFIPNFSELVKPLYNIIATANGKYITWTTDNSQQLQNIISMLNSAENLEERNPEVRLIMKVNTSPSAGYIRFYNEFAKRPIMYLNYVYTKAEVKFTNTEKLLTTIHKGLIKALDLGMGQEILVYSPIVSMTKIQKTPLPERKALPIRWITWMSYLEDPRIQFHYDKTLPELQQVPTVTDDIIAKIKHPSEFSMVFYTDGSAIKHPNVNKSHNAGMGIAQVQFKPEFTVINTWSIPLGDHTAQLAEVAAVEFACKKALKIDGPVLIVTDSFYVAESVNKELPYWQSNGFFNNKKKPLKHVSKWKSIADCIQLKPDIIIIHEKGHQPTASTFHTEGNNLADKLATQGSYVVNAGKRTADGSEFEKRTADGSEFESPKKKAKVE

SEQ ID NO: 495 - protein, 2176 aa, synthetic construct
MPAAKRVKLDGGDKKYSIGLDIGTNSVGWAVITDEYKVPSKKFKVLGNTDRHSIKKNLIGALLFDSGETAEATRLKRTARRRYTRRKNRICYLQEIFSNEMAKVDDSFFHRLEESFLVEEDKKHERHPIFGNIVDEVAYHEKYPTIYHLRKKLVDSTDKADLRLIYLALAHMIKFRGHFLIEGDLNPDNSDVDKLFIQLVQTYNQLFEENPINASGVDAKAILSARLSKSRRLENLIAQLPGEKKNGLFGNLIALSLGLTPNFKSNFDLAEDAKLQLSKDTYDDDLDNLLAQIGDQYADLFLAAKNLSDAILLSDILRVNTEITKAPLSASMIKRYDEHHQDLTLLKALVRQQLPEKYKEIFFDQSKNGYAGYIDGGASQEEFYKFIKPILEKMDGTEELLVKLNREDLLRKQRTFDNGSIPHQIHLGELHAILRRQEDFYPFLKDNREKIEKILTFRIPYYVGPLARGNSRFAWMTRKSEETITPWNFEEVVDKGASAQSFIERMTNFDKNLPNEKVLPKHSLLYEYFTVYNELTKVKYVTEGMRKPAFLSGEQKKAIVDLLFKTNRKVTVKQLKEDYFKKIECFDSVEISGVEDRFNASLGTYHDLLKIIKDKDFLDNEENEDILEDIVLTLTLFEDREMIEERLKTYAHLFDDKVMKQLKRRRYTGWGRLSRKLINGIRDKQSGKTILDFLKSDGFANRNFMQLIHDDSLTFKEDIQKAQVSGQGDSLHEHIANLAGSPAIKKGILQTVKVVDELVKVMGRHKPENIVIEMARENQTTQKGQKNSRERMKRIEEGIKELGSQILKEHPVENTQLQNEKLYLYYLQNGRDMYVDQELDINRLSDYDVDHIVPQSFLKDDSIDNKVLTRSDKARGKSDNVPSEEVVKKMKNYWRQLLNAKLITQRKFDNLTKAERGGLSELDKAGFIKRQLVETRQITKHVAQILDSRMNTKYDENDKLIREVKVITLKSKLVSDFRKDFQFYKVREINNYHHAHDAYLNAVVGTALIKKYPKLESEFVYGDYKVYDVRKMIAKSEQEIGKATAKYFFYSNIMNFFKTEITLANGEIRKRPLIETNGETGEIVWDKGRDFATVRKVLSMPQVNIVKKTEVQTGGFSKESILPKRNSDKLIARKKDWDPKKYGGFDSPTVAYSVLVVAKVEKGKSKKLKSVKELLGITIMERSSFEKNPIDFLEAKGYKEVKKDLIIKLPKYSLFELENGRKRMLASAGELQKGNELALPSKYVNFLYLASHYEKLKGSPEDNEQKQLFVEQHKHYLDEIIEQISEFSKRVILADANLDKVLSAYNKHRDKPIREQAENIIHLFTLTNLGAPAAFKYFDTTIDRKRYTSTKEVLDATLIHQSITGLYETRIDLSQLGGDGGEAAAKPAPGSSGGMDPLQLLQPLEAEIKGTKLKAHWNSGATITCVPQAFLEEEVPIKNIWIKTIHGEKEQPVYYLTFKIQGRKVEAEVISSPYDYILVSPSDIPWLMKKPLQLTTLVPLQEYEERLLKQTMLTGSYKEKLQSLFLKYDALWQHWENQVGHRRIKPHHIATGTVNPRPQKQYPINPKAKASIQTVINDLLKQGVLIQQNSIMNTPVYPVPKPDGKWRMVLDYREVNKTIPLIAAQNQHSAGILSSIFRGKYKTTLDLSNGFWAHSITPESYWLTAFTWLGQQYCWTRLPQGFLNSPALFTADVVDLLKEVPNVQVYVDDIYISHDDPREHLEQLEKVFSLLLNAGYVVSLKKSEIAQHEVEFLGFNITKEGRGLTETFKQKLLNITPPRDLKQLQSILGLLNFARNFIPNFSELVKPLYNIIATANGKYITWTTDNSQQLQNIISMLNSAENLEERNPEVRLIMKVNTSPSAGYIRFYNEFAKRPIMYLNYVYTKAEVKFTNTEKLLTTIHKGLIKALDLGMGQEILVYSPIVSMTKIQKTPLPERKALPIRWITWMSYLEDPRIQFHYDKTLPELQQVPTVTDDIIAKIKHPSEFSMVFYTDGSAIKHPNVNKSHNAGMGIAQVQFKPEFTVINTWSIPLGDHTAQLAEVAAVEFACKKALKIDGPVLIVTDSFYVAESVNKELPYWQSNGFFNNKKKPLKHVSKWKSIADCIQLKPDIIIIHEKGHQPTASTFHTEGNNLADKLATQGSYVVNAGKRTADGSEFEKRTADGSEFESPKKKAKVE

SEQ ID NO: 496 - protein, 2176 aa, synthetic construct
MPAAKRVKLDGGDKKYSIGLDIGTNSVGWAVITDEYKVPSKKFKVLGNTDRHSIKKNLIGALLFDSGETAEATRLKRTARRRYTRRKNRICYLQEIFSNEMAKVDDSFFHRLEESFLVEEDKKHERHPIFGNIVDEVAYHEKYPTIYHLRKKLVDSTDKADLRLIYLALAHMIKFRGHFLIEGDLNPDNSDVDKLFIQLVQTYNQLFEENPINASGVDAKAILSARLSKSRRLENLIAQLPGEKKNGLFGNLIALSLGLTPNFKSNFDLAEDAKLQLSKDTYDDDLDNLLAQIGDQYADLFLAAKNLSDAILLSDILRVNTEITKAPLSASMIKRYDEHHQDLTLLKALVRQQLPEKYKEIFFDQSKNGYAGYIDGGASQEEFYKFIKPILEKMDGTEELLVKLNREDLLRKQRTFDNGSIPHQIHLGELHAILRRQEDFYPFLKDNREKIEKILTFRIPYYVGPLARGNSRFAWMTRKSEETITPWNFEEVVDKGASAQSFIERMTNFDKNLPNEKVLPKHSLLYEYFTVYNELTKVKYVTEGMRKPAFLSGEQKKAIVDLLFKTNRKVTVKQLKEDYFKKIECFDSVEISGVEDRFNASLGTYHDLLKIIKDKDFLDNEENEDILEDIVLTLTLFEDREMIEERLKTYAHLFDDKVMKQLKRRRYTGWGRLSRKLINGIRDKQSGKTILDFLKSDGFANRNFMQLIHDDSLTFKEDIQKAQVSGQGDSLHEHIANLAGSPAIKKGILQTVKVVDELVKVMGRHKPENIVIEMARENQTTQKGQKNSRERMKRIEEGIKELGSQILKEHPVENTQLQNEKLYLYYLQNGRDMYVDQELDINRLSDYDVDHIVPQSFLKDDSIDNKVLTRSDKARGKSDNVPSEEVVKKMKNYWRQLLNAKLITQRKFDNLTKAERGGLSELDKAGFIKRQLVETRQITKHVAQILDSRMNTKYDENDKLIREVKVITLKSKLVSDFRKDFQFYKVREINNYHHAHDAYLNAVVGTALIKKYPKLESEFVYGDYKVYDVRKMIAKSEQEIGKATAKYFFYSNIMNFFKTEITLANGEIRKRPLIETNGETGEIVWDKGRDFATVRKVLSMPQVNIVKKTEVQTGGFSKESILPKRNSDKLIARKKDWDPKKYGGFDSPTVAYSVLVVAKVEKGKSKKLKSVKELLGITIMERSSFEKNPIDFLEAKGYKEVKKDLIIKLPKYSLFELENGRKRMLASAGELQKGNELALPSKYVNFLYLASHYEKLKGSPEDNEQKQLFVEQHKHYLDEIIEQISEFSKRVILADANLDKVLSAYNKHRDKPIREQAENIIHLFTLTNLGAPAAFKYFDTTIDRKRYTSTKEVLDATLIHQSITGLYETRIDLSQLGGDGGEAAAKGSSPAPGGMDPLQLLQPLEAEIKGTKLKAHWNSGATITCVPQAFLEEEVPIKNIWIKTIHGEKEQPVYYLTFKIQGRKVEAEVISSPYDYILVSPSDIPWLMKKPLQLTTLVPLQEYEERLLKQTMLTGSYKEKLQSLFLKYDALWQHWENQVGHRRIKPHHIATGTVNPRPQKQYPINPKAKASIQTVINDLLKQGVLIQQNSIMNTPVYPVPKPDGKWRMVLDYREVNKTIPLIAAQNQHSAGILSSIFRGKYKTTLDLSNGFWAHSITPESYWLTAFTWLGQQYCWTRLPQGFLNSPALFTADVVDLLKEVPNVQVYVDDIYISHDDPREHLEQLEKVFSLLLNAGYVVSLKKSEIAQHEVEFLGFNITKEGRGLTETFKQKLLNITPPRDLKQLQSILGLLNFARNFIPNFSELVKPLYNIIATANGKYITWTTDNSQQLQNIISMLNSAENLEERNPEVRLIMKVNTSPSAGYIRFYNEFAKRPIMYLNYVYTKAEVKFTNTEKLLTTIHKGLIKALDLGMGQEILVYSPIVSMTKIQKTPLPERKALPIRWITWMSYLEDPRIQFHYDKTLPELQQVPTVTDDIIAKIKHPSEFSMVFYTDGSAIKHPNVNKSHNAGMGIAQVQFKPEFTVINTWSIPLGDHTAQLAEVAAVEFACKKALKIDGPVLIVTDSFYVAESVNKELPYWQSNGFFNNKKKPLKHVSKWKSIADCIQLKPDIIIIHEKGHQPTASTFHTEGNNLADKLATQGSYVVNAGKRTADGSEFEKRTADGSEFESPKKKAKVE

SEQ ID NO: 497 - protein, 2176 aa, synthetic construct
MPAAKRVKLDGGDKKYSIGLDIGTNSVGWAVITDEYKVPSKKFKVLGNTDRHSIKKNLIGALLFDSGETAEATRLKRTARRRYTRRKNRICYLQEIFSNEMAKVDDSFFHRLEESFLVEEDKKHERHPIFGNIVDEVAYHEKYPTIYHLRKKLVDSTDKADLRLIYLALAHMIKFRGHFLIEGDLNPDNSDVDKLFIQLVQTYNQLFEENPINASGVDAKAILSARLSKSRRLENLIAQLPGEKKNGLFGNLIALSLGLTPNFKSNFDLAEDAKLQLSKDTYDDDLDNLLAQIGDQYADLFLAAKNLSDAILLSDILRVNTEITKAPLSASMIKRYDEHHQDLTLLKALVRQQLPEKYKEIFFDQSKNGYAGYIDGGASQEEFYKFIKPILEKMDGTEELLVKLNREDLLRKQRTFDNGSIPHQIHLGELHAILRRQEDFYPFLKDNREKIEKILTFRIPYYVGPLARGNSRFAWMTRKSEETITPWNFEEVVDKGASAQSFIERMTNFDKNLPNEKVLPKHSLLYEYFTVYNELTKVKYVTEGMRKPAFLSGEQKKAIVDLLFKTNRKVTVKQLKEDYFKKIECFDSVEISGVEDRFNASLGTYHDLLKIIKDKDFLDNEENEDILEDIVLTLTLFEDREMIEERLKTYAHLFDDKVMKQLKRRRYTGWGRLSRKLINGIRDKQSGKTILDFLKSDGFANRNFMQLIHDDSLTFKEDIQKAQVSGQGDSLHEHIANLAGSPAIKKGILQTVKVVDELVKVMGRHKPENIVIEMARENQTTQKGQKNSRERMKRIEEGIKELGSQILKEHPVENTQLQNEKLYLYYLQNGRDMYVDQELDINRLSDYDVDHIVPQSFLKDDSIDNKVLTRSDKARGKSDNVPSEEVVKKMKNYWRQLLNAKLITQRKFDNLTKAERGGLSELDKAGFIKRQLVETRQITKHVAQILDSRMNTKYDENDKLIREVKVITLKSKLVSDFRKDFQFYKVREINNYHHAHDAYLNAVVGTALIKKYPKLESEFVYGDYKVYDVRKMIAKSEQEIGKATAKYFFYSNIMNFFKTEITLANGEIRKRPLIETNGETGEIVWDKGRDFATVRKVLSMPQVNIVKKTEVQTGGFSKESILPKRNSDKLIARKKDWDPKKYGGFDSPTVAYSVLVVAKVEKGKSKKLKSVKELLGITIMERSSFEKNPIDFLEAKGYKEVKKDLIIKLPKYSLFELENGRKRMLASAGELQKGNELALPSKYVNFLYLASHYEKLKGSPEDNEQKQLFVEQHKHYLDEIIEQISEFSKRVILADANLDKVLSAYNKHRDKPIREQAENIIHLFTLTNLGAPAAFKYFDTTIDRKRYTSTKEVLDATLIHQSITGLYETRIDLSQLGGDGGPAPGGGEAAAKGGMDPLQLLQPLEAEIKGTKLKAHWNSGATITCVPQAFLEEEVPIKNIWIKTIHGEKEQPVYYLTFKIQGRKVEAEVISSPYDYILVSPSDIPWLMKKPLQLTTLVPLQEYEERLLKQTMLTGSYKEKLQSLFLKYDALWQHWENQVGHRRIKPHHIATGTVNPRPQKQYPINPKAKASIQTVINDLLKQGVLIQQNSIMNTPVYPVPKPDGKWRMVLDYREVNKTIPLIAAQNQHSAGILSSIFRGKYKTTLDLSNGFWAHSITPESYWLTAFTWLGQQYCWTRLPQGFLNSPALFTADVVDLLKEVPNVQVYVDDIYISHDDPREHLEQLEKVFSLLLNAGYVVSLKKSEIAQHEVEFLGFNITKEGRGLTETFKQKLLNITPPRDLKQLQSILGLLNFARNFIPNFSELVKPLYNIIATANGKYITWTTDNSQQLQNIISMLNSAENLEERNPEVRLIMKVNTSPSAGYIRFYNEFAKRPIMYLNYVYTKAEVKFTNTEKLLTTIHKGLIKALDLGMGQEILVYSPIVSMTKIQKTPLPERKALPIRWITWMSYLEDPRIQFHYDKTLPELQQVPTVTDDIIAKIKHPSEFSMVFYTDGSAIKHPNVNKSHNAGMGIAQVQFKPEFTVINTWSIPLGDHTAQLAEVAAVEFACKKALKIDGPVLIVTDSFYVAESVNKELPYWQSNGFFNNKKKPLKHVSKWKSIADCIQLKPDIIIIHEKGHQPTASTFHTEGNNLADKLATQGSYVVNAGKRTADGSEFEKRTADGSEFESPKKKAKVE

SEQ ID NO: 498 - protein, 2180 aa, synthetic construct
MPAAKRVKLDGGDKKYSIGLDIGTNSVGWAVITDEYKVPSKKFKVLGNTDRHSIKKNLIGALLFDSGETAEATRLKRTARRRYTRRKNRICYLQEIFSNEMAKVDDSFFHRLEESFLVEEDKKHERHPIFGNIVDEVAYHEKYPTIYHLRKKLVDSTDKADLRLIYLALAHMIKFRGHFLIEGDLNPDNSDVDKLFIQLVQTYNQLFEENPINASGVDAKAILSARLSKSRRLENLIAQLPGEKKNGLFGNLIALSLGLTPNFKSNFDLAEDAKLQLSKDTYDDDLDNLLAQIGDQYADLFLAAKNLSDAILLSDILRVNTEITKAPLSASMIKRYDEHHQDLTLLKALVRQQLPEKYKEIFFDQSKNGYAGYIDGGASQEEFYKFIKPILEKMDGTEELLVKLNREDLLRKQRTFDNGSIPHQIHLGELHAILRRQEDFYPFLKDNREKIEKILTFRIPYYVGPLARGNSRFAWMTRKSEETITPWNFEEVVDKGASAQSFIERMTNFDKNLPNEKVLPKHSLLYEYFTVYNELTKVKYVTEGMRKPAFLSGEQKKAIVDLLFKTNRKVTVKQLKEDYFKKIECFDSVEISGVEDRFNASLGTYHDLLKIIKDKDFLDNEENEDILEDIVLTLTLFEDREMIEERLKTYAHLFDDKVMKQLKRRRYTGWGRLSRKLINGIRDKQSGKTILDFLKSDGFANRNFMQLIHDDSLTFKEDIQKAQVSGQGDSLHEHIANLAGSPAIKKGILQTVKVVDELVKVMGRHKPENIVIEMARENQTTQKGQKNSRERMKRIEEGIKELGSQILKEHPVENTQLQNEKLYLYYLQNGRDMYVDQELDINRLSDYDVDHIVPQSFLKDDSIDNKVLTRSDKARGKSDNVPSEEVVKKMKNYWRQLLNAKLITQRKFDNLTKAERGGLSELDKAGFIKRQLVETRQITKHVAQILDSRMNTKYDENDKLIREVKVITLKSKLVSDFRKDFQFYKVREINNYHHAHDAYLNAVVGTALIKKYPKLESEFVYGDYKVYDVRKMIAKSEQEIGKATAKYFFYSNIMNFFKTEITLANGEIRKRPLIETNGETGEIVWDKGRDFATVRKVLSMPQVNIVKKTEVQTGGFSKESILPKRNSDKLIARKKDWDPKKYGGFDSPTVAYSVLVVAKVEKGKSKKLKSVKELLGITIMERSSFEKNPIDFLEAKGYKEVKKDLIIKLPKYSLFELENGRKRMLASAGELQKGNELALPSKYVNFLYLASHYEKLKGSPEDNEQKQLFVEQHKHYLDEIIEQISEFSKRVILADANLDKVLSAYNKHRDKPIREQAENIIHLFTLTNLGAPAAFKYFDTTIDRKRYTSTKEVLDATLIHQSITGLYETRIDLSQLGGDGGEAAAKEAAAKEAAAKGGMDPLQLLQPLEAEIKGTKLKAHWNSGATITCVPQAFLEEEVPIKNIWIKTIHGEKEQPVYYLTFKIQGRKVEAEVISSPYDYILVSPSDIPWLMKKPLQLTTLVPLQEYEERLLKQTMLTGSYKEKLQSLFLKYDALWQHWENQVGHRRIKPHHIATGTVNPRPQKQYPINPKAKASIQTVINDLLKQGVLIQQNSIMNTPVYPVPKPDGKWRMVLDYREVNKTIPLIAAQNQHSAGILSSIFRGKYKTTLDLSNGFWAHSITPESYWLTAFTWLGQQYCWTRLPQGFLNSPALFTADVVDLLKEVPNVQVYVDDIYISHDDPREHLEQLEKVFSLLLNAGYVVSLKKSEIAQHEVEFLGFNITKEGRGLTETFKQKLLNITPPRDLKQLQSILGLLNFARNFIPNFSELVKPLYNIIATANGKYITWTTDNSQQLQNIISMLNSAENLEERNPEVRLIMKVNTSPSAGYIRFYNEFAKRPIMYLNYVYTKAEVKFTNTEKLLTTIHKGLIKALDLGMGQEILVYSPIVSMTKIQKTPLPERKALPIRWITWMSYLEDPRIQFHYDKTLPELQQVPTVTDDIIAKIKHPSEFSMVFYTDGSAIKHPNVNKSHNAGMGIAQVQFKPEFTVINTWSIPLGDHTAQLAEVAAVEFACKKALKIDGPVLIVTDSFYVAESVNKELPYWQSNGFFNNKKKPLKHVSKWKSIADCIQLKPDIIIIHEKGHQPTASTFHTEGNNLADKLATQGSYVVNAGKRTADGSEFEKRTADGSEFESPKKKAKVE

SEQ ID NO: 499 - protein, 2176 aa, synthetic construct
MPAAKRVKLDGGDKKYSIGLDIGTNSVGWAVITDEYKVPSKKFKVLGNTDRHSIKKNLIGALLFDSGETAEATRLKRTARRRYTRRKNRICYLQEIFSNEMAKVDDSFFHRLEESFLVEEDKKHERHPIFGNIVDEVAYHEKYPTIYHLRKKLVDSTDKADLRLIYLALAHMIKFRGHFLIEGDLNPDNSDVDKLFIQLVQTYNQLFEENPINASGVDAKAILSARLSKSRRLENLIAQLPGEKKNGLFGNLIALSLGLTPNFKSNFDLAEDAKLQLSKDTYDDDLDNLLAQIGDQYADLFLAAKNLSDAILLSDILRVNTEITKAPLSASMIKRYDEHHQDLTLLKALVRQQLPEKYKEIFFDQSKNGYAGYIDGGASQEEFYKFIKPILEKMDGTEELLVKLNREDLLRKQRTFDNGSIPHQIHLGELHAILRRQEDFYPFLKDNREKIEKILTFRIPYYVGPLARGNSRFAWMTRKSEETITPWNFEEVVDKGASAQSFIERMTNFDKNLPNEKVLPKHSLLYEYFTVYNELTKVKYVTEGMRKPAFLSGEQKKAIVDLLFKTNRKVTVKQLKEDYFKKIECFDSVEISGVEDRFNASLGTYHDLLKIIKDKDFLDNEENEDILEDIVLTLTLFEDREMIEERLKTYAHLFDDKVMKQLKRRRYTGWGRLSRKLINGIRDKQSGKTILDFLKSDGFANRNFMQLIHDDSLTFKEDIQKAQVSGQGDSLHEHIANLAGSPAIKKGILQTVKVVDELVKVMGRHKPENIVIEMARENQTTQKGQKNSRERMKRIEEGIKELGSQILKEHPVENTQLQNEKLYLYYLQNGRDMYVDQELDINRLSDYDVDHIVPQSFLKDDSIDNKVLTRSDKARGKSDNVPSEEVVKKMKNYWRQLLNAKLITQRKFDNLTKAERGGLSELDKAGFIKRQLVETRQITKHVAQILDSRMNTKYDENDKLIREVKVITLKSKLVSDFRKDFQFYKVREINNYHHAHDAYLNAVVGTALIKKYPKLESEFVYGDYKVYDVRKMIAKSEQEIGKATAKYFFYSNIMNFFKTEITLANGEIRKRPLIETNGETGEIVWDKGRDFATVRKVLSMPQVNIVKKTEVQTGGFSKESILPKRNSDKLIARKKDWDPKKYGGFDSPTVAYSVLVVAKVEKGKSKKLKSVKELLGITIMERSSFEKNPIDFLEAKGYKEVKKDLIIKLPKYSLFELENGRKRMLASAGELQKGNELALPSKYVNFLYLASHYEKLKGSPEDNEQKQLFVEQHKHYLDEIIEQISEFSKRVILADANLDKVLSAYNKHRDKPIREQAENIIHLFTLTNLGAPAAFKYFDTTIDRKRYTSTKEVLDATLIHQSITGLYETRIDLSQLGGDGGEAAAKPAPGGSGGMDPLQLLQPLEAEIKGTKLKAHWNSGATITCVPQAFLEEEVPIKNIWIKTIHGEKEQPVYYLTFKIQGRKVEAEVISSPYDYILVSPSDIPWLMKKPLQLTTLVPLQEYEERLLKQTMLTGSYKEKLQSLFLKYDALWQHWENQVGHRRIKPHHIATGTVNPRPQKQYPINPKAKASIQTVINDLLKQGVLIQQNSIMNTPVYPVPKPDGKWRMVLDYREVNKTIPLIAAQNQHSAGILSSIFRGKYKTTLDLSNGFWAHSITPESYWLTAFTWLGQQYCWTRLPQGFLNSPALFTADVVDLLKEVPNVQVYVDDIYISHDDPREHLEQLEKVFSLLLNAGYVVSLKKSEIAQHEVEFLGFNITKEGRGLTETFKQKLLNITPPRDLKQLQSILGLLNFARNFIPNFSELVKPLYNIIATANGKYITWTTDNSQQLQNIISMLNSAENLEERNPEVRLIMKVNTSPSAGYIRFYNEFAKRPIMYLNYVYTKAEVKFTNTEKLLTTIHKGLIKALDLGMGQEILVYSPIVSMTKIQKTPLPERKALPIRWITWMSYLEDPRIQFHYDKTLPELQQVPTVTDDIIAKIKHPSEFSMVFYTDGSAIKHPNVNKSHNAGMGIAQVQFKPEFTVINTWSIPLGDHTAQLAEVAAVEFACKKALKIDGPVLIVTDSFYVAESVNKELPYWQSNGFFNNKKKPLKHVSKWKSIADCIQLKPDIIIIHEKGHQPTASTFHTEGNNLADKLATQGSYVVNAGKRTADGSEFEKRTADGSEFESPKKKAKVE

SEQ ID NO: 500 - protein, 2178 aa, synthetic construct
MPAAKRVKLDGGDKKYSIGLDIGTNSVGWAVITDEYKVPSKKFKVLGNTDRHSIKKNLIGALLFDSGETAEATRLKRTARRRYTRRKNRICYLQEIFSNEMAKVDDSFFHRLEESFLVEEDKKHERHPIFGNIVDEVAYHEKYPTIYHLRKKLVDSTDKADLRLIYLALAHMIKFRGHFLIEGDLNPDNSDVDKLFIQLVQTYNQLFEENPINASGVDAKAILSARLSKSRRLENLIAQLPGEKKNGLFGNLIALSLGLTPNFKSNFDLAEDAKLQLSKDTYDDDLDNLLAQIGDQYADLFLAAKNLSDAILLSDILRVNTEITKAPLSASMIKRYDEHHQDLTLLKALVRQQLPEKYKEIFFDQSKNGYAGYIDGGASQEEFYKFIKPILEKMDGTEELLVKLNREDLLRKQRTFDNGSIPHQIHLGELHAILRRQEDFYPFLKDNREKIEKILTFRIPYYVGPLARGNSRFAWMTRKSEETITPWNFEEVVDKGASAQSFIERMTNFDKNLPNEKVLPKHSLLYEYFTVYNELTKVKYVTEGMRKPAFLSGEQKKAIVDLLFKTNRKVTVKQLKEDYFKKIECFDSVEISGVEDRFNASLGTYHDLLKIIKDKDFLDNEENEDILEDIVLTLTLFEDREMIEERLKTYAHLFDDKVMKQLKRRRYTGWGRLSRKLINGIRDKQSGKTILDFLKSDGFANRNFMQLIHDDSLTFKEDIQKAQVSGQGDSLHEHIANLAGSPAIKKGILQTVKVVDELVKVMGRHKPENIVIEMARENQTTQKGQKNSRERMKRIEEGIKELGSQILKEHPVENTQLQNEKLYLYYLQNGRDMYVDQELDINRLSDYDVDHIVPQSFLKDDSIDNKVLTRSDKARGKSDNVPSEEVVKKMKNYWRQLLNAKLITQRKFDNLTKAERGGLSELDKAGFIKRQLVETRQITKHVAQILDSRMNTKYDENDKLIREVKVITLKSKLVSDFRKDFQFYKVREINNYHHAHDAYLNAVVGTALIKKYPKLESEFVYGDYKVYDVRKMIAKSEQEIGKATAKYFFYSNIMNFFKTEITLANGEIRKRPLIETNGETGEIVWDKGRDFATVRKVLSMPQVNIVKKTEVQTGGFSKESILPKRNSDKLIARKKDWDPKKYGGFDSPTVAYSVLVVAKVEKGKSKKLKSVKELLGITIMERSSFEKNPIDFLEAKGYKEVKKDLIIKLPKYSLFELENGRKRMLASAGELQKGNELALPSKYVNFLYLASHYEKLKGSPEDNEQKQLFVEQHKHYLDEIIEQISEFSKRVILADANLDKVLSAYNKHRDKPIREQAENIIHLFTLTNLGAPAAFKYFDTTIDRKRYTSTKEVLDATLIHQSITGLYETRIDLSQLGGDGGPAPAPAPAPAPAPGGMDPLQLLQPLEAEIKGTKLKAHWNSGATITCVPQAFLEEEVPIKNIWIKTIHGEKEQPVYYLTFKIQGRKVEAEVISSPYDYILVSPSDIPWLMKKPLQLTTLVPLQEYEERLLKQTMLTGSYKEKLQSLFLKYDALWQHWENQVGHRRIKPHHIATGTVNPRPQKQYPINPKAKASIQTVINDLLKQGVLIQQNSIMNTPVYPVPKPDGKWRMVLDYREVNKTIPLIAAQNQHSAGILSSIFRGKYKTTLDLSNGFWAHSITPESYWLTAFTWLGQQYCWTRLPQGFLNSPALFTADVVDLLKEVPNVQVYVDDIYISHDDPREHLEQLEKVFSLLLNAGYVVSLKKSEIAQHEVEFLGFNITKEGRGLTETFKQKLLNITPPRDLKQLQSILGLLNFARNFIPNFSELVKPLYNIIATANGKYITWTTDNSQQLQNIISMLNSAENLEERNPEVRLIMKVNTSPSAGYIRFYNEFAKRPIMYLNYVYTKAEVKFTNTEKLLTTIHKGLIKALDLGMGQEILVYSPIVSMTKIQKTPLPERKALPIRWITWMSYLEDPRIQFHYDKTLPELQQVPTVTDDIIAKIKHPSEFSMVFYTDGSAIKHPNVNKSHNAGMGIAQVQFKPEFTVINTWSIPLGDHTAQLAEVAAVEFACKKALKIDGPVLIVTDSFYVAESVNKELPYWQSNGFFNNKKKPLKHVSKWKSIADCIQLKPDIIIIHEKGHQPTASTFHTEGNNLADKLATQGSYVVNAGKRTADGSEFEKRTADGSEFESPKKKAKVE

SEQ ID NO: 501 - protein, 2176 aa, synthetic construct
MPAAKRVKLDGGDKKYSIGLDIGTNSVGWAVITDEYKVPSKKFKVLGNTDRHSIKKNLIGALLFDSGETAEATRLKRTARRRYTRRKNRICYLQEIFSNEMAKVDDSFFHRLEESFLVEEDKKHERHPIFGNIVDEVAYHEKYPTIYHLRKKLVDSTDKADLRLIYLALAHMIKFRGHFLIEGDLNPDNSDVDKLFIQLVQTYNQLFEENPINASGVDAKAILSARLSKSRRLENLIAQLPGEKKNGLFGNLIALSLGLTPNFKSNFDLAEDAKLQLSKDTYDDDLDNLLAQIGDQYADLFLAAKNLSDAILLSDILRVNTEITKAPLSASMIKRYDEHHQDLTLLKALVRQQLPEKYKEIFFDQSKNGYAGYIDGGASQEEFYKFIKPILEKMDGTEELLVKLNREDLLRKQRTFDNGSIPHQIHLGELHAILRRQEDFYPFLKDNREKIEKILTFRIPYYVGPLARGNSRFAWMTRKSEETITPWNFEEVVDKGASAQSFIERMTNFDKNLPNEKVLPKHSLLYEYFTVYNELTKVKYVTEGMRKPAFLSGEQKKAIVDLLFKTNRKVTVKQLKEDYFKKIECFDSVEISGVEDRFNASLGTYHDLLKIIKDKDFLDNEENEDILEDIVLTLTLFEDREMIEERLKTYAHLFDDKVMKQLKRRRYTGWGRLSRKLINGIRDKQSGKTILDFLKSDGFANRNFMQLIHDDSLTFKEDIQKAQVSGQGDSLHEHIANLAGSPAIKKGILQTVKVVDELVKVMGRHKPENIVIEMARENQTTQKGQKNSRERMKRIEEGIKELGSQILKEHPVENTQLQNEKLYLYYLQNGRDMYVDQELDINRLSDYDVDHIVPQSFLKDDSIDNKVLTRSDKARGKSDNVPSEEVVKKMKNYWRQLLNAKLITQRKFDNLTKAERGGLSELDKAGFIKRQLVETRQITKHVAQILDSRMNTKYDENDKLIREVKVITLKSKLVSDFRKDFQFYKVREINNYHHAHDAYLNAVVGTALIKKYPKLESEFVYGDYKVYDVRKMIAKSEQEIGKATAKYFFYSNIMNFFKTEITLANGEIRKRPLIETNGETGEIVWDKGRDFATVRKVLSMPQVNIVKKTEVQTGGFSKESILPKRNSDKLIARKKDWDPKKYGGFDSPTVAYSVLVVAKVEKGKSKKLKSVKELLGITIMERSSFEKNPIDFLEAKGYKEVKKDLIIKLPKYSLFELENGRKRMLASAGELQKGNELALPSKYVNFLYLASHYEKLKGSPEDNEQKQLFVEQHKHYLDEIIEQISEFSKRVILADANLDKVLSAYNKHRDKPIREQAENIIHLFTLTNLGAPAAFKYFDTTIDRKRYTSTKEVLDATLIHQSITGLYETRIDLSQLGGDGGGGGEAAAKGGSGGMDPLQLLQPLEAEIKGTKLKAHWNSGATITCVPQAFLEEEVPIKNIWIKTIHGEKEQPVYYLTFKIQGRKVEAEVISSPYDYILVSPSDIPWLMKKPLQLTTLVPLQEYEERLLKQTMLTGSYKEKLQSLFLKYDALWQHWENQVGHRRIKPHHIATGTVNPRPQKQYPINPKAKASIQTVINDLLKQGVLIQQNSIMNTPVYPVPKPDGKWRMVLDYREVNKTIPLIAAQNQHSAGILSSIFRGKYKTTLDLSNGFWAHSITPESYWLTAFTWLGQQYCWTRLPQGFLNSPALFTADVVDLLKEVPNVQVYVDDIYISHDDPREHLEQLEKVFSLLLNAGYVVSLKKSEIAQHEVEFLGFNITKEGRGLTETFKQKLLNITPPRDLKQLQSILGLLNFARNFIPNFSELVKPLYNIIATANGKYITWTTDNSQQLQNIISMLNSAENLEERNPEVRLIMKVNTSPSAGYIRFYNEFAKRPIMYLNYVYTKAEVKFTNTEKLLTTIHKGLIKALDLGMGQEILVYSPIVSMTKIQKTPLPERKALPIRWITWMSYLEDPRIQFHYDKTLPELQQVPTVTDDIIAKIKHPSEFSMVFYTDGSAIKHPNVNKSHNAGMGIAQVQFKPEFTVINTWSIPLGDHTAQLAEVAAVEFACKKALKIDGPVLIVTDSFYVAESVNKELPYWQSNGFFNNKKKPLKHVSKWKSIADCIQLKPDIIIIHEKGHQPTASTFHTEGNNLADKLATQGSYVVNAGKRTADGSEFEKRTADGSEFESPKKKAKVE

SEQ ID NO: 502 - protein, 2176 aa, synthetic construct
MPAAKRVKLDGGDKKYSIGLDIGTNSVGWAVITDEYKVPSKKFKVLGNTDRHSIKKNLIGALLFDSGETAEATRLKRTARRRYTRRKNRICYLQEIFSNEMAKVDDSFFHRLEESFLVEEDKKHERHPIFGNIVDEVAYHEKYPTIYHLRKKLVDSTDKADLRLIYLALAHMIKFRGHFLIEGDLNPDNSDVDKLFIQLVQTYNQLFEENPINASGVDAKAILSARLSKSRRLENLIAQLPGEKKNGLFGNLIALSLGLTPNFKSNFDLAEDAKLQLSKDTYDDDLDNLLAQIGDQYADLFLAAKNLSDAILLSDILRVNTEITKAPLSASMIKRYDEHHQDLTLLKALVRQQLPEKYKEIFFDQSKNGYAGYIDGGASQEEFYKFIKPILEKMDGTEELLVKLNREDLLRKQRTFDNGSIPHQIHLGELHAILRRQEDFYPFLKDNREKIEKILTFRIPYYVGPLARGNSRFAWMTRKSEETITPWNFEEVVDKGASAQSFIERMTNFDKNLPNEKVLPKHSLLYEYFTVYNELTKVKYVTEGMRKPAFLSGEQKKAIVDLLFKTNRKVTVKQLKEDYFKKIECFDSVEISGVEDRFNASLGTYHDLLKIIKDKDFLDNEENEDILEDIVLTLTLFEDREMIEERLKTYAHLFDDKVMKQLKRRRYTGWGRLSRKLINGIRDKQSGKTILDFLKSDGFANRNFMQLIHDDSLTFKEDIQKAQVSGQGDSLHEHIANLAGSPAIKKGILQTVKVVDELVKVMGRHKPENIVIEMARENQTTQKGQKNSRERMKRIEEGIKELGSQILKEHPVENTQLQNEKLYLYYLQNGRDMYVDQELDINRLSDYDVDHIVPQSFLKDDSIDNKVLTRSDKARGKSDNVPSEEVVKKMKNYWRQLLNAKLITQRKFDNLTKAERGGLSELDKAGFIKRQLVETRQITKHVAQILDSRMNTKYDENDKLIREVKVITLKSKLVSDFRKDFQFYKVREINNYHHAHDAYLNAVVGTALIKKYPKLESEFVYGDYKVYDVRKMIAKSEQEIGKATAKYFFYSNIMNFFKTEITLANGEIRKRPLIETNGETGEIVWDKGRDFATVRKVLSMPQVNIVKKTEVQTGGFSKESILPKRNSDKLIARKKDWDPKKYGGFDSPTVAYSVLVVAKVEKGKSKKLKSVKELLGITIMERSSFEKNPIDFLEAKGYKEVKKDLIIKLPKYSLFELENGRKRMLASAGELQKGNELALPSKYVNFLYLASHYEKLKGSPEDNEQKQLFVEQHKHYLDEIIEQISEFSKRVILADANLDKVLSAYNKHRDKPIREQAENIIHLFTLTNLGAPAAFKYFDTTIDRKRYTSTKEVLDATLIHQSITGLYETRIDLSQLGGDGGGGSPAPEAAAKGGMDPLQLLQPLEAEIKGTKLKAHWNSGATITCVPQAFLEEEVPIKNIWIKTIHGEKEQPVYYLTFKIQGRKVEAEVISSPYDYILVSPSDIPWLMKKPLQLTTLVPLQEYEERLLKQTMLTGSYKEKLQSLFLKYDALWQHWENQVGHRRIKPHHIATGTVNPRPQKQYPINPKAKASIQTVINDLLKQGVLIQQNSIMNTPVYPVPKPDGKWRMVLDYREVNKTIPLIAAQNQHSAGILSSIFRGKYKTTLDLSNGFWAHSITPESYWLTAFTWLGQQYCWTRLPQGFLNSPALFTADVVDLLKEVPNVQVYVDDIYISHDDPREHLEQLEKVFSLLLNAGYVVSLKKSEIAQHEVEFLGFNITKEGRGLTETFKQKLLNITPPRDLKQLQSILGLLNFARNFIPNFSELVKPLYNIIATANGKYITWTTDNSQQLQNIISMLNSAENLEERNPEVRLIMKVNTSPSAGYIRFYNEFAKRPIMYLNYVYTKAEVKFTNTEKLLTTIHKGLIKALDLGMGQEILVYSPIVSMTKIQKTPLPERKALPIRWITWMSYLEDPRIQFHYDKTLPELQQVPTVTDDIIAKIKHPSEFSMVFYTDGSAIKHPNVNKSHNAGMGIAQVQFKPEFTVINTWSIPLGDHTAQLAEVAAVEFACKKALKIDGPVLIVTDSFYVAESVNKELPYWQSNGFFNNKKKPLKHVSKWKSIADCIQLKPDIIIIHEKGHQPTASTFHTEGNNLADKLATQGSYVVNAGKRTADGSEFEKRTADGSEFESPKKKAKVE

SEQ ID NO: 503 - protein, 2174 aa, synthetic construct
MPAAKRVKLDGGDKKYSIGLDIGTNSVGWAVITDEYKVPSKKFKVLGNTDRHSIKKNLIGALLFDSGETAEATRLKRTARRRYTRRKNRICYLQEIFSNEMAKVDDSFFHRLEESFLVEEDKKHERHPIFGNIVDEVAYHEKYPTIYHLRKKLVDSTDKADLRLIYLALAHMIKFRGHFLIEGDLNPDNSDVDKLFIQLVQTYNQLFEENPINASGVDAKAILSARLSKSRRLENLIAQLPGEKKNGLFGNLIALSLGLTPNFKSNFDLAEDAKLQLSKDTYDDDLDNLLAQIGDQYADLFLAAKNLSDAILLSDILRVNTEITKAPLSASMIKRYDEHHQDLTLLKALVRQQLPEKYKEIFFDQSKNGYAGYIDGGASQEEFYKFIKPILEKMDGTEELLVKLNREDLLRKQRTFDNGSIPHQIHLGELHAILRRQEDFYPFLKDNREKIEKILTFRIPYYVGPLARGNSRFAWMTRKSEETITPWNFEEVVDKGASAQSFIERMTNFDKNLPNEKVLPKHSLLYEYFTVYNELTKVKYVTEGMRKPAFLSGEQKKAIVDLLFKTNRKVTVKQLKEDYFKKIECFDSVEISGVEDRFNASLGTYHDLLKIIKDKDFLDNEENEDILEDIVLTLTLFEDREMIEERLKTYAHLFDDKVMKQLKRRRYTGWGRLSRKLINGIRDKQSGKTILDFLKSDGFANRNFMQLIHDDSLTFKEDIQKAQVSGQGDSLHEHIANLAGSPAIKKGILQTVKVVDELVKVMGRHKPENIVIEMARENQTTQKGQKNSRERMKRIEEGIKELGSQILKEHPVENTQLQNEKLYLYYLQNGRDMYVDQELDINRLSDYDVDHIVPQSFLKDDSIDNKVLTRSDKARGKSDNVPSEEVVKKMKNYWRQLLNAKLITQRKFDNLTKAERGGLSELDKAGFIKRQLVETRQITKHVAQILDSRMNTKYDENDKLIREVKVITLKSKLVSDFRKDFQFYKVREINNYHHAHDAYLNAVVGTALIKKYPKLESEFVYGDYKVYDVRKMIAKSEQEIGKATAKYFFYSNIMNFFKTEITLANGEIRKRPLIETNGETGEIVWDKGRDFATVRKVLSMPQVNIVKKTEVQTGGFSKESILPKRNSDKLIARKKDWDPKKYGGFDSPTVAYSVLVVAKVEKGKSKKLKSVKELLGITIMERSSFEKNPIDFLEAKGYKEVKKDLIIKLPKYSLFELENGRKRMLASAGELQKGNELALPSKYVNFLYLASHYEKLKGSPEDNEQKQLFVEQHKHYLDEIIEQISEFSKRVILADANLDKVLSAYNKHRDKPIREQAENIIHLFTLTNLGAPAAFKYFDTTIDRKRYTSTKEVLDATLIHQSITGLYETRIDLSQLGGDGGPAPAPAPAPGGMDPLQLLQPLEAEIKGTKLKAHWNSGATITCVPQAFLEEEVPIKNIWIKTIHGEKEQPVYYLTFKIQGRKVEAEVISSPYDYILVSPSDIPWLMKKPLQLTTLVPLQEYEERLLKQTMLTGSYKEKLQSLFLKYDALWQHWENQVGHRRIKPHHIATGTVNPRPQKQYPINPKAKASIQTVINDLLKQGVLIQQNSIMNTPVYPVPKPDGKWRMVLDYREVNKTIPLIAAQNQHSAGILSSIFRGKYKTTLDLSNGFWAHSITPESYWLTAFTWLGQQYCWTRLPQGFLNSPALFTADVVDLLKEVPNVQVYVDDIYISHDDPREHLEQLEKVFSLLLNAGYVVSLKKSEIAQHEVEFLGFNITKEGRGLTETFKQKLLNITPPRDLKQLQSILGLLNFARNFIPNFSELVKPLYNIIATANGKYITWTTDNSQQLQNIISMLNSAENLEERNPEVRLIMKVNTSPSAGYIRFYNEFAKRPIMYLNYVYTKAEVKFTNTEKLLTTIHKGLIKALDLGMGQEILVYSPIVSMTKIQKTPLPERKALPIRWITWMSYLEDPRIQFHYDKTLPELQQVPTVTDDIIAKIKHPSEFSMVFYTDGSAIKHPNVNKSHNAGMGIAQVQFKPEFTVINTWSIPLGDHTAQLAEVAAVEFACKKALKIDGPVLIVTDSFYVAESVNKELPYWQSNGFFNNKKKPLKHVSKWKSIADCIQLKPDIIIIHEKGHQPTASTFHTEGNNLADKLATQGSYVVNAGKRTADGSEFEKRTADGSEFESPKKKAKVE

SEQ ID NO: 504 - protein, 2176 aa, synthetic construct
MPAAKRVKLDGGDKKYSIGLDIGTNSVGWAVITDEYKVPSKKFKVLGNTDRHSIKKNLIGALLFDSGETAEATRLKRTARRRYTRRKNRICYLQEIFSNEMAKVDDSFFHRLEESFLVEEDKKHERHPIFGNIVDEVAYHEKYPTIYHLRKKLVDSTDKADLRLIYLALAHMIKFRGHFLIEGDLNPDNSDVDKLFIQLVQTYNQLFEENPINASGVDAKAILSARLSKSRRLENLIAQLPGEKKNGLFGNLIALSLGLTPNFKSNFDLAEDAKLQLSKDTYDDDLDNLLAQIGDQYADLFLAAKNLSDAILLSDILRVNTEITKAPLSASMIKRYDEHHQDLTLLKALVRQQLPEKYKEIFFDQSKNGYAGYIDGGASQEEFYKFIKPILEKMDGTEELLVKLNREDLLRKQRTFDNGSIPHQIHLGELHAILRRQEDFYPFLKDNREKIEKILTFRIPYYVGPLARGNSRFAWMTRKSEETITPWNFEEVVDKGASAQSFIERMTNFDKNLPNEKVLPKHSLLYEYFTVYNELTKVKYVTEGMRKPAFLSGEQKKAIVDLLFKTNRKVTVKQLKEDYFKKIECFDSVEISGVEDRFNASLGTYHDLLKIIKDKDFLDNEENEDILEDIVLTLTLFEDREMIEERLKTYAHLFDDKVMKQLKRRRYTGWGRLSRKLINGIRDKQSGKTILDFLKSDGFANRNFMQLIHDDSLTFKEDIQKAQVSGQGDSLHEHIANLAGSPAIKKGILQTVKVVDELVKVMGRHKPENIVIEMARENQTTQKGQKNSRERMKRIEEGIKELGSQILKEHPVENTQLQNEKLYLYYLQNGRDMYVDQELDINRLSDYDVDHIVPQSFLKDDSIDNKVLTRSDKARGKSDNVPSEEVVKKMKNYWRQLLNAKLITQRKFDNLTKAERGGLSELDKAGFIKRQLVETRQITKHVAQILDSRMNTKYDENDKLIREVKVITLKSKLVSDFRKDFQFYKVREINNYHHAHDAYLNAVVGTALIKKYPKLESEFVYGDYKVYDVRKMIAKSEQEIGKATAKYFFYSNIMNFFKTEITLANGEIRKRPLIETNGETGEIVWDKGRDFATVRKVLSMPQVNIVKKTEVQTGGFSKESILPKRNSDKLIARKKDWDPKKYGGFDSPTVAYSVLVVAKVEKGKSKKLKSVKELLGITIMERSSFEKNPIDFLEAKGYKEVKKDLIIKLPKYSLFELENGRKRMLASAGELQKGNELALPSKYVNFLYLASHYEKLKGSPEDNEQKQLFVEQHKHYLDEIIEQISEFSKRVILADANLDKVLSAYNKHRDKPIREQAENIIHLFTLTNLGAPAAFKYFDTTIDRKRYTSTKEVLDATLIHQSITGLYETRIDLSQLGGDGGGGGEAAAKGSSGGMDPLQLLQPLEAEIKGTKLKAHWNSGATITCVPQAFLEEEVPIKNIWIKTIHGEKEQPVYYLTFKIQGRKVEAEVISSPYDYILVSPSDIPWLMKKPLQLTTLVPLQEYEERLLKQTMLTGSYKEKLQSLFLKYDALWQHWENQVGHRRIKPHHIATGTVNPRPQKQYPINPKAKASIQTVINDLLKQGVLIQQNSIMNTPVYPVPKPDGKWRMVLDYREVNKTIPLIAAQNQHSAGILSSIFRGKYKTTLDLSNGFWAHSITPESYWLTAFTWLGQQYCWTRLPQGFLNSPALFTADVVDLLKEVPNVQVYVDDIYISHDDPREHLEQLEKVFSLLLNAGYVVSLKKSEIAQHEVEFLGFNITKEGRGLTETFKQKLLNITPPRDLKQLQSILGLLNFARNFIPNFSELVKPLYNIIATANGKYITWTTDNSQQLQNIISMLNSAENLEERNPEVRLIMKVNTSPSAGYIRFYNEFAKRPIMYLNYVYTKAEVKFTNTEKLLTTIHKGLIKALDLGMGQEILVYSPIVSMTKIQKTPLPERKALPIRWITWMSYLEDPRIQFHYDKTLPELQQVPTVTDDIIAKIKHPSEFSMVFYTDGSAIKHPNVNKSHNAGMGIAQVQFKPEFTVINTWSIPLGDHTAQLAEVAAVEFACKKALKIDGPVLIVTDSFYVAESVNKELPYWQSNGFFNNKKKPLKHVSKWKSIADCIQLKPDIIIIHEKGHQPTASTFHTEGNNLADKLATQGSYVVNAGKRTADGSEFEKRTADGSEFESPKKKAKVE

SEQ ID NO: 505 - protein, 2176 aa, synthetic construct
MPAAKRVKLDGGDKKYSIGLDIGTNSVGWAVITDEYKVPSKKFKVLGNTDRHSIKKNLIGALLFDSGETAEATRLKRTARRRYTRRKNRICYLQEIFSNEMAKVDDSFFHRLEESFLVEEDKKHERHPIFGNIVDEVAYHEKYPTIYHLRKKLVDSTDKADLRLIYLALAHMIKFRGHFLIEGDLNPDNSDVDKLFIQLVQTYNQLFEENPINASGVDAKAILSARLSKSRRLENLIAQLPGEKKNGLFGNLIALSLGLTPNFKSNFDLAEDAKLQLSKDTYDDDLDNLLAQIGDQYADLFLAAKNLSDAILLSDILRVNTEITKAPLSASMIKRYDEHHQDLTLLKALVRQQLPEKYKEIFFDQSKNGYAGYIDGGASQEEFYKFIKPILEKMDGTEELLVKLNREDLLRKQRTFDNGSIPHQIHLGELHAILRRQEDFYPFLKDNREKIEKILTFRIPYYVGPLARGNSRFAWMTRKSEETITPWNFEEVVDKGASAQSFIERMTNFDKNLPNEKVLPKHSLLYEYFTVYNELTKVKYVTEGMRKPAFLSGEQKKAIVDLLFKTNRKVTVKQLKEDYFKKIECFDSVEISGVEDRFNASLGTYHDLLKIIKDKDFLDNEENEDILEDIVLTLTLFEDREMIEERLKTYAHLFDDKVMKQLKRRRYTGWGRLSRKLINGIRDKQSGKTILDFLKSDGFANRNFMQLIHDDSLTFKEDIQKAQVSGQGDSLHEHIANLAGSPAIKKGILQTVKVVDELVKVMGRHKPENIVIEMARENQTTQKGQKNSRERMKRIEEGIKELGSQILKEHPVENTQLQNEKLYLYYLQNGRDMYVDQELDINRLSDYDVDHIVPQSFLKDDSIDNKVLTRSDKARGKSDNVPSEEVVKKMKNYWRQLLNAKLITQRKFDNLTKAERGGLSELDKAGFIKRQLVETRQITKHVAQILDSRMNTKYDENDKLIREVKVITLKSKLVSDFRKDFQFYKVREINNYHHAHDAYLNAVVGTALIKKYPKLESEFVYGDYKVYDVRKMIAKSEQEIGKATAKYFFYSNIMNFFKTEITLANGEIRKRPLIETNGETGEIVWDKGRDFATVRKVLSMPQVNIVKKTEVQTGGFSKESILPKRNSDKLIARKKDWDPKKYGGFDSPTVAYSVLVVAKVEKGKSKKLKSVKELLGITIMERSSFEKNPIDFLEAKGYKEVKKDLIIKLPKYSLFELENGRKRMLASAGELQKGNELALPSKYVNFLYLASHYEKLKGSPEDNEQKQLFVEQHKHYLDEIIEQISEFSKRVILADANLDKVLSAYNKHRDKPIREQAENIIHLFTLTNLGAPAAFKYFDTTIDRKRYTSTKEVLDATLIHQSITGLYETRIDLSQLGGDGGEAAAKGGSGSSGGMDPLQLLQPLEAEIKGTKLKAHWNSGATITCVPQAFLEEEVPIKNIWIKTIHGEKEQPVYYLTFKIQGRKVEAEVISSPYDYILVSPSDIPWLMKKPLQLTTLVPLQEYEERLLKQTMLTGSYKEKLQSLFLKYDALWQHWENQVGHRRIKPHHIATGTVNPRPQKQYPINPKAKASIQTVINDLLKQGVLIQQNSIMNTPVYPVPKPDGKWRMVLDYREVNKTIPLIAAQNQHSAGILSSIFRGKYKTTLDLSNGFWAHSITPESYWLTAFTWLGQQYCWTRLPQGFLNSPALFTADVVDLLKEVPNVQVYVDDIYISHDDPREHLEQLEKVFSLLLNAGYVVSLKKSEIAQHEVEFLGFNITKEGRGLTETFKQKLLNITPPRDLKQLQSILGLLNFARNFIPNFSELVKPLYNIIATANGKYITWTTDNSQQLQNIISMLNSAENLEERNPEVRLIMKVNTSPSAGYIRFYNEFAKRPIMYLNYVYTKAEVKFTNTEKLLTTIHKGLIKALDLGMGQEILVYSPIVSMTKIQKTPLPERKALPIRWITWMSYLEDPRIQFHYDKTLPELQQVPTVTDDIIAKIKHPSEFSMVFYTDGSAIKHPNVNKSHNAGMGIAQVQFKPEFTVINTWSIPLGDHTAQLAEVAAVEFACKKALKIDGPVLIVTDSFYVAESVNKELPYWQSNGFFNNKKKPLKHVSKWKSIADCIQLKPDIIIIHEKGHQPTASTFHTEGNNLADKLATQGSYVVNAGKRTADGSEFEKRTADGSEFESPKKKAKVE

SEQ ID NO: 506 - protein, 2176 aa, synthetic construct
MPAAKRVKLDGGDKKYSIGLDIGTNSVGWAVITDEYKVPSKKFKVLGNTDRHSIKKNLIGALLFDSGETAEATRLKRTARRRYTRRKNRICYLQEIFSNEMAKVDDSFFHRLEESFLVEEDKKHERHPIFGNIVDEVAYHEKYPTIYHLRKKLVDSTDKADLRLIYLALAHMIKFRGHFLIEGDLNPDNSDVDKLFIQLVQTYNQLFEENPINASGVDAKAILSARLSKSRRLENLIAQLPGEKKNGLFGNLIALSLGLTPNFKSNFDLAEDAKLQLSKDTYDDDLDNLLAQIGDQYADLFLAAKNLSDAILLSDILRVNTEITKAPLSASMIKRYDEHHQDLTLLKALVRQQLPEKYKEIFFDQSKNGYAGYIDGGASQEEFYKFIKPILEKMDGTEELLVKLNREDLLRKQRTFDNGSIPHQIHLGELHAILRRQEDFYPFLKDNREKIEKILTFRIPYYVGPLARGNSRFAWMTRKSEETITPWNFEEVVDKGASAQSFIERMTNFDKNLPNEKVLPKHSLLYEYFTVYNELTKVKYVTEGMRKPAFLSGEQKKAIVDLLFKTNRKVTVKQLKEDYFKKIECFDSVEISGVEDRFNASLGTYHDLLKIIKDKDFLDNEENEDILEDIVLTLTLFEDREMIEERLKTYAHLFDDKVMKQLKRRRYTGWGRLSRKLINGIRDKQSGKTILDFLKSDGFANRNFMQLIHDDSLTFKEDIQKAQVSGQGDSLHEHIANLAGSPAIKKGILQTVKVVDELVKVMGRHKPENIVIEMARENQTTQKGQKNSRERMKRIEEGIKELGSQILKEHPVENTQLQNEKLYLYYLQNGRDMYVDQELDINRLSDYDVDHIVPQSFLKDDSIDNKVLTRSDKARGKSDNVPSEEVVKKMKNYWRQLLNAKLITQRKFDNLTKAERGGLSELDKAGFIKRQLVETRQITKHVAQILDSRMNTKYDENDKLIREVKVITLKSKLVSDFRKDFQFYKVREINNYHHAHDAYLNAVVGTALIKKYPKLESEFVYGDYKVYDVRKMIAKSEQEIGKATAKYFFYSNIMNFFKTEITLANGEIRKRPLIETNGETGEIVWDKGRDFATVRKVLSMPQVNIVKKTEVQTGGFSKESILPKRNSDKLIARKKDWDPKKYGGFDSPTVAYSVLVVAKVEKGKSKKLKSVKELLGITIMERSSFEKNPIDFLEAKGYKEVKKDLIIKLPKYSLFELENGRKRMLASAGELQKGNELALPSKYVNFLYLASHYEKLKGSPEDNEQKQLFVEQHKHYLDEIIEQISEFSKRVILADANLDKVLSAYNKHRDKPIREQAENIIHLFTLTNLGAPAAFKYFDTTIDRKRYTSTKEVLDATLIHQSITGLYETRIDLSQLGGDGGGSSEAAAKPAPGGMDPLQLLQPLEAEIKGTKLKAHWNSGATITCVPQAFLEEEVPIKNIWIKTIHGEKEQPVYYLTFKIQGRKVEAEVISSPYDYILVSPSDIPWLMKKPLQLTTLVPLQEYEERLLKQTMLTGSYKEKLQSLFLKYDALWQHWENQVGHRRIKPHHIATGTVNPRPQKQYPINPKAKASIQTVINDLLKQGVLIQQNSIMNTPVYPVPKPDGKWRMVLDYREVNKTIPLIAAQNQHSAGILSSIFRGKYKTTLDLSNGFWAHSITPESYWLTAFTWLGQQYCWTRLPQGFLNSPALFTADVVDLLKEVPNVQVYVDDIYISHDDPREHLEQLEKVFSLLLNAGYVVSLKKSEIAQHEVEFLGFNITKEGRGLTETFKQKLLNITPPRDLKQLQSILGLLNFARNFIPNFSELVKPLYNIIATANGKYITWTTDNSQQLQNIISMLNSAENLEERNPEVRLIMKVNTSPSAGYIRFYNEFAKRPIMYLNYVYTKAEVKFTNTEKLLTTIHKGLIKALDLGMGQEILVYSPIVSMTKIQKTPLPERKALPIRWITWMSYLEDPRIQFHYDKTLPELQQVPTVTDDIIAKIKHPSEFSMVFYTDGSAIKHPNVNKSHNAGMGIAQVQFKPEFTVINTWSIPLGDHTAQLAEVAAVEFACKKALKIDGPVLIVTDSFYVAESVNKELPYWQSNGFFNNKKKPLKHVSKWKSIADCIQLKPDIIIIHEKGHQPTASTFHTEGNNLADKLATQGSYVVNAGKRTADGSEFEKRTADGSEFESPKKKAKVE

SEQ ID NO: 507 - protein, 2176 aa, synthetic construct
MPAAKRVKLDGGDKKYSIGLDIGTNSVGWAVITDEYKVPSKKFKVLGNTDRHSIKKNLIGALLFDSGETAEATRLKRTARRRYTRRKNRICYLQEIFSNEMAKVDDSFFHRLEESFLVEEDKKHERHPIFGNIVDEVAYHEKYPTIYHLRKKLVDSTDKADLRLIYLALAHMIKFRGHFLIEGDLNPDNSDVDKLFIQLVQTYNQLFEENPINASGVDAKAILSARLSKSRRLENLIAQLPGEKKNGLFGNLIALSLGLTPNFKSNFDLAEDAKLQLSKDTYDDDLDNLLAQIGDQYADLFLAAKNLSDAILLSDILRVNTEITKAPLSASMIKRYDEHHQDLTLLKALVRQQLPEKYKEIFFDQSKNGYAGYIDGGASQEEFYKFIKPILEKMDGTEELLVKLNREDLLRKQRTFDNGSIPHQIHLGELHAILRRQEDFYPFLKDNREKIEKILTFRIPYYVGPLARGNSRFAWMTRKSEETITPWNFEEVVDKGASAQSFIERMTNFDKNLPNEKVLPKHSLLYEYFTVYNELTKVKYVTEGMRKPAFLSGEQKKAIVDLLFKTNRKVTVKQLKEDYFKKIECFDSVEISGVEDRFNASLGTYHDLLKIIKDKDFLDNEENEDILEDIVLTLTLFEDREMIEERLKTYAHLFDDKVMKQLKRRRYTGWGRLSRKLINGIRDKQSGKTILDFLKSDGFANRNFMQLIHDDSLTFKEDIQKAQVSGQGDSLHEHIANLAGSPAIKKGILQTVKVVDELVKVMGRHKPENIVIEMARENQTTQKGQKNSRERMKRIEEGIKELGSQILKEHPVENTQLQNEKLYLYYLQNGRDMYVDQELDINRLSDYDVDHIVPQSFLKDDSIDNKVLTRSDKARGKSDNVPSEEVVKKMKNYWRQLLNAKLITQRKFDNLTKAERGGLSELDKAGFIKRQLVETRQITKHVAQILDSRMNTKYDENDKLIREVKVITLKSKLVSDFRKDFQFYKVREINNYHHAHDAYLNAVVGTALIKKYPKLESEFVYGDYKVYDVRKMIAKSEQEIGKATAKYFFYSNIMNFFKTEITLANGEIRKRPLIETNGETGEIVWDKGRDFATVRKVLSMPQVNIVKKTEVQTGGFSKESILPKRNSDKLIARKKDWDPKKYGGFDSPTVAYSVLVVAKVEKGKSKKLKSVKELLGITIMERSSFEKNPIDFLEAKGYKEVKKDLIIKLPKYSLFELENGRKRMLASAGELQKGNELALPSKYVNFLYLASHYEKLKGSPEDNEQKQLFVEQHKHYLDEIIEQISEFSKRVILADANLDKVLSAYNKHRDKPIREQAENIIHLFTLTNLGAPAAFKYFDTTIDRKRYTSTKEVLDATLIHQSITGLYETRIDLSQLGGDGGGGGPAPEAAAKGGMDPLQLLQPLEAEIKGTKLKAHWNSGATITCVPQAFLEEEVPIKNIWIKTIHGEKEQPVYYLTFKIQGRKVEAEVISSPYDYILVSPSDIPWLMKKPLQLTTLVPLQEYEERLLKQTMLTGSYKEKLQSLFLKYDALWQHWENQVGHRRIKPHHIATGTVNPRPQKQYPINPKAKASIQTVINDLLKQGVLIQQNSIMNTPVYPVPKPDGKWRMVLDYREVNKTIPLIAAQNQHSAGILSSIFRGKYKTTLDLSNGFWAHSITPESYWLTAFTWLGQQYCWTRLPQGFLNSPALFTADVVDLLKEVPNVQVYVDDIYISHDDPREHLEQLEKVFSLLLNAGYVVSLKKSEIAQHEVEFLGFNITKEGRGLTETFKQKLLNITPPRDLKQLQSILGLLNFARNFIPNFSELVKPLYNIIATANGKYITWTTDNSQQLQNIISMLNSAENLEERNPEVRLIMKVNTSPSAGYIRFYNEFAKRPIMYLNYVYTKAEVKFTNTEKLLTTIHKGLIKALDLGMGQEILVYSPIVSMTKIQKTPLPERKALPIRWITWMSYLEDPRIQFHYDKTLPELQQVPTVTDDIIAKIKHPSEFSMVFYTDGSAIKHPNVNKSHNAGMGIAQVQFKPEFTVINTWSIPLGDHTAQLAEVAAVEFACKKALKIDGPVLIVTDSFYVAESVNKELPYWQSNGFFNNKKKPLKHVSKWKSIADCIQLKPDIIIIHEKGHQPTASTFHTEGNNLADKLATQGSYVVNAGKRTADGSEFEKRTADGSEFESPKKKAKVE

SEQ ID NO: 508 - protein, 2174 aa, synthetic construct
MPAAKRVKLDGGDKKYSIGLDIGTNSVGWAVITDEYKVPSKKFKVLGNTDRHSIKKNLIGALLFDSGETAEATRLKRTARRRYTRRKNRICYLQEIFSNEMAKVDDSFFHRLEESFLVEEDKKHERHPIFGNIVDEVAYHEKYPTIYHLRKKLVDSTDKADLRLIYLALAHMIKFRGHFLIEGDLNPDNSDVDKLFIQLVQTYNQLFEENPINASGVDAKAILSARLSKSRRLENLIAQLPGEKKNGLFGNLIALSLGLTPNFKSNFDLAEDAKLQLSKDTYDDDLDNLLAQIGDQYADLFLAAKNLSDAILLSDILRVNTEITKAPLSASMIKRYDEHHQDLTLLKALVRQQLPEKYKEIFFDQSKNGYAGYIDGGASQEEFYKFIKPILEKMDGTEELLVKLNREDLLRKQRTFDNGSIPHQIHLGELHAILRRQEDFYPFLKDNREKIEKILTFRIPYYVGPLARGNSRFAWMTRKSEETITPWNFEEVVDKGASAQSFIERMTNFDKNLPNEKVLPKHSLLYEYFTVYNELTKVKYVTEGMRKPAFLSGEQKKAIVDLLFKTNRKVTVKQLKEDYFKKIECFDSVEISGVEDRFNASLGTYHDLLKIIKDKDFLDNEENEDILEDIVLTLTLFEDREMIEERLKTYAHLFDDKVMKQLKRRRYTGWGRLSRKLINGIRDKQSGKTILDFLKSDGFANRNFMQLIHDDSLTFKEDIQKAQVSGQGDSLHEHIANLAGSPAIKKGILQTVKVVDELVKVMGRHKPENIVIEMARENQTTQKGQKNSRERMKRIEEGIKELGSQILKEHPVENTQLQNEKLYLYYLQNGRDMYVDQELDINRLSDYDVDHIVPQSFLKDDSIDNKVLTRSDKARGKSDNVPSEEVVKKMKNYWRQLLNAKLITQRKFDNLTKAERGGLSELDKAGFIKRQLVETRQITKHVAQILDSRMNTKYDENDKLIREVKVITLKSKLVSDFRKDFQFYKVREINNYHHAHDAYLNAVVGTALIKKYPKLESEFVYGDYKVYDVRKMIAKSEQEIGKATAKYFFYSNIMNFFKTEITLANGEIRKRPLIETNGETGEIVWDKGRDFATVRKVLSMPQVNIVKKTEVQTGGFSKESILPKRNSDKLIARKKDWDPKKYGGFDSPTVAYSVLVVAKVEKGKSKKLKSVKELLGITIMERSSFEKNPIDFLEAKGYKEVKKDLIIKLPKYSLFELENGRKRMLASAGELQKGNELALPSKYVNFLYLASHYEKLKGSPEDNEQKQLFVEQHKHYLDEIIEQISEFSKRVILADANLDKVLSAYNKHRDKPIREQAENIIHLFTLTNLGAPAAFKYFDTTIDRKRYTSTKEVLDATLIHQSITGLYETRIDLSQLGGDGGGSSGGGGGSGGMDPLQLLQPLEAEIKGTKLKAHWNSGATITCVPQAFLEEEVPIKNIWIKTIHGEKEQPVYYLTFKIQGRKVEAEVISSPYDYILVSPSDIPWLMKKPLQLTTLVPLQEYEERLLKQTMLTGSYKEKLQSLFLKYDALWQHWENQVGHRRIKPHHIATGTVNPRPQKQYPINPKAKASIQTVINDLLKQGVLIQQNSIMNTPVYPVPKPDGKWRMVLDYREVNKTIPLIAAQNQHSAGILSSIFRGKYKTTLDLSNGFWAHSITPESYWLTAFTWLGQQYCWTRLPQGFLNSPALFTADVVDLLKEVPNVQVYVDDIYISHDDPREHLEQLEKVFSLLLNAGYVVSLKKSEIAQHEVEFLGFNITKEGRGLTETFKQKLLNITPPRDLKQLQSILGLLNFARNFIPNFSELVKPLYNIIATANGKYITWTTDNSQQLQNIISMLNSAENLEERNPEVRLIMKVNTSPSAGYIRFYNEFAKRPIMYLNYVYTKAEVKFTNTEKLLTTIHKGLIKALDLGMGQEILVYSPIVSMTKIQKTPLPERKALPIRWITWMSYLEDPRIQFHYDKTLPELQQVPTVTDDIIAKIKHPSEFSMVFYTDGSAIKHPNVNKSHNAGMGIAQVQFKPEFTVINTWSIPLGDHTAQLAEVAAVEFACKKALKIDGPVLIVTDSFYVAESVNKELPYWQSNGFFNNKKKPLKHVSKWKSIADCIQLKPDIIIIHEKGHQPTASTFHTEGNNLADKLATQGSYVVNAGKRTADGSEFEKRTADGSEFESPKKKAKVE

SEQ ID NO: 509 - protein, 2183 aa, synthetic construct
MPAAKRVKLDGGDKKYSIGLDIGTNSVGWAVITDEYKVPSKKFKVLGNTDRHSIKKNLIGALLFDSGETAEATRLKRTARRRYTRRKNRICYLQEIFSNEMAKVDDSFFHRLEESFLVEEDKKHERHPIFGNIVDEVAYHEKYPTIYHLRKKLVDSTDKADLRLIYLALAHMIKFRGHFLIEGDLNPDNSDVDKLFIQLVQTYNQLFEENPINASGVDAKAILSARLSKSRRLENLIAQLPGEKKNGLFGNLIALSLGLTPNFKSNFDLAEDAKLQLSKDTYDDDLDNLLAQIGDQYADLFLAAKNLSDAILLSDILRVNTEITKAPLSASMIKRYDEHHQDLTLLKALVRQQLPEKYKEIFFDQSKNGYAGYIDGGASQEEFYKFIKPILEKMDGTEELLVKLNREDLLRKQRTFDNGSIPHQIHLGELHAILRRQEDFYPFLKDNREKIEKILTFRIPYYVGPLARGNSRFAWMTRKSEETITPWNFEEVVDKGASAQSFIERMTNFDKNLPNEKVLPKHSLLYEYFTVYNELTKVKYVTEGMRKPAFLSGEQKKAIVDLLFKTNRKVTVKQLKEDYFKKIECFDSVEISGVEDRFNASLGTYHDLLKIIKDKDFLDNEENEDILEDIVLTLTLFEDREMIEERLKTYAHLFDDKVMKQLKRRRYTGWGRLSRKLINGIRDKQSGKTILDFLKSDGFANRNFMQLIHDDSLTFKEDIQKAQVSGQGDSLHEHIANLAGSPAIKKGILQTVKVVDELVKVMGRHKPENIVIEMARENQTTQKGQKNSRERMKRIEEGIKELGSQILKEHPVENTQLQNEKLYLYYLQNGRDMYVDQELDINRLSDYDVDHIVPQSFLKDDSIDNKVLTRSDKARGKSDNVPSEEVVKKMKNYWRQLLNAKLITQRKFDNLTKAERGGLSELDKAGFIKRQLVETRQITKHVAQILDSRMNTKYDENDKLIREVKVITLKSKLVSDFRKDFQFYKVREINNYHHAHDAYLNAVVGTALIKKYPKLESEFVYGDYKVYDVRKMIAKSEQEIGKATAKYFFYSNIMNFFKTEITLANGEIRKRPLIETNGETGEIVWDKGRDFATVRKVLSMPQVNIVKKTEVQTGGFSKESILPKRNSDKLIARKKDWDPKKYGGFDSPTVAYSVLVVAKVEKGKSKKLKSVKELLGITIMERSSFEKNPIDFLEAKGYKEVKKDLIIKLPKYSLFELENGRKRMLASAGELQKGNELALPSKYVNFLYLASHYEKLKGSPEDNEQKQLFVEQHKHYLDEIIEQISEFSKRVILADANLDKVLSAYNKHRDKPIREQAENIIHLFTLTNLGAPAAFKYFDTTIDRKRYTSTKEVLDATLIHQSITGLYETRIDLSQLGGDGGGSSGSSGSSGSSGSSGSSGGMDPLQLLQPLEAEIKGTKLKAHWNSGATITCVPQAFLEEEVPIKNIWIKTIHGEKEQPVYYLTFKIQGRKVEAEVISSPYDYILVSPSDIPWLMKKPLQLTTLVPLQEYEERLLKQTMLTGSYKEKLQSLFLKYDALWQHWENQVGHRRIKPHHIATGTVNPRPQKQYPINPKAKASIQTVINDLLKQGVLIQQNSIMNTPVYPVPKPDGKWRMVLDYREVNKTIPLIAAQNQHSAGILSSIFRGKYKTTLDLSNGFWAHSITPESYWLTAFTWLGQQYCWTRLPQGFLNSPALFTADVVDLLKEVPNVQVYVDDIYISHDDPREHLEQLEKVFSLLLNAGYVVSLKKSEIAQHEVEFLGFNITKEGRGLTETFKQKLLNITPPRDLKQLQSILGLLNFARNFIPNFSELVKPLYNIIATANGKYITWTTDNSQQLQNIISMLNSAENLEERNPEVRLIMKVNTSPSAGYIRFYNEFAKRPIMYLNYVYTKAEVKFTNTEKLLTTIHKGLIKALDLGMGQEILVYSPIVSMTKIQKTPLPERKALPIRWITWMSYLEDPRIQFHYDKTLPELQQVPTVTDDIIAKIKHPSEFSMVFYTDGSAIKHPNVNKSHNAGMGIAQVQFKPEFTVINTWSIPLGDHTAQLAEVAAVEFACKKALKIDGPVLIVTDSFYVAESVNKELPYWQSNGFFNNKKKPLKHVSKWKSIADCIQLKPDIIIIHEKGHQPTASTFHTEGNNLADKLATQGSYVVNAGKRTADGSEFEKRTADGSEFESPKKKAKVE

SEQ ID NO: 510 - protein, 2176 aa, synthetic construct
MPAAKRVKLDGGDKKYSIGLDIGTNSVGWAVITDEYKVPSKKFKVLGNTDRHSIKKNLIGALLFDSGETAEATRLKRTARRRYTRRKNRICYLQEIFSNEMAKVDDSFFHRLEESFLVEEDKKHERHPIFGNIVDEVAYHEKYPTIYHLRKKLVDSTDKADLRLIYLALAHMIKFRGHFLIEGDLNPDNSDVDKLFIQLVQTYNQLFEENPINASGVDAKAILSARLSKSRRLENLIAQLPGEKKNGLFGNLIALSLGLTPNFKSNFDLAEDAKLQLSKDTYDDDLDNLLAQIGDQYADLFLAAKNLSDAILLSDILRVNTEITKAPLSASMIKRYDEHHQDLTLLKALVRQQLPEKYKEIFFDQSKNGYAGYIDGGASQEEFYKFIKPILEKMDGTEELLVKLNREDLLRKQRTFDNGSIPHQIHLGELHAILRRQEDFYPFLKDNREKIEKILTFRIPYYVGPLARGNSRFAWMTRKSEETITPWNFEEVVDKGASAQSFIERMTNFDKNLPNEKVLPKHSLLYEYFTVYNELTKVKYVTEGMRKPAFLSGEQKKAIVDLLFKTNRKVTVKQLKEDYFKKIECFDSVEISGVEDRFNASLGTYHDLLKIIKDKDFLDNEENEDILEDIVLTLTLFEDREMIEERLKTYAHLFDDKVMKQLKRRRYTGWGRLSRKLINGIRDKQSGKTILDFLKSDGFANRNFMQLIHDDSLTFKEDIQKAQVSGQGDSLHEHIANLAGSPAIKKGILQTVKVVDELVKVMGRHKPENIVIEMARENQTTQKGQKNSRERMKRIEEGIKELGSQILKEHPVENTQLQNEKLYLYYLQNGRDMYVDQELDINRLSDYDVDHIVPQSFLKDDSIDNKVLTRSDKARGKSDNVPSEEVVKKMKNYWRQLLNAKLITQRKFDNLTKAERGGLSELDKAGFIKRQLVETRQITKHVAQILDSRMNTKYDENDKLIREVKVITLKSKLVSDFRKDFQFYKVREINNYHHAHDAYLNAVVGTALIKKYPKLESEFVYGDYKVYDVRKMIAKSEQEIGKATAKYFFYSNIMNFFKTEITLANGEIRKRPLIETNGETGEIVWDKGRDFATVRKVLSMPQVNIVKKTEVQTGGFSKESILPKRNSDKLIARKKDWDPKKYGGFDSPTVAYSVLVVAKVEKGKSKKLKSVKELLGITIMERSSFEKNPIDFLEAKGYKEVKKDLIIKLPKYSLFELENGRKRMLASAGELQKGNELALPSKYVNFLYLASHYEKLKGSPEDNEQKQLFVEQHKHYLDEIIEQISEFSKRVILADANLDKVLSAYNKHRDKPIREQAENIIHLFTLTNLGAPAAFKYFDTTIDRKRYTSTKEVLDATLIHQSITGLYETRIDLSQLGGDGGPAPEAAAKGGGGGMDPLQLLQPLEAEIKGTKLKAHWNSGATITCVPQAFLEEEVPIKNIWIKTIHGEKEQPVYYLTFKIQGRKVEAEVISSPYDYILVSPSDIPWLMKKPLQLTTLVPLQEYEERLLKQTMLTGSYKEKLQSLFLKYDALWQHWENQVGHRRIKPHHIATGTVNPRPQKQYPINPKAKASIQTVINDLLKQGVLIQQNSIMNTPVYPVPKPDGKWRMVLDYREVNKTIPLIAAQNQHSAGILSSIFRGKYKTTLDLSNGFWAHSITPESYWLTAFTWLGQQYCWTRLPQGFLNSPALFTADVVDLLKEVPNVQVYVDDIYISHDDPREHLEQLEKVFSLLLNAGYVVSLKKSEIAQHEVEFLGFNITKEGRGLTETFKQKLLNITPPRDLKQLQSILGLLNFARNFIPNFSELVKPLYNIIATANGKYITWTTDNSQQLQNIISMLNSAENLEERNPEVRLIMKVNTSPSAGYIRFYNEFAKRPIMYLNYVYTKAEVKFTNTEKLLTTIHKGLIKALDLGMGQEILVYSPIVSMTKIQKTPLPERKALPIRWITWMSYLEDPRIQFHYDKTLPELQQVPTVTDDIIAKIKHPSEFSMVFYTDGSAIKHPNVNKSHNAGMGIAQVQFKPEFTVINTWSIPLGDHTAQLAEVAAVEFACKKALKIDGPVLIVTDSFYVAESVNKELPYWQSNGFFNNKKKPLKHVSKWKSIADCIQLKPDIIIIHEKGHQPTASTFHTEGNNLADKLATQGSYVVNAGKRTADGSEFEKRTADGSEFESPKKKAKVE

SEQ ID NO: 511 - protein, 2176 aa, synthetic construct
MPAAKRVKLDGGDKKYSIGLDIGTNSVGWAVITDEYKVPSKKFKVLGNTDRHSIKKNLIGALLFDSGETAEATRLKRTARRRYTRRKNRICYLQEIFSNEMAKVDDSFFHRLEESFLVEEDKKHERHPIFGNIVDEVAYHEKYPTIYHLRKKLVDSTDKADLRLIYLALAHMIKFRGHFLIEGDLNPDNSDVDKLFIQLVQTYNQLFEENPINASGVDAKAILSARLSKSRRLENLIAQLPGEKKNGLFGNLIALSLGLTPNFKSNFDLAEDAKLQLSKDTYDDDLDNLLAQIGDQYADLFLAAKNLSDAILLSDILRVNTEITKAPLSASMIKRYDEHHQDLTLLKALVRQQLPEKYKEIFFDQSKNGYAGYIDGGASQEEFYKFIKPILEKMDGTEELLVKLNREDLLRKQRTFDNGSIPHQIHLGELHAILRRQEDFYPFLKDNREKIEKILTFRIPYYVGPLARGNSRFAWMTRKSEETITPWNFEEVVDKGASAQSFIERMTNFDKNLPNEKVLPKHSLLYEYFTVYNELTKVKYVTEGMRKPAFLSGEQKKAIVDLLFKTNRKVTVKQLKEDYFKKIECFDSVEISGVEDRFNASLGTYHDLLKIIKDKDFLDNEENEDILEDIVLTLTLFEDREMIEERLKTYAHLFDDKVMKQLKRRRYTGWGRLSRKLINGIRDKQSGKTILDFLKSDGFANRNFMQLIHDDSLTFKEDIQKAQVSGQGDSLHEHIANLAGSPAIKKGILQTVKVVDELVKVMGRHKPENIVIEMARENQTTQKGQKNSRERMKRIEEGIKELGSQILKEHPVENTQLQNEKLYLYYLQNGRDMYVDQELDINRLSDYDVDHIVPQSFLKDDSIDNKVLTRSDKARGKSDNVPSEEVVKKMKNYWRQLLNAKLITQRKFDNLTKAERGGLSELDKAGFIKRQLVETRQITKHVAQILDSRMNTKYDENDKLIREVKVITLKSKLVSDFRKDFQFYKVREINNYHHAHDAYLNAVVGTALIKKYPKLESEFVYGDYKVYDVRKMIAKSEQEIGKATAKYFFYSNIMNFFKTEITLANGEIRKRPLIETNGETGEIVWDKGRDFATVRKVLSMPQVNIVKKTEVQTGGFSKESILPKRNSDKLIARKKDWDPKKYGGFDSPTVAYSVLVVAKVEKGKSKKLKSVKELLGITIMERSSFEKNPIDFLEAKGYKEVKKDLIIKLPKYSLFELENGRKRMLASAGELQKGNELALPSKYVNFLYLASHYEKLKGSPEDNEQKQLFVEQHKHYLDEIIEQISEFSKRVILADANLDKVLSAYNKHRDKPIREQAENIIHLFTLTNLGAPAAFKYFDTTIDRKRYTSTKEVLDATLIHQSITGLYETRIDLSQLGGDGGEAAAKGGGGSSGGMDPLQLLQPLEAEIKGTKLKAHWNSGATITCVPQAFLEEEVPIKNIWIKTIHGEKEQPVYYLTFKIQGRKVEAEVISSPYDYILVSPSDIPWLMKKPLQLTTLVPLQEYEERLLKQTMLTGSYKEKLQSLFLKYDALWQHWENQVGHRRIKPHHIATGTVNPRPQKQYPINPKAKASIQTVINDLLKQGVLIQQNSIMNTPVYPVPKPDGKWRMVLDYREVNKTIPLIAAQNQHSAGILSSIFRGKYKTTLDLSNGFWAHSITPESYWLTAFTWLGQQYCWTRLPQGFLNSPALFTADVVDLLKEVPNVQVYVDDIYISHDDPREHLEQLEKVFSLLLNAGYVVSLKKSEIAQHEVEFLGFNITKEGRGLTETFKQKLLNITPPRDLKQLQSILGLLNFARNFIPNFSELVKPLYNIIATANGKYITWTTDNSQQLQNIISMLNSAENLEERNPEVRLIMKVNTSPSAGYIRFYNEFAKRPIMYLNYVYTKAEVKFTNTEKLLTTIHKGLIKALDLGMGQEILVYSPIVSMTKIQKTPLPERKALPIRWITWMSYLEDPRIQFHYDKTLPELQQVPTVTDDIIAKIKHPSEFSMVFYTDGSAIKHPNVNKSHNAGMGIAQVQFKPEFTVINTWSIPLGDHTAQLAEVAAVEFACKKALKIDGPVLIVTDSFYVAESVNKELPYWQSNGFFNNKKKPLKHVSKWKSIADCIQLKPDIIIIHEKGHQPTASTFHTEGNNLADKLATQGSYVVNAGKRTADGSEFEKRTADGSEFESPKKKAKVE

SEQ ID NO: 512 - protein, 2171 aa, synthetic construct
MPAAKRVKLDGGDKKYSIGLDIGTNSVGWAVITDEYKVPSKKFKVLGNTDRHSIKKNLIGALLFDSGETAEATRLKRTARRRYTRRKNRICYLQEIFSNEMAKVDDSFFHRLEESFLVEEDKKHERHPIFGNIVDEVAYHEKYPTIYHLRKKLVDSTDKADLRLIYLALAHMIKFRGHFLIEGDLNPDNSDVDKLFIQLVQTYNQLFEENPINASGVDAKAILSARLSKSRRLENLIAQLPGEKKNGLFGNLIALSLGLTPNFKSNFDLAEDAKLQLSKDTYDDDLDNLLAQIGDQYADLFLAAKNLSDAILLSDILRVNTEITKAPLSASMIKRYDEHHQDLTLLKALVRQQLPEKYKEIFFDQSKNGYAGYIDGGASQEEFYKFIKPILEKMDGTEELLVKLNREDLLRKQRTFDNGSIPHQIHLGELHAILRRQEDFYPFLKDNREKIEKILTFRIPYYVGPLARGNSRFAWMTRKSEETITPWNFEEVVDKGASAQSFIERMTNFDKNLPNEKVLPKHSLLYEYFTVYNELTKVKYVTEGMRKPAFLSGEQKKAIVDLLFKTNRKVTVKQLKEDYFKKIECFDSVEISGVEDRFNASLGTYHDLLKIIKDKDFLDNEENEDILEDIVLTLTLFEDREMIEERLKTYAHLFDDKVMKQLKRRRYTGWGRLSRKLINGIRDKQSGKTILDFLKSDGFANRNFMQLIHDDSLTFKEDIQKAQVSGQGDSLHEHIANLAGSPAIKKGILQTVKVVDELVKVMGRHKPENIVIEMARENQTTQKGQKNSRERMKRIEEGIKELGSQILKEHPVENTQLQNEKLYLYYLQNGRDMYVDQELDINRLSDYDVDHIVPQSFLKDDSIDNKVLTRSDKARGKSDNVPSEEVVKKMKNYWRQLLNAKLITQRKFDNLTKAERGGLSELDKAGFIKRQLVETRQITKHVAQILDSRMNTKYDENDKLIREVKVITLKSKLVSDFRKDFQFYKVREINNYHHAHDAYLNAVVGTALIKKYPKLESEFVYGDYKVYDVRKMIAKSEQEIGKATAKYFFYSNIMNFFKTEITLANGEIRKRPLIETNGETGEIVWDKGRDFATVRKVLSMPQVNIVKKTEVQTGGFSKESILPKRNSDKLIARKKDWDPKKYGGFDSPTVAYSVLVVAKVEKGKSKKLKSVKELLGITIMERSSFEKNPIDFLEAKGYKEVKKDLIIKLPKYSLFELENGRKRMLASAGELQKGNELALPSKYVNFLYLASHYEKLKGSPEDNEQKQLFVEQHKHYLDEIIEQISEFSKRVILADANLDKVLSAYNKHRDKPIREQAENIIHLFTLTNLGAPAAFKYFDTTIDRKRYTSTKEVLDATLIHQSITGLYETRIDLSQLGGDGGGGGPAPGGMDPLQLLQPLEAEIKGTKLKAHWNSGATITCVPQAFLEEEVPIKNIWIKTIHGEKEQPVYYLTFKIQGRKVEAEVISSPYDYILVSPSDIPWLMKKPLQLTTLVPLQEYEERLLKQTMLTGSYKEKLQSLFLKYDALWQHWENQVGHRRIKPHHIATGTVNPRPQKQYPINPKAKASIQTVINDLLKQGVLIQQNSIMNTPVYPVPKPDGKWRMVLDYREVNKTIPLIAAQNQHSAGILSSIFRGKYKTTLDLSNGFWAHSITPESYWLTAFTWLGQQYCWTRLPQGFLNSPALFTADVVDLLKEVPNVQVYVDDIYISHDDPREHLEQLEKVFSLLLNAGYVVSLKKSEIAQHEVEFLGFNITKEGRGLTETFKQKLLNITPPRDLKQLQSILGLLNFARNFIPNFSELVKPLYNIIATANGKYITWTTDNSQQLQNIISMLNSAENLEERNPEVRLIMKVNTSPSAGYIRFYNEFAKRPIMYLNYVYTKAEVKFTNTEKLLTTIHKGLIKALDLGMGQEILVYSPIVSMTKIQKTPLPERKALPIRWITWMSYLEDPRIQFHYDKTLPELQQVPTVTDDIIAKIKHPSEFSMVFYTDGSAIKHPNVNKSHNAGMGIAQVQFKPEFTVINTWSIPLGDHTAQLAEVAAVEFACKKALKIDGPVLIVTDSFYVAESVNKELPYWQSNGFFNNKKKPLKHVSKWKSIADCIQLKPDIIIIHEKGHQPTASTFHTEGNNLADKLATQGSYVVNAGKRTADGSEFEKRTADGSEFESPKKKAKVE

SEQ ID NO: 513 - protein, 2176 aa, synthetic construct
MPAAKRVKLDGGDKKYSIGLDIGTNSVGWAVITDEYKVPSKKFKVLGNTDRHSIKKNLIGALLFDSGETAEATRLKRTARRRYTRRKNRICYLQEIFSNEMAKVDDSFFHRLEESFLVEEDKKHERHPIFGNIVDEVAYHEKYPTIYHLRKKLVDSTDKADLRLIYLALAHMIKFRGHFLIEGDLNPDNSDVDKLFIQLVQTYNQLFEENPINASGVDAKAILSARLSKSRRLENLIAQLPGEKKNGLFGNLIALSLGLTPNFKSNFDLAEDAKLQLSKDTYDDDLDNLLAQIGDQYADLFLAAKNLSDAILLSDILRVNTEITKAPLSASMIKRYDEHHQDLTLLKALVRQQLPEKYKEIFFDQSKNGYAGYIDGGASQEEFYKFIKPILEKMDGTEELLVKLNREDLLRKQRTFDNGSIPHQIHLGELHAILRRQEDFYPFLKDNREKIEKILTFRIPYYVGPLARGNSRFAWMTRKSEETITPWNFEEVVDKGASAQSFIERMTNFDKNLPNEKVLPKHSLLYEYFTVYNELTKVKYVTEGMRKPAFLSGEQKKAIVDLLFKTNRKVTVKQLKEDYFKKIECFDSVEISGVEDRFNASLGTYHDLLKIIKDKDFLDNEENEDILEDIVLTLTLFEDREMIEERLKTYAHLFDDKVMKQLKRRRYTGWGRLSRKLINGIRDKQSGKTILDFLKSDGFANRNFMQLIHDDSLTFKEDIQKAQVSGQGDSLHEHIANLAGSPAIKKGILQTVKVVDELVKVMGRHKPENIVIEMARENQTTQKGQKNSRERMKRIEEGIKELGSQILKEHPVENTQLQNEKLYLYYLQNGRDMYVDQELDINRLSDYDVDHIVPQSFLKDDSIDNKVLTRSDKARGKSDNVPSEEVVKKMKNYWRQLLNAKLITQRKFDNLTKAERGGLSELDKAGFIKRQLVETRQITKHVAQILDSRMNTKYDENDKLIREVKVITLKSKLVSDFRKDFQFYKVREINNYHHAHDAYLNAVVGTALIKKYPKLESEFVYGDYKVYDVRKMIAKSEQEIGKATAKYFFYSNIMNFFKTEITLANGEIRKRPLIETNGETGEIVWDKGRDFATVRKVLSMPQVNIVKKTEVQTGGFSKESILPKRNSDKLIARKKDWDPKKYGGFDSPTVAYSVLVVAKVEKGKSKKLKSVKELLGITIMERSSFEKNPIDFLEAKGYKEVKKDLIIKLPKYSLFELENGRKRMLASAGELQKGNELALPSKYVNFLYLASHYEKLKGSPEDNEQKQLFVEQHKHYLDEIIEQISEFSKRVILADANLDKVLSAYNKHRDKPIREQAENIIHLFTLTNLGAPAAFKYFDTTIDRKRYTSTKEVLDATLIHQSITGLYETRIDLSQLGGDGGEAAAKGGSGGGGGMDPLQLLQPLEAEIKGTKLKAHWNSGATITCVPQAFLEEEVPIKNIWIKTIHGEKEQPVYYLTFKIQGRKVEAEVISSPYDYILVSPSDIPWLMKKPLQLTTLVPLQEYEERLLKQTMLTGSYKEKLQSLFLKYDALWQHWENQVGHRRIKPHHIATGTVNPRPQKQYPINPKAKASIQTVINDLLKQGVLIQQNSIMNTPVYPVPKPDGKWRMVLDYREVNKTIPLIAAQNQHSAGILSSIFRGKYKTTLDLSNGFWAHSITPESYWLTAFTWLGQQYCWTRLPQGFLNSPALFTADVVDLLKEVPNVQVYVDDIYISHDDPREHLEQLEKVFSLLLNAGYVVSLKKSEIAQHEVEFLGFNITKEGRGLTETFKQKLLNITPPRDLKQLQSILGLLNFARNFIPNFSELVKPLYNIIATANGKYITWTTDNSQQLQNIISMLNSAENLEERNPEVRLIMKVNTSPSAGYIRFYNEFAKRPIMYLNYVYTKAEVKFTNTEKLLTTIHKGLIKALDLGMGQEILVYSPIVSMTKIQKTPLPERKALPIRWITWMSYLEDPRIQFHYDKTLPELQQVPTVTDDIIAKIKHPSEFSMVFYTDGSAIKHPNVNKSHNAGMGIAQVQFKPEFTVINTWSIPLGDHTAQLAEVAAVEFACKKALKIDGPVLIVTDSFYVAESVNKELPYWQSNGFFNNKKKPLKHVSKWKSIADCIQLKPDIIIIHEKGHQPTASTFHTEGNNLADKLATQGSYVVNAGKRTADGSEFEKRTADGSEFESPKKKAKVE

SEQ ID NO: 514 - protein, 2174 aa, synthetic construct
MPAAKRVKLDGGDKKYSIGLDIGTNSVGWAVITDEYKVPSKKFKVLGNTDRHSIKKNLIGALLFDSGETAEATRLKRTARRRYTRRKNRICYLQEIFSNEMAKVDDSFFHRLEESFLVEEDKKHERHPIFGNIVDEVAYHEKYPTIYHLRKKLVDSTDKADLRLIYLALAHMIKFRGHFLIEGDLNPDNSDVDKLFIQLVQTYNQLFEENPINASGVDAKAILSARLSKSRRLENLIAQLPGEKKNGLFGNLIALSLGLTPNFKSNFDLAEDAKLQLSKDTYDDDLDNLLAQIGDQYADLFLAAKNLSDAILLSDILRVNTEITKAPLSASMIKRYDEHHQDLTLLKALVRQQLPEKYKEIFFDQSKNGYAGYIDGGASQEEFYKFIKPILEKMDGTEELLVKLNREDLLRKQRTFDNGSIPHQIHLGELHAILRRQEDFYPFLKDNREKIEKILTFRIPYYVGPLARGNSRFAWMTRKSEETITPWNFEEVVDKGASAQSFIERMTNFDKNLPNEKVLPKHSLLYEYFTVYNELTKVKYVTEGMRKPAFLSGEQKKAIVDLLFKTNRKVTVKQLKEDYFKKIECFDSVEISGVEDRFNASLGTYHDLLKIIKDKDFLDNEENEDILEDIVLTLTLFEDREMIEERLKTYAHLFDDKVMKQLKRRRYTGWGRLSRKLINGIRDKQSGKTILDFLKSDGFANRNFMQLIHDDSLTFKEDIQKAQVSGQGDSLHEHIANLAGSPAIKKGILQTVKVVDELVKVMGRHKPENIVIEMARENQTTQKGQKNSRERMKRIEEGIKELGSQILKEHPVENTQLQNEKLYLYYLQNGRDMYVDQELDINRLSDYDVDHIVPQSFLKDDSIDNKVLTRSDKARGKSDNVPSEEVVKKMKNYWRQLLNAKLITQRKFDNLTKAERGGLSELDKAGFIKRQLVETRQITKHVAQILDSRMNTKYDENDKLIREVKVITLKSKLVSDFRKDFQFYKVREINNYHHAHDAYLNAVVGTALIKKYPKLESEFVYGDYKVYDVRKMIAKSEQEIGKATAKYFFYSNIMNFFKTEITLANGEIRKRPLIETNGETGEIVWDKGRDFATVRKVLSMPQVNIVKKTEVQTGGFSKESILPKRNSDKLIARKKDWDPKKYGGFDSPTVAYSVLVVAKVEKGKSKKLKSVKELLGITIMERSSFEKNPIDFLEAKGYKEVKKDLIIKLPKYSLFELENGRKRMLASAGELQKGNELALPSKYVNFLYLASHYEKLKGSPEDNEQKQLFVEQHKHYLDEIIEQISEFSKRVILADANLDKVLSAYNKHRDKPIREQAENIIHLFTLTNLGAPAAFKYFDTTIDRKRYTSTKEVLDATLIHQSITGLYETRIDLSQLGGDGGGGGPAPGGSGGMDPLQLLQPLEAEIKGTKLKAHWNSGATITCVPQAFLEEEVPIKNIWIKTIHGEKEQPVYYLTFKIQGRKVEAEVISSPYDYILVSPSDIPWLMKKPLQLTTLVPLQEYEERLLKQTMLTGSYKEKLQSLFLKYDALWQHWENQVGHRRIKPHHIATGTVNPRPQKQYPINPKAKASIQTVINDLLKQGVLIQQNSIMNTPVYPVPKPDGKWRMVLDYREVNKTIPLIAAQNQHSAGILSSIFRGKYKTTLDLSNGFWAHSITPESYWLTAFTWLGQQYCWTRLPQGFLNSPALFTADVVDLLKEVPNVQVYVDDIYISHDDPREHLEQLEKVFSLLLNAGYVVSLKKSEIAQHEVEFLGFNITKEGRGLTETFKQKLLNITPPRDLKQLQSILGLLNFARNFIPNFSELVKPLYNIIATANGKYITWTTDNSQQLQNIISMLNSAENLEERNPEVRLIMKVNTSPSAGYIRFYNEFAKRPIMYLNYVYTKAEVKFTNTEKLLTTIHKGLIKALDLGMGQEILVYSPIVSMTKIQKTPLPERKALPIRWITWMSYLEDPRIQFHYDKTLPELQQVPTVTDDIIAKIKHPSEFSMVFYTDGSAIKHPNVNKSHNAGMGIAQVQFKPEFTVINTWSIPLGDHTAQLAEVAAVEFACKKALKIDGPVLIVTDSFYVAESVNKELPYWQSNGFFNNKKKPLKHVSKWKSIADCIQLKPDIIIIHEKGHQPTASTFHTEGNNLADKLATQGSYVVNAGKRTADGSEFEKRTADGSEFESPKKKAKVE

SEQ ID NO: 515 - protein, 2174 aa, synthetic construct
MPAAKRVKLDGGDKKYSIGLDIGTNSVGWAVITDEYKVPSKKFKVLGNTDRHSIKKNLIGALLFDSGETAEATRLKRTARRRYTRRKNRICYLQEIFSNEMAKVDDSFFHRLEESFLVEEDKKHERHPIFGNIVDEVAYHEKYPTIYHLRKKLVDSTDKADLRLIYLALAHMIKFRGHFLIEGDLNPDNSDVDKLFIQLVQTYNQLFEENPINASGVDAKAILSARLSKSRRLENLIAQLPGEKKNGLFGNLIALSLGLTPNFKSNFDLAEDAKLQLSKDTYDDDLDNLLAQIGDQYADLFLAAKNLSDAILLSDILRVNTEITKAPLSASMIKRYDEHHQDLTLLKALVRQQLPEKYKEIFFDQSKNGYAGYIDGGASQEEFYKFIKPILEKMDGTEELLVKLNREDLLRKQRTFDNGSIPHQIHLGELHAILRRQEDFYPFLKDNREKIEKILTFRIPYYVGPLARGNSRFAWMTRKSEETITPWNFEEVVDKGASAQSFIERMTNFDKNLPNEKVLPKHSLLYEYFTVYNELTKVKYVTEGMRKPAFLSGEQKKAIVDLLFKTNRKVTVKQLKEDYFKKIECFDSVEISGVEDRFNASLGTYHDLLKIIKDKDFLDNEENEDILEDIVLTLTLFEDREMIEERLKTYAHLFDDKVMKQLKRRRYTGWGRLSRKLINGIRDKQSGKTILDFLKSDGFANRNFMQLIHDDSLTFKEDIQKAQVSGQGDSLHEHIANLAGSPAIKKGILQTVKVVDELVKVMGRHKPENIVIEMARENQTTQKGQKNSRERMKRIEEGIKELGSQILKEHPVENTQLQNEKLYLYYLQNGRDMYVDQELDINRLSDYDVDHIVPQSFLKDDSIDNKVLTRSDKARGKSDNVPSEEVVKKMKNYWRQLLNAKLITQRKFDNLTKAERGGLSELDKAGFIKRQLVETRQITKHVAQILDSRMNTKYDENDKLIREVKVITLKSKLVSDFRKDFQFYKVREINNYHHAHDAYLNAVVGTALIKKYPKLESEFVYGDYKVYDVRKMIAKSEQEIGKATAKYFFYSNIMNFFKTEITLANGEIRKRPLIETNGETGEIVWDKGRDFATVRKVLSMPQVNIVKKTEVQTGGFSKESILPKRNSDKLIARKKDWDPKKYGGFDSPTVAYSVLVVAKVEKGKSKKLKSVKELLGITIMERSSFEKNPIDFLEAKGYKEVKKDLIIKLPKYSLFELENGRKRMLASAGELQKGNELALPSKYVNFLYLASHYEKLKGSPEDNEQKQLFVEQHKHYLDEIIEQISEFSKRVILADANLDKVLSAYNKHRDKPIREQAENIIHLFTLTNLGAPAAFKYFDTTIDRKRYTSTKEVLDATLIHQSITGLYETRIDLSQLGGDGGGSSGSSGSSGGMDPLQLLQPLEAEIKGTKLKAHWNSGATITCVPQAFLEEEVPIKNIWIKTIHGEKEQPVYYLTFKIQGRKVEAEVISSPYDYILVSPSDIPWLMKKPLQLTTLVPLQEYEERLLKQTMLTGSYKEKLQSLFLKYDALWQHWENQVGHRRIKPHHIATGTVNPRPQKQYPINPKAKASIQTVINDLLKQGVLIQQNSIMNTPVYPVPKPDGKWRMVLDYREVNKTIPLIAAQNQHSAGILSSIFRGKYKTTLDLSNGFWAHSITPESYWLTAFTWLGQQYCWTRLPQGFLNSPALFTADVVDLLKEVPNVQVYVDDIYISHDDPREHLEQLEKVFSLLLNAGYVVSLKKSEIAQHEVEFLGFNITKEGRGLTETFKQKLLNITPPRDLKQLQSILGLLNFARNFIPNFSELVKPLYNIIATANGKYITWTTDNSQQLQNIISMLNSAENLEERNPEVRLIMKVNTSPSAGYIRFYNEFAKRPIMYLNYVYTKAEVKFTNTEKLLTTIHKGLIKALDLGMGQEILVYSPIVSMTKIQKTPLPERKALPIRWITWMSYLEDPRIQFHYDKTLPELQQVPTVTDDIIAKIKHPSEFSMVFYTDGSAIKHPNVNKSHNAGMGIAQVQFKPEFTVINTWSIPLGDHTAQLAEVAAVEFACKKALKIDGPVLIVTDSFYVAESVNKELPYWQSNGFFNNKKKPLKHVSKWKSIADCIQLKPDIIIIHEKGHQPTASTFHTEGNNLADKLATQGSYVVNAGKRTADGSEFEKRTADGSEFESPKKKAKVE

SEQ ID NO: 516 - protein, 2171 aa, synthetic construct
MPAAKRVKLDGGDKKYSIGLDIGTNSVGWAVITDEYKVPSKKFKVLGNTDRHSIKKNLIGALLFDSGETAEATRLKRTARRRYTRRKNRICYLQEIFSNEMAKVDDSFFHRLEESFLVEEDKKHERHPIFGNIVDEVAYHEKYPTIYHLRKKLVDSTDKADLRLIYLALAHMIKFRGHFLIEGDLNPDNSDVDKLFIQLVQTYNQLFEENPINASGVDAKAILSARLSKSRRLENLIAQLPGEKKNGLFGNLIALSLGLTPNFKSNFDLAEDAKLQLSKDTYDDDLDNLLAQIGDQYADLFLAAKNLSDAILLSDILRVNTEITKAPLSASMIKRYDEHHQDLTLLKALVRQQLPEKYKEIFFDQSKNGYAGYIDGGASQEEFYKFIKPILEKMDGTEELLVKLNREDLLRKQRTFDNGSIPHQIHLGELHAILRRQEDFYPFLKDNREKIEKILTFRIPYYVGPLARGNSRFAWMTRKSEETITPWNFEEVVDKGASAQSFIERMTNFDKNLPNEKVLPKHSLLYEYFTVYNELTKVKYVTEGMRKPAFLSGEQKKAIVDLLFKTNRKVTVKQLKEDYFKKIECFDSVEISGVEDRFNASLGTYHDLLKIIKDKDFLDNEENEDILEDIVLTLTLFEDREMIEERLKTYAHLFDDKVMKQLKRRRYTGWGRLSRKLINGIRDKQSGKTILDFLKSDGFANRNFMQLIHDDSLTFKEDIQKAQVSGQGDSLHEHIANLAGSPAIKKGILQTVKVVDELVKVMGRHKPENIVIEMARENQTTQKGQKNSRERMKRIEEGIKELGSQILKEHPVENTQLQNEKLYLYYLQNGRDMYVDQELDINRLSDYDVDHIVPQSFLKDDSIDNKVLTRSDKARGKSDNVPSEEVVKKMKNYWRQLLNAKLITQRKFDNLTKAERGGLSELDKAGFIKRQLVETRQITKHVAQILDSRMNTKYDENDKLIREVKVITLKSKLVSDFRKDFQFYKVREINNYHHAHDAYLNAVVGTALIKKYPKLESEFVYGDYKVYDVRKMIAKSEQEIGKATAKYFFYSNIMNFFKTEITLANGEIRKRPLIETNGETGEIVWDKGRDFATVRKVLSMPQVNIVKKTEVQTGGFSKESILPKRNSDKLIARKKDWDPKKYGGFDSPTVAYSVLVVAKVEKGKSKKLKSVKELLGITIMERSSFEKNPIDFLEAKGYKEVKKDLIIKLPKYSLFELENGRKRMLASAGELQKGNELALPSKYVNFLYLASHYEKLKGSPEDNEQKQLFVEQHKHYLDEIIEQISEFSKRVILADANLDKVLSAYNKHRDKPIREQAENIIHLFTLTNLGAPAAFKYFDTTIDRKRYTSTKEVLDATLIHQSITGLYETRIDLSQLGGDGGPAPGGGGGMDPLQLLQPLEAEIKGTKLKAHWNSGATITCVPQAFLEEEVPIKNIWIKTIHGEKEQPVYYLTFKIQGRKVEAEVISSPYDYILVSPSDIPWLMKKPLQLTTLVPLQEYEERLLKQTMLTGSYKEKLQSLFLKYDALWQHWENQVGHRRIKPHHIATGTVNPRPQKQYPINPKAKASIQTVINDLLKQGVLIQQNSIMNTPVYPVPKPDGKWRMVLDYREVNKTIPLIAAQNQHSAGILSSIFRGKYKTTLDLSNGFWAHSITPESYWLTAFTWLGQQYCWTRLPQGFLNSPALFTADVVDLLKEVPNVQVYVDDIYISHDDPREHLEQLEKVFSLLLNAGYVVSLKKSEIAQHEVEFLGFNITKEGRGLTETFKQKLLNITPPRDLKQLQSILGLLNFARNFIPNFSELVKPLYNIIATANGKYITWTTDNSQQLQNIISMLNSAENLEERNPEVRLIMKVNTSPSAGYIRFYNEFAKRPIMYLNYVYTKAEVKFTNTEKLLTTIHKGLIKALDLGMGQEILVYSPIVSMTKIQKTPLPERKALPIRWITWMSYLEDPRIQFHYDKTLPELQQVPTVTDDIIAKIKHPSEFSMVFYTDGSAIKHPNVNKSHNAGMGIAQVQFKPEFTVINTWSIPLGDHTAQLAEVAAVEFACKKALKIDGPVLIVTDSFYVAESVNKELPYWQSNGFFNNKKKPLKHVSKWKSIADCIQLKPDIIIIHEKGHQPTASTFHTEGNNLADKLATQGSYVVNAGKRTADGSEFEKRTADGSEFESPKKKAKVE

SEQ ID NO: 517 - protein, 2176 aa, synthetic construct
MPAAKRVKLDGGDKKYSIGLDIGTNSVGWAVITDEYKVPSKKFKVLGNTDRHSIKKNLIGALLFDSGETAEATRLKRTARRRYTRRKNRICYLQEIFSNEMAKVDDSFFHRLEESFLVEEDKKHERHPIFGNIVDEVAYHEKYPTIYHLRKKLVDSTDKADLRLIYLALAHMIKFRGHFLIEGDLNPDNSDVDKLFIQLVQTYNQLFEENPINASGVDAKAILSARLSKSRRLENLIAQLPGEKKNGLFGNLIALSLGLTPNFKSNFDLAEDAKLQLSKDTYDDDLDNLLAQIGDQYADLFLAAKNLSDAILLSDILRVNTEITKAPLSASMIKRYDEHHQDLTLLKALVRQQLPEKYKEIFFDQSKNGYAGYIDGGASQEEFYKFIKPILEKMDGTEELLVKLNREDLLRKQRTFDNGSIPHQIHLGELHAILRRQEDFYPFLKDNREKIEKILTFRIPYYVGPLARGNSRFAWMTRKSEETITPWNFEEVVDKGASAQSFIERMTNFDKNLPNEKVLPKHSLLYEYFTVYNELTKVKYVTEGMRKPAFLSGEQKKAIVDLLFKTNRKVTVKQLKEDYFKKIECFDSVEISGVEDRFNASLGTYHDLLKIIKDKDFLDNEENEDILEDIVLTLTLFEDREMIEERLKTYAHLFDDKVMKQLKRRRYTGWGRLSRKLINGIRDKQSGKTILDFLKSDGFANRNFMQLIHDDSLTFKEDIQKAQVSGQGDSLHEHIANLAGSPAIKKGILQTVKVVDELVKVMGRHKPENIVIEMARENQTTQKGQKNSRERMKRIEEGIKELGSQILKEHPVENTQLQNEKLYLYYLQNGRDMYVDQELDINRLSDYDVDHIVPQSFLKDDSIDNKVLTRSDKARGKSDNVPSEEVVKKMKNYWRQLLNAKLITQRKFDNLTKAERGGLSELDKAGFIKRQLVETRQITKHVAQILDSRMNTKYDENDKLIREVKVITLKSKLVSDFRKDFQFYKVREINNYHHAHDAYLNAVVGTALIKKYPKLESEFVYGDYKVYDVRKMIAKSEQEIGKATAKYFFYSNIMNFFKTEITLANGEIRKRPLIETNGETGEIVWDKGRDFATVRKVLSMPQVNIVKKTEVQTGGFSKESILPKRNSDKLIARKKDWDPKKYGGFDSPTVAYSVLVVAKVEKGKSKKLKSVKELLGITIMERSSFEKNPIDFLEAKGYKEVKKDLIIKLPKYSLFELENGRKRMLASAGELQKGNELALPSKYVNFLYLASHYEKLKGSPEDNEQKQLFVEQHKHYLDEIIEQISEFSKRVILADANLDKVLSAYNKHRDKPIREQAENIIHLFTLTNLGAPAAFKYFDTTIDRKRYTSTKEVLDATLIHQSITGLYETRIDLSQLGGDGGEAAAKGSSGGSGGMDPLQLLQPLEAEIKGTKLKAHWNSGATITCVPQAFLEEEVPIKNIWIKTIHGEKEQPVYYLTFKIQGRKVEAEVISSPYDYILVSPSDIPWLMKKPLQLTTLVPLQEYEERLLKQTMLTGSYKEKLQSLFLKYDALWQHWENQVGHRRIKPHHIATGTVNPRPQKQYPINPKAKASIQTVINDLLKQGVLIQQNSIMNTPVYPVPKPDGKWRMVLDYREVNKTIPLIAAQNQHSAGILSSIFRGKYKTTLDLSNGFWAHSITPESYWLTAFTWLGQQYCWTRLPQGFLNSPALFTADVVDLLKEVPNVQVYVDDIYISHDDPREHLEQLEKVFSLLLNAGYVVSLKKSEIAQHEVEFLGFNITKEGRGLTETFKQKLLNITPPRDLKQLQSILGLLNFARNFIPNFSELVKPLYNIIATANGKYITWTTDNSQQLQNIISMLNSAENLEERNPEVRLIMKVNTSPSAGYIRFYNEFAKRPIMYLNYVYTKAEVKFTNTEKLLTTIHKGLIKALDLGMGQEILVYSPIVSMTKIQKTPLPERKALPIRWITWMSYLEDPRIQFHYDKTLPELQQVPTVTDDIIAKIKHPSEFSMVFYTDGSAIKHPNVNKSHNAGMGIAQVQFKPEFTVINTWSIPLGDHTAQLAEVAAVEFACKKALKIDGPVLIVTDSFYVAESVNKELPYWQSNGFFNNKKKPLKHVSKWKSIADCIQLKPDIIIIHEKGHQPTASTFHTEGNNLADKLATQGSYVVNAGKRTADGSEFEKRTADGSEFESPKKKAKVE

SEQ ID NO: 518 - protein, 2174 aa, synthetic construct
MPAAKRVKLDGGDKKYSIGLDIGTNSVGWAVITDEYKVPSKKFKVLGNTDRHSIKKNLIGALLFDSGETAEATRLKRTARRRYTRRKNRICYLQEIFSNEMAKVDDSFFHRLEESFLVEEDKKHERHPIFGNIVDEVAYHEKYPTIYHLRKKLVDSTDKADLRLIYLALAHMIKFRGHFLIEGDLNPDNSDVDKLFIQLVQTYNQLFEENPINASGVDAKAILSARLSKSRRLENLIAQLPGEKKNGLFGNLIALSLGLTPNFKSNFDLAEDAKLQLSKDTYDDDLDNLLAQIGDQYADLFLAAKNLSDAILLSDILRVNTEITKAPLSASMIKRYDEHHQDLTLLKALVRQQLPEKYKEIFFDQSKNGYAGYIDGGASQEEFYKFIKPILEKMDGTEELLVKLNREDLLRKQRTFDNGSIPHQIHLGELHAILRRQEDFYPFLKDNREKIEKILTFRIPYYVGPLARGNSRFAWMTRKSEETITPWNFEEVVDKGASAQSFIERMTNFDKNLPNEKVLPKHSLLYEYFTVYNELTKVKYVTEGMRKPAFLSGEQKKAIVDLLFKTNRKVTVKQLKEDYFKKIECFDSVEISGVEDRFNASLGTYHDLLKIIKDKDFLDNEENEDILEDIVLTLTLFEDREMIEERLKTYAHLFDDKVMKQLKRRRYTGWGRLSRKLINGIRDKQSGKTILDFLKSDGFANRNFMQLIHDDSLTFKEDIQKAQVSGQGDSLHEHIANLAGSPAIKKGILQTVKVVDELVKVMGRHKPENIVIEMARENQTTQKGQKNSRERMKRIEEGIKELGSQILKEHPVENTQLQNEKLYLYYLQNGRDMYVDQELDINRLSDYDVDHIVPQSFLKDDSIDNKVLTRSDKARGKSDNVPSEEVVKKMKNYWRQLLNAKLITQRKFDNLTKAERGGLSELDKAGFIKRQLVETRQITKHVAQILDSRMNTKYDENDKLIREVKVITLKSKLVSDFRKDFQFYKVREINNYHHAHDAYLNAVVGTALIKKYPKLESEFVYGDYKVYDVRKMIAKSEQEIGKATAKYFFYSNIMNFFKTEITLANGEIRKRPLIETNGETGEIVWDKGRDFATVRKVLSMPQVNIVKKTEVQTGGFSKESILPKRNSDKLIARKKDWDPKKYGGFDSPTVAYSVLVVAKVEKGKSKKLKSVKELLGITIMERSSFEKNPIDFLEAKGYKEVKKDLIIKLPKYSLFELENGRKRMLASAGELQKGNELALPSKYVNFLYLASHYEKLKGSPEDNEQKQLFVEQHKHYLDEIIEQISEFSKRVILADANLDKVLSAYNKHRDKPIREQAENIIHLFTLTNLGAPAAFKYFDTTIDRKRYTSTKEVLDATLIHQSITGLYETRIDLSQLGGDGGGGSPAPGSSGGMDPLQLLQPLEAEIKGTKLKAHWNSGATITCVPQAFLEEEVPIKNIWIKTIHGEKEQPVYYLTFKIQGRKVEAEVISSPYDYILVSPSDIPWLMKKPLQLTTLVPLQEYEERLLKQTMLTGSYKEKLQSLFLKYDALWQHWENQVGHRRIKPHHIATGTVNPRPQKQYPINPKAKASIQTVINDLLKQGVLIQQNSIMNTPVYPVPKPDGKWRMVLDYREVNKTIPLIAAQNQHSAGILSSIFRGKYKTTLDLSNGFWAHSITPESYWLTAFTWLGQQYCWTRLPQGFLNSPALFTADVVDLLKEVPNVQVYVDDIYISHDDPREHLEQLEKVFSLLLNAGYVVSLKKSEIAQHEVEFLGFNITKEGRGLTETFKQKLLNITPPRDLKQLQSILGLLNFARNFIPNFSELVKPLYNIIATANGKYITWTTDNSQQLQNIISMLNSAENLEERNPEVRLIMKVNTSPSAGYIRFYNEFAKRPIMYLNYVYTKAEVKFTNTEKLLTTIHKGLIKALDLGMGQEILVYSPIVSMTKIQKTPLPERKALPIRWITWMSYLEDPRIQFHYDKTLPELQQVPTVTDDIIAKIKHPSEFSMVFYTDGSAIKHPNVNKSHNAGMGIAQVQFKPEFTVINTWSIPLGDHTAQLAEVAAVEFACKKALKIDGPVLIVTDSFYVAESVNKELPYWQSNGFFNNKKKPLKHVSKWKSIADCIQLKPDIIIIHEKGHQPTASTFHTEGNNLADKLATQGSYVVNAGKRTADGSEFEKRTADGSEFESPKKKAKVE

SEQ ID NO: 519 - protein, 2175 aa, synthetic construct
MPAAKRVKLDGGDKKYSIGLDIGTNSVGWAVITDEYKVPSKKFKVLGNTDRHSIKKNLIGALLFDSGETAEATRLKRTARRRYTRRKNRICYLQEIFSNEMAKVDDSFFHRLEESFLVEEDKKHERHPIFGNIVDEVAYHEKYPTIYHLRKKLVDSTDKADLRLIYLALAHMIKFRGHFLIEGDLNPDNSDVDKLFIQLVQTYNQLFEENPINASGVDAKAILSARLSKSRRLENLIAQLPGEKKNGLFGNLIALSLGLTPNFKSNFDLAEDAKLQLSKDTYDDDLDNLLAQIGDQYADLFLAAKNLSDAILLSDILRVNTEITKAPLSASMIKRYDEHHQDLTLLKALVRQQLPEKYKEIFFDQSKNGYAGYIDGGASQEEFYKFIKPILEKMDGTEELLVKLNREDLLRKQRTFDNGSIPHQIHLGELHAILRRQEDFYPFLKDNREKIEKILTFRIPYYVGPLARGNSRFAWMTRKSEETITPWNFEEVVDKGASAQSFIERMTNFDKNLPNEKVLPKHSLLYEYFTVYNELTKVKYVTEGMRKPAFLSGEQKKAIVDLLFKTNRKVTVKQLKEDYFKKIECFDSVEISGVEDRFNASLGTYHDLLKIIKDKDFLDNEENEDILEDIVLTLTLFEDREMIEERLKTYAHLFDDKVMKQLKRRRYTGWGRLSRKLINGIRDKQSGKTILDFLKSDGFANRNFMQLIHDDSLTFKEDIQKAQVSGQGDSLHEHIANLAGSPAIKKGILQTVKVVDELVKVMGRHKPENIVIEMARENQTTQKGQKNSRERMKRIEEGIKELGSQILKEHPVENTQLQNEKLYLYYLQNGRDMYVDQELDINRLSDYDVDHIVPQSFLKDDSIDNKVLTRSDKARGKSDNVPSEEVVKKMKNYWRQLLNAKLITQRKFDNLTKAERGGLSELDKAGFIKRQLVETRQITKHVAQILDSRMNTKYDENDKLIREVKVITLKSKLVSDFRKDFQFYKVREINNYHHAHDAYLNAVVGTALIKKYPKLESEFVYGDYKVYDVRKMIAKSEQEIGKATAKYFFYSNIMNFFKTEITLANGEIRKRPLIETNGETGEIVWDKGRDFATVRKVLSMPQVNIVKKTEVQTGGFSKESILPKRNSDKLIARKKDWDPKKYGGFDSPTVAYSVLVVAKVEKGKSKKLKSVKELLGITIMERSSFEKNPIDFLEAKGYKEVKKDLIIKLPKYSLFELENGRKRMLASAGELQKGNELALPSKYVNFLYLASHYEKLKGSPEDNEQKQLFVEQHKHYLDEIIEQISEFSKRVILADANLDKVLSAYNKHRDKPIREQAENIIHLFTLTNLGAPAAFKYFDTTIDRKRYTSTKEVLDATLIHQSITGLYETRIDLSQLGGDGGGGGGSGGGGSGGMDPLQLLQPLEAEIKGTKLKAHWNSGATITCVPQAFLEEEVPIKNIWIKTIHGEKEQPVYYLTFKIQGRKVEAEVISSPYDYILVSPSDIPWLMKKPLQLTTLVPLQEYEERLLKQTMLTGSYKEKLQSLFLKYDALWQHWENQVGHRRIKPHHIATGTVNPRPQKQYPINPKAKASIQTVINDLLKQGVLIQQNSIMNTPVYPVPKPDGKWRMVLDYREVNKTIPLIAAQNQHSAGILSSIFRGKYKTTLDLSNGFWAHSITPESYWLTAFTWLGQQYCWTRLPQGFLNSPALFTADVVDLLKEVPNVQVYVDDIYISHDDPREHLEQLEKVFSLLLNAGYVVSLKKSEIAQHEVEFLGFNITKEGRGLTETFKQKLLNITPPRDLKQLQSILGLLNFARNFIPNFSELVKPLYNIIATANGKYITWTTDNSQQLQNIISMLNSAENLEERNPEVRLIMKVNTSPSAGYIRFYNEFAKRPIMYLNYVYTKAEVKFTNTEKLLTTIHKGLIKALDLGMGQEILVYSPIVSMTKIQKTPLPERKALPIRWITWMSYLEDPRIQFHYDKTLPELQQVPTVTDDIIAKIKHPSEFSMVFYTDGSAIKHPNVNKSHNAGMGIAQVQFKPEFTVINTWSIPLGDHTAQLAEVAAVEFACKKALKIDGPVLIVTDSFYVAESVNKELPYWQSNGFFNNKKKPLKHVSKWKSIADCIQLKPDIIIIHEKGHQPTASTFHTEGNNLADKLATQGSYVVNAGKRTADGSEFEKRTADGSEFESPKKKAKVE

SEQ ID NO: 520 - protein, 2172 aa, synthetic construct
MPAAKRVKLDGGDKKYSIGLDIGTNSVGWAVITDEYKVPSKKFKVLGNTDRHSIKKNLIGALLFDSGETAEATRLKRTARRRYTRRKNRICYLQEIFSNEMAKVDDSFFHRLEESFLVEEDKKHERHPIFGNIVDEVAYHEKYPTIYHLRKKLVDSTDKADLRLIYLALAHMIKFRGHFLIEGDLNPDNSDVDKLFIQLVQTYNQLFEENPINASGVDAKAILSARLSKSRRLENLIAQLPGEKKNGLFGNLIALSLGLTPNFKSNFDLAEDAKLQLSKDTYDDDLDNLLAQIGDQYADLFLAAKNLSDAILLSDILRVNTEITKAPLSASMIKRYDEHHQDLTLLKALVRQQLPEKYKEIFFDQSKNGYAGYIDGGASQEEFYKFIKPILEKMDGTEELLVKLNREDLLRKQRTFDNGSIPHQIHLGELHAILRRQEDFYPFLKDNREKIEKILTFRIPYYVGPLARGNSRFAWMTRKSEETITPWNFEEVVDKGASAQSFIERMTNFDKNLPNEKVLPKHSLLYEYFTVYNELTKVKYVTEGMRKPAFLSGEQKKAIVDLLFKTNRKVTVKQLKEDYFKKIECFDSVEISGVEDRFNASLGTYHDLLKIIKDKDFLDNEENEDILEDIVLTLTLFEDREMIEERLKTYAHLFDDKVMKQLKRRRYTGWGRLSRKLINGIRDKQSGKTILDFLKSDGFANRNFMQLIHDDSLTFKEDIQKAQVSGQGDSLHEHIANLAGSPAIKKGILQTVKVVDELVKVMGRHKPENIVIEMARENQTTQKGQKNSRERMKRIEEGIKELGSQILKEHPVENTQLQNEKLYLYYLQNGRDMYVDQELDINRLSDYDVDHIVPQSFLKDDSIDNKVLTRSDKARGKSDNVPSEEVVKKMKNYWRQLLNAKLITQRKFDNLTKAERGGLSELDKAGFIKRQLVETRQITKHVAQILDSRMNTKYDENDKLIREVKVITLKSKLVSDFRKDFQFYKVREINNYHHAHDAYLNAVVGTALIKKYPKLESEFVYGDYKVYDVRKMIAKSEQEIGKATAKYFFYSNIMNFFKTEITLANGEIRKRPLIETNGETGEIVWDKGRDFATVRKVLSMPQVNIVKKTEVQTGGFSKESILPKRNSDKLIARKKDWDPKKYGGFDSPTVAYSVLVVAKVEKGKSKKLKSVKELLGITIMERSSFEKNPIDFLEAKGYKEVKKDLIIKLPKYSLFELENGRKRMLASAGELQKGNELALPSKYVNFLYLASHYEKLKGSPEDNEQKQLFVEQHKHYLDEIIEQISEFSKRVILADANLDKVLSAYNKHRDKPIREQAENIIHLFTLTNLGAPAAFKYFDTTIDRKRYTSTKEVLDATLIHQSITGLYETRIDLSQLGGDGGPAPAPAPGGMDPLQLLQPLEAEIKGTKLKAHWNSGATITCVPQAFLEEEVPIKNIWIKTIHGEKEQPVYYLTFKIQGRKVEAEVISSPYDYILVSPSDIPWLMKKPLQLTTLVPLQEYEERLLKQTMLTGSYKEKLQSLFLKYDALWQHWENQVGHRRIKPHHIATGTVNPRPQKQYPINPKAKASIQTVINDLLKQGVLIQQNSIMNTPVYPVPKPDGKWRMVLDYREVNKTIPLIAAQNQHSAGILSSIFRGKYKTTLDLSNGFWAHSITPESYWLTAFTWLGQQYCWTRLPQGFLNSPALFTADVVDLLKEVPNVQVYVDDIYISHDDPREHLEQLEKVFSLLLNAGYVVSLKKSEIAQHEVEFLGFNITKEGRGLTETFKQKLLNITPPRDLKQLQSILGLLNFARNFIPNFSELVKPLYNIIATANGKYITWTTDNSQQLQNIISMLNSAENLEERNPEVRLIMKVNTSPSAGYIRFYNEFAKRPIMYLNYVYTKAEVKFTNTEKLLTTIHKGLIKALDLGMGQEILVYSPIVSMTKIQKTPLPERKALPIRWITWMSYLEDPRIQFHYDKTLPELQQVPTVTDDIIAKIKHPSEFSMVFYTDGSAIKHPNVNKSHNAGMGIAQVQFKPEFTVINTWSIPLGDHTAQLAEVAAVEFACKKALKIDGPVLIVTDSFYVAESVNKELPYWQSNGFFNNKKKPLKHVSKWKSIADCIQLKPDIIIIHEKGHQPTASTFHTEGNNLADKLATQGSYVVNAGKRTADGSEFEKRTADGSEFESPKKKAKVE

SEQ ID NO: 521 - protein, 2174 aa, synthetic construct
MPAAKRVKLDGGDKKYSIGLDIGTNSVGWAVITDEYKVPSKKFKVLGNTDRHSIKKNLIGALLFDSGETAEATRLKRTARRRYTRRKNRICYLQEIFSNEMAKVDDSFFHRLEESFLVEEDKKHERHPIFGNIVDEVAYHEKYPTIYHLRKKLVDSTDKADLRLIYLALAHMIKFRGHFLIEGDLNPDNSDVDKLFIQLVQTYNQLFEENPINASGVDAKAILSARLSKSRRLENLIAQLPGEKKNGLFGNLIALSLGLTPNFKSNFDLAEDAKLQLSKDTYDDDLDNLLAQIGDQYADLFLAAKNLSDAILLSDILRVNTEITKAPLSASMIKRYDEHHQDLTLLKALVRQQLPEKYKEIFFDQSKNGYAGYIDGGASQEEFYKFIKPILEKMDGTEELLVKLNREDLLRKQRTFDNGSIPHQIHLGELHAILRRQEDFYPFLKDNREKIEKILTFRIPYYVGPLARGNSRFAWMTRKSEETITPWNFEEVVDKGASAQSFIERMTNFDKNLPNEKVLPKHSLLYEYFTVYNELTKVKYVTEGMRKPAFLSGEQKKAIVDLLFKTNRKVTVKQLKEDYFKKIECFDSVEISGVEDRFNASLGTYHDLLKIIKDKDFLDNEENEDILEDIVLTLTLFEDREMIEERLKTYAHLFDDKVMKQLKRRRYTGWGRLSRKLINGIRDKQSGKTILDFLKSDGFANRNFMQLIHDDSLTFKEDIQKAQVSGQGDSLHEHIANLAGSPAIKKGILQTVKVVDELVKVMGRHKPENIVIEMARENQTTQKGQKNSRERMKRIEEGIKELGSQILKEHPVENTQLQNEKLYLYYLQNGRDMYVDQELDINRLSDYDVDHIVPQSFLKDDSIDNKVLTRSDKARGKSDNVPSEEVVKKMKNYWRQLLNAKLITQRKFDNLTKAERGGLSELDKAGFIKRQLVETRQITKHVAQILDSRMNTKYDENDKLIREVKVITLKSKLVSDFRKDFQFYKVREINNYHHAHDAYLNAVVGTALIKKYPKLESEFVYGDYKVYDVRKMIAKSEQEIGKATAKYFFYSNIMNFFKTEITLANGEIRKRPLIETNGETGEIVWDKGRDFATVRKVLSMPQVNIVKKTEVQTGGFSKESILPKRNSDKLIARKKDWDPKKYGGFDSPTVAYSVLVVAKVEKGKSKKLKSVKELLGITIMERSSFEKNPIDFLEAKGYKEVKKDLIIKLPKYSLFELENGRKRMLASAGELQKGNELALPSKYVNFLYLASHYEKLKGSPEDNEQKQLFVEQHKHYLDEIIEQISEFSKRVILADANLDKVLSAYNKHRDKPIREQAENIIHLFTLTNLGAPAAFKYFDTTIDRKRYTSTKEVLDATLIHQSITGLYETRIDLSQLGGDGGGSSGGSGGGGGMDPLQLLQPLEAEIKGTKLKAHWNSGATITCVPQAFLEEEVPIKNIWIKTIHGEKEQPVYYLTFKIQGRKVEAEVISSPYDYILVSPSDIPWLMKKPLQLTTLVPLQEYEERLLKQTMLTGSYKEKLQSLFLKYDALWQHWENQVGHRRIKPHHIATGTVNPRPQKQYPINPKAKASIQTVINDLLKQGVLIQQNSIMNTPVYPVPKPDGKWRMVLDYREVNKTIPLIAAQNQHSAGILSSIFRGKYKTTLDLSNGFWAHSITPESYWLTAFTWLGQQYCWTRLPQGFLNSPALFTADVVDLLKEVPNVQVYVDDIYISHDDPREHLEQLEKVFSLLLNAGYVVSLKKSEIAQHEVEFLGFNITKEGRGLTETFKQKLLNITPPRDLKQLQSILGLLNFARNFIPNFSELVKPLYNIIATANGKYITWTTDNSQQLQNIISMLNSAENLEERNPEVRLIMKVNTSPSAGYIRFYNEFAKRPIMYLNYVYTKAEVKFTNTEKLLTTIHKGLIKALDLGMGQEILVYSPIVSMTKIQKTPLPERKALPIRWITWMSYLEDPRIQFHYDKTLPELQQVPTVTDDIIAKIKHPSEFSMVFYTDGSAIKHPNVNKSHNAGMGIAQVQFKPEFTVINTWSIPLGDHTAQLAEVAAVEFACKKALKIDGPVLIVTDSFYVAESVNKELPYWQSNGFFNNKKKPLKHVSKWKSIADCIQLKPDIIIIHEKGHQPTASTFHTEGNNLADKLATQGSYVVNAGKRTADGSEFEKRTADGSEFESPKKKAKVE

SEQ ID NO: 522 - protein, 2010 aa, synthetic construct
MPAAKRVKLDGGDKKYSIGLDIGTNSVGWAVITDEYKVPSKKFKVLGNTDRHSIKKNLIGALLFDSGETAEATRLKRTARRRYTRRKNRICYLQEIFSNEMAKVDDSFFHRLEESFLVEEDKKHERHPIFGNIVDEVAYHEKYPTIYHLRKKLVDSTDKADLRLIYLALAHMIKFRGHFLIEGDLNPDNSDVDKLFIQLVQTYNQLFEENPINASGVDAKAILSARLSKSRRLENLIAQLPGEKKNGLFGNLIALSLGLTPNFKSNFDLAEDAKLQLSKDTYDDDLDNLLAQIGDQYADLFLAAKNLSDAILLSDILRVNTEITKAPLSASMIKRYDEHHQDLTLLKALVRQQLPEKYKEIFFDQSKNGYAGYIDGGASQEEFYKFIKPILEKMDGTEELLVKLNREDLLRKQRTFDNGSIPHQIHLGELHAILRRQEDFYPFLKDNREKIEKILTFRIPYYVGPLARGNSRFAWMTRKSEETITPWNFEEVVDKGASAQSFIERMTNFDKNLPNEKVLPKHSLLYEYFTVYNELTKVKYVTEGMRKPAFLSGEQKKAIVDLLFKTNRKVTVKQLKEDYFKKIECFDSVEISGVEDRFNASLGTYHDLLKIIKDKDFLDNEENEDILEDIVLTLTLFEDREMIEERLKTYAHLFDDKVMKQLKRRRYTGWGRLSRKLINGIRDKQSGKTILDFLKSDGFANRNFMQLIHDDSLTFKEDIQKAQVSGQGDSLHEHIANLAGSPAIKKGILQTVKVVDELVKVMGRHKPENIVIEMARENQTTQKGQKNSRERMKRIEEGIKELGSQILKEHPVENTQLQNEKLYLYYLQNGRDMYVDQELDINRLSDYDVDHIVPQSFLKDDSIDNKVLTRSDKARGKSDNVPSEEVVKKMKNYWRQLLNAKLITQRKFDNLTKAERGGLSELDKAGFIKRQLVETRQITKHVAQILDSRMNTKYDENDKLIREVKVITLKSKLVSDFRKDFQFYKVREINNYHHAHDAYLNAVVGTALIKKYPKLESEFVYGDYKVYDVRKMIAKSEQEIGKATAKYFFYSNIMNFFKTEITLANGEIRKRPLIETNGETGEIVWDKGRDFATVRKVLSMPQVNIVKKTEVQTGGFSKESILPKRNSDKLIARKKDWDPKKYGGFDSPTVAYSVLVVAKVEKGKSKKLKSVKELLGITIMERSSFEKNPIDFLEAKGYKEVKKDLIIKLPKYSLFELENGRKRMLASAGELQKGNELALPSKYVNFLYLASHYEKLKGSPEDNEQKQLFVEQHKHYLDEIIEQISEFSKRVILADANLDKVLSAYNKHRDKPIREQAENIIHLFTLTNLGAPAAFKYFDTTIDRKRYTSTKEVLDATLIHQSITGLYETRIDLSQLGGDGGGGGGSGGGGSGGGGSGGGGSGGGVLDTPPSHIGLEHLPPPPEVPQFPLNLERLQALQDLVHRSLEAGYISPWDGPGNNPVFPVRKPNGAWRFVHDLRATNALTKPIPALSPGPPDLTAPPTHPPHIICLDLKDAFFQIPVEDRFRFYLSFTLPSPGGLQPHRRFAWRVLPQGFINSPALFQRALQEPLRQVSAAFSQSLLVSYMDDILYASPTEEQRSQCYQALAARLRDLGFQVASEKTSQTPSPVPFLGQMVHEQIVTYQSLPTLQISSPISLHQLQAVLGDLQWVSRGTPTTRRPLQLLYSSLKRHHDPRAIIQLSPEQLQGIAELRQALSHNARSRYNEQEPLLAYVHLTRAGSTLVLFQKGAQFPLAYFQTPLTDNQASPWGLLLLLGCQYLQTQALSSYAKPILKYYHNLPKTSLDNWIQSSEDPRVQELLQLWPQISSQGIQPPGPWKTLITRAEVFLTPQFSPDPIPAALCLFSDGATGRGAYCLWKDHLLDFQAVPAPESAQKGELAGLLAGLAAAPPEPVNIWVDSKYLYSLLRTWVLGAWLQPDPVPSYALLYKSLLRHPAIVVGHVRSHSSASHPIASLNNYVDQLAGKRTADGSEFEKRTADGSEFESPKKKAKVE

SEQ ID NO: 523 - protein, 1995 aa, synthetic construct
MPAAKRVKLDGGDKKYSIGLDIGTNSVGWAVITDEYKVPSKKFKVLGNTDRHSIKKNLIGALLFDSGETAEATRLKRTARRRYTRRKNRICYLQEIFSNEMAKVDDSFFHRLEESFLVEEDKKHERHPIFGNIVDEVAYHEKYPTIYHLRKKLVDSTDKADLRLIYLALAHMIKFRGHFLIEGDLNPDNSDVDKLFIQLVQTYNQLFEENPINASGVDAKAILSARLSKSRRLENLIAQLPGEKKNGLFGNLIALSLGLTPNFKSNFDLAEDAKLQLSKDTYDDDLDNLLAQIGDQYADLFLAAKNLSDAILLSDILRVNTEITKAPLSASMIKRYDEHHQDLTLLKALVRQQLPEKYKEIFFDQSKNGYAGYIDGGASQEEFYKFIKPILEKMDGTEELLVKLNREDLLRKQRTFDNGSIPHQIHLGELHAILRRQEDFYPFLKDNREKIEKILTFRIPYYVGPLARGNSRFAWMTRKSEETITPWNFEEVVDKGASAQSFIERMTNFDKNLPNEKVLPKHSLLYEYFTVYNELTKVKYVTEGMRKPAFLSGEQKKAIVDLLFKTNRKVTVKQLKEDYFKKIECFDSVEISGVEDRFNASLGTYHDLLKIIKDKDFLDNEENEDILEDIVLTLTLFEDREMIEERLKTYAHLFDDKVMKQLKRRRYTGWGRLSRKLINGIRDKQSGKTILDFLKSDGFANRNFMQLIHDDSLTFKEDIQKAQVSGQGDSLHEHIANLAGSPAIKKGILQTVKVVDELVKVMGRHKPENIVIEMARENQTTQKGQKNSRERMKRIEEGIKELGSQILKEHPVENTQLQNEKLYLYYLQNGRDMYVDQELDINRLSDYDVDHIVPQSFLKDDSIDNKVLTRSDKARGKSDNVPSEEVVKKMKNYWRQLLNAKLITQRKFDNLTKAERGGLSELDKAGFIKRQLVETRQITKHVAQILDSRMNTKYDENDKLIREVKVITLKSKLVSDFRKDFQFYKVREINNYHHAHDAYLNAVVGTALIKKYPKLESEFVYGDYKVYDVRKMIAKSEQEIGKATAKYFFYSNIMNFFKTEITLANGEIRKRPLIETNGETGEIVWDKGRDFATVRKVLSMPQVNIVKKTEVQTGGFSKESILPKRNSDKLIARKKDWDPKKYGGFDSPTVAYSVLVVAKVEKGKSKKLKSVKELLGITIMERSSFEKNPIDFLEAKGYKEVKKDLIIKLPKYSLFELENGRKRMLASAGELQKGNELALPSKYVNFLYLASHYEKLKGSPEDNEQKQLFVEQHKHYLDEIIEQISEFSKRVILADANLDKVLSAYNKHRDKPIREQAENIIHLFTLTNLGAPAAFKYFDTTIDRKRYTSTKEVLDATLIHQSITGLYETRIDLSQLGGDGGGGGGGGGGVLDTPPSHIGLEHLPPPPEVPQFPLNLERLQALQDLVHRSLEAGYISPWDGPGNNPVFPVRKPNGAWRFVHDLRATNALTKPIPALSPGPPDLTAPPTHPPHIICLDLKDAFFQIPVEDRFRFYLSFTLPSPGGLQPHRRFAWRVLPQGFINSPALFQRALQEPLRQVSAAFSQSLLVSYMDDILYASPTEEQRSQCYQALAARLRDLGFQVASEKTSQTPSPVPFLGQMVHEQIVTYQSLPTLQISSPISLHQLQAVLGDLQWVSRGTPTTRRPLQLLYSSLKRHHDPRAIIQLSPEQLQGIAELRQALSHNARSRYNEQEPLLAYVHLTRAGSTLVLFQKGAQFPLAYFQTPLTDNQASPWGLLLLLGCQYLQTQALSSYAKPILKYYHNLPKTSLDNWIQSSEDPRVQELLQLWPQISSQGIQPPGPWKTLITRAEVFLTPQFSPDPIPAALCLFSDGATGRGAYCLWKDHLLDFQAVPAPESAQKGELAGLLAGLAAAPPEPVNIWVDSKYLYSLLRTWVLGAWLQPDPVPSYALLYKSLLRHPAIVVGHVRSHSSASHPIASLNNYVDQLAGKRTADGSEFEKRTADGSEFESPKKKAKVE

SEQ ID NO: 524 - protein, 2122 aa, synthetic construct
MPAAKRVKLDGGDKKYSIGLDIGTNSVGWAVITDEYKVPSKKFKVLGNTDRHSIKKNLIGALLFDSGETAEATRLKRTARRRYTRRKNRICYLQEIFSNEMAKVDDSFFHRLEESFLVEEDKKHERHPIFGNIVDEVAYHEKYPTIYHLRKKLVDSTDKADLRLIYLALAHMIKFRGHFLIEGDLNPDNSDVDKLFIQLVQTYNQLFEENPINASGVDAKAILSARLSKSRRLENLIAQLPGEKKNGLFGNLIALSLGLTPNFKSNFDLAEDAKLQLSKDTYDDDLDNLLAQIGDQYADLFLAAKNLSDAILLSDILRVNTEITKAPLSASMIKRYDEHHQDLTLLKALVRQQLPEKYKEIFFDQSKNGYAGYIDGGASQEEFYKFIKPILEKMDGTEELLVKLNREDLLRKQRTFDNGSIPHQIHLGELHAILRRQEDFYPFLKDNREKIEKILTFRIPYYVGPLARGNSRFAWMTRKSEETITPWNFEEVVDKGASAQSFIERMTNFDKNLPNEKVLPKHSLLYEYFTVYNELTKVKYVTEGMRKPAFLSGEQKKAIVDLLFKTNRKVTVKQLKEDYFKKIECFDSVEISGVEDRFNASLGTYHDLLKIIKDKDFLDNEENEDILEDIVLTLTLFEDREMIEERLKTYAHLFDDKVMKQLKRRRYTGWGRLSRKLINGIRDKQSGKTILDFLKSDGFANRNFMQLIHDDSLTFKEDIQKAQVSGQGDSLHEHIANLAGSPAIKKGILQTVKVVDELVKVMGRHKPENIVIEMARENQTTQKGQKNSRERMKRIEEGIKELGSQILKEHPVENTQLQNEKLYLYYLQNGRDMYVDQELDINRLSDYDVDHIVPQSFLKDDSIDNKVLTRSDKARGKSDNVPSEEVVKKMKNYWRQLLNAKLITQRKFDNLTKAERGGLSELDKAGFIKRQLVETRQITKHVAQILDSRMNTKYDENDKLIREVKVITLKSKLVSDFRKDFQFYKVREINNYHHAHDAYLNAVVGTALIKKYPKLESEFVYGDYKVYDVRKMIAKSEQEIGKATAKYFFYSNIMNFFKTEITLANGEIRKRPLIETNGETGEIVWDKGRDFATVRKVLSMPQVNIVKKTEVQTGGFSKESILPKRNSDKLIARKKDWDPKKYGGFDSPTVAYSVLVVAKVEKGKSKKLKSVKELLGITIMERSSFEKNPIDFLEAKGYKEVKKDLIIKLPKYSLFELENGRKRMLASAGELQKGNELALPSKYVNFLYLASHYEKLKGSPEDNEQKQLFVEQHKHYLDEIIEQISEFSKRVILADANLDKVLSAYNKHRDKPIREQAENIIHLFTLTNLGAPAAFKYFDTTIDRKRYTSTKEVLDATLIHQSITGLYETRIDLSQLGGDGGAEAAAKEAAAKEAAAKEAAAKALEAEAAAKEAAAKEAAAKEAAAKAGGIPWLMKKPLQLTTLVPLQEYEERLLKQTMLTGSYKEKLQSLFLKYDALWQHWENQVGHRRIKPHHIATGTVNPRPQKQYPINPKAKASIQTVINDLLKQGVLIQQNSIMNTPVYPVPKPDGKWRMVLDYREVNKTIPLIAAQNQHSAGILSSIFRGKYKTTLDLSNGFWAHSITPESYWLTAFTWLGQQYCWTRLPQGFLNSPALFTADVVDLLKEVPNVQVYVDDIYISHDDPREHLEQLEKVFSLLLNAGYVVSLKKSEIAQHEVEFLGFNITKEGRGLTETFKQKLLNITPPRDLKQLQSILGLLNFARNFIPNFSELVKPLYNIIATANGKYITWTTDNSQQLQNIISMLNSAENLEERNPEVRLIMKVNTSPSAGYIRFYNEFAKRPIMYLNYVYTKAEVKFTNTEKLLTTIHKGLIKALDLGMGQEILVYSPIVSMTKIQKTPLPERKALPIRWITWMSYLEDPRIQFHYDKTLPELQQVPTVTDDIIAKIKHPSEFSMVFYTDGSAIKHPNVNKSHNAGMGIAQVQFKPEFTVINTWSIPLGDHTAQLAEVAAVEFACKKALKIDGPVLIVTDSFYVAESVNKELPYWQSNGFFNNKKKPLKHVSKWKSIADCIQLKPDIIIIHEKGHQPTASTFHTEGNNLADKLATQGSYVVNAGKRTADGSEFEKRTADGSEFESPKKKAKVE

SEQ ID NO: 525 - protein, 2096 aa, synthetic construct
MPAAKRVKLDGGDKKYSIGLDIGTNSVGWAVITDEYKVPSKKFKVLGNTDRHSIKKNLIGALLFDSGETAEATRLKRTARRRYTRRKNRICYLQEIFSNEMAKVDDSFFHRLEESFLVEEDKKHERHPIFGNIVDEVAYHEKYPTIYHLRKKLVDSTDKADLRLIYLALAHMIKFRGHFLIEGDLNPDNSDVDKLFIQLVQTYNQLFEENPINASGVDAKAILSARLSKSRRLENLIAQLPGEKKNGLFGNLIALSLGLTPNFKSNFDLAEDAKLQLSKDTYDDDLDNLLAQIGDQYADLFLAAKNLSDAILLSDILRVNTEITKAPLSASMIKRYDEHHQDLTLLKALVRQQLPEKYKEIFFDQSKNGYAGYIDGGASQEEFYKFIKPILEKMDGTEELLVKLNREDLLRKQRTFDNGSIPHQIHLGELHAILRRQEDFYPFLKDNREKIEKILTFRIPYYVGPLARGNSRFAWMTRKSEETITPWNFEEVVDKGASAQSFIERMTNFDKNLPNEKVLPKHSLLYEYFTVYNELTKVKYVTEGMRKPAFLSGEQKKAIVDLLFKTNRKVTVKQLKEDYFKKIECFDSVEISGVEDRFNASLGTYHDLLKIIKDKDFLDNEENEDILEDIVLTLTLFEDREMIEERLKTYAHLFDDKVMKQLKRRRYTGWGRLSRKLINGIRDKQSGKTILDFLKSDGFANRNFMQLIHDDSLTFKEDIQKAQVSGQGDSLHEHIANLAGSPAIKKGILQTVKVVDELVKVMGRHKPENIVIEMARENQTTQKGQKNSRERMKRIEEGIKELGSQILKEHPVENTQLQNEKLYLYYLQNGRDMYVDQELDINRLSDYDVDHIVPQSFLKDDSIDNKVLTRSDKARGKSDNVPSEEVVKKMKNYWRQLLNAKLITQRKFDNLTKAERGGLSELDKAGFIKRQLVETRQITKHVAQILDSRMNTKYDENDKLIREVKVITLKSKLVSDFRKDFQFYKVREINNYHHAHDAYLNAVVGTALIKKYPKLESEFVYGDYKVYDVRKMIAKSEQEIGKATAKYFFYSNIMNFFKTEITLANGEIRKRPLIETNGETGEIVWDKGRDFATVRKVLSMPQVNIVKKTEVQTGGFSKESILPKRNSDKLIARKKDWDPKKYGGFDSPTVAYSVLVVAKVEKGKSKKLKSVKELLGITIMERSSFEKNPIDFLEAKGYKEVKKDLIIKLPKYSLFELENGRKRMLASAGELQKGNELALPSKYVNFLYLASHYEKLKGSPEDNEQKQLFVEQHKHYLDEIIEQISEFSKRVILADANLDKVLSAYNKHRDKPIREQAENIIHLFTLTNLGAPAAFKYFDTTIDRKRYTSTKEVLDATLIHQSITGLYETRIDLSQLGGDGGEAAAKEAAAKEAAAKEAAAKGGIPWLMKKPLQLTTLVPLQEYEERLLKQTMLTGSYKEKLQSLFLKYDALWQHWENQVGHRRIKPHHIATGTVNPRPQKQYPINPKAKASIQTVINDLLKQGVLIQQNSIMNTPVYPVPKPDGKWRMVLDYREVNKTIPLIAAQNQHSAGILSSIFRGKYKTTLDLSNGFWAHSITPESYWLTAFTWLGQQYCWTRLPQGFLNSPALFTADVVDLLKEVPNVQVYVDDIYISHDDPREHLEQLEKVFSLLLNAGYVVSLKKSEIAQHEVEFLGFNITKEGRGLTETFKQKLLNITPPRDLKQLQSILGLLNFARNFIPNFSELVKPLYNIIATANGKYITWTTDNSQQLQNIISMLNSAENLEERNPEVRLIMKVNTSPSAGYIRFYNEFAKRPIMYLNYVYTKAEVKFTNTEKLLTTIHKGLIKALDLGMGQEILVYSPIVSMTKIQKTPLPERKALPIRWITWMSYLEDPRIQFHYDKTLPELQQVPTVTDDIIAKIKHPSEFSMVFYTDGSAIKHPNVNKSHNAGMGIAQVQFKPEFTVINTWSIPLGDHTAQLAEVAAVEFACKKALKIDGPVLIVTDSFYVAESVNKELPYWQSNGFFNNKKKPLKHVSKWKSIADCIQLKPDIIIIHEKGHQPTASTFHTEGNNLADKLATQGSYVVNAGKRTADGSEFEKRTADGSEFESPKKKAKVE

SEQ ID NO: 526 - protein, 2087 aa, synthetic construct
MPAAKRVKLDGGDKKYSIGLDIGTNSVGWAVITDEYKVPSKKFKVLGNTDRHSIKKNLIGALLFDSGETAEATRLKRTARRRYTRRKNRICYLQEIFSNEMAKVDDSFFHRLEESFLVEEDKKHERHPIFGNIVDEVAYHEKYPTIYHLRKKLVDSTDKADLRLIYLALAHMIKFRGHFLIEGDLNPDNSDVDKLFIQLVQTYNQLFEENPINASGVDAKAILSARLSKSRRLENLIAQLPGEKKNGLFGNLIALSLGLTPNFKSNFDLAEDAKLQLSKDTYDDDLDNLLAQIGDQYADLFLAAKNLSDAILLSDILRVNTEITKAPLSASMIKRYDEHHQDLTLLKALVRQQLPEKYKEIFFDQSKNGYAGYIDGGASQEEFYKFIKPILEKMDGTEELLVKLNREDLLRKQRTFDNGSIPHQIHLGELHAILRRQEDFYPFLKDNREKIEKILTFRIPYYVGPLARGNSRFAWMTRKSEETITPWNFEEVVDKGASAQSFIERMTNFDKNLPNEKVLPKHSLLYEYFTVYNELTKVKYVTEGMRKPAFLSGEQKKAIVDLLFKTNRKVTVKQLKEDYFKKIECFDSVEISGVEDRFNASLGTYHDLLKIIKDKDFLDNEENEDILEDIVLTLTLFEDREMIEERLKTYAHLFDDKVMKQLKRRRYTGWGRLSRKLINGIRDKQSGKTILDFLKSDGFANRNFMQLIHDDSLTFKEDIQKAQVSGQGDSLHEHIANLAGSPAIKKGILQTVKVVDELVKVMGRHKPENIVIEMARENQTTQKGQKNSRERMKRIEEGIKELGSQILKEHPVENTQLQNEKLYLYYLQNGRDMYVDQELDINRLSDYDVDHIVPQSFLKDDSIDNKVLTRSDKARGKSDNVPSEEVVKKMKNYWRQLLNAKLITQRKFDNLTKAERGGLSELDKAGFIKRQLVETRQITKHVAQILDSRMNTKYDENDKLIREVKVITLKSKLVSDFRKDFQFYKVREINNYHHAHDAYLNAVVGTALIKKYPKLESEFVYGDYKVYDVRKMIAKSEQEIGKATAKYFFYSNIMNFFKTEITLANGEIRKRPLIETNGETGEIVWDKGRDFATVRKVLSMPQVNIVKKTEVQTGGFSKESILPKRNSDKLIARKKDWDPKKYGGFDSPTVAYSVLVVAKVEKGKSKKLKSVKELLGITIMERSSFEKNPIDFLEAKGYKEVKKDLIIKLPKYSLFELENGRKRMLASAGELQKGNELALPSKYVNFLYLASHYEKLKGSPEDNEQKQLFVEQHKHYLDEIIEQISEFSKRVILADANLDKVLSAYNKHRDKPIREQAENIIHLFTLTNLGAPAAFKYFDTTIDRKRYTSTKEVLDATLIHQSITGLYETRIDLSQLGGDGGGGSEAAAKPAPGGIPWLMKKPLQLTTLVPLQEYEERLLKQTMLTGSYKEKLQSLFLKYDALWQHWENQVGHRRIKPHHIATGTVNPRPQKQYPINPKAKASIQTVINDLLKQGVLIQQNSIMNTPVYPVPKPDGKWRMVLDYREVNKTIPLIAAQNQHSAGILSSIFRGKYKTTLDLSNGFWAHSITPESYWLTAFTWLGQQYCWTRLPQGFLNSPALFTADVVDLLKEVPNVQVYVDDIYISHDDPREHLEQLEKVFSLLLNAGYVVSLKKSEIAQHEVEFLGFNITKEGRGLTETFKQKLLNITPPRDLKQLQSILGLLNFARNFIPNFSELVKPLYNIIATANGKYITWTTDNSQQLQNIISMLNSAENLEERNPEVRLIMKVNTSPSAGYIRFYNEFAKRPIMYLNYVYTKAEVKFTNTEKLLTTIHKGLIKALDLGMGQEILVYSPIVSMTKIQKTPLPERKALPIRWITWMSYLEDPRIQFHYDKTLPELQQVPTVTDDIIAKIKHPSEFSMVFYTDGSAIKHPNVNKSHNAGMGIAQVQFKPEFTVINTWSIPLGDHTAQLAEVAAVEFACKKALKIDGPVLIVTDSFYVAESVNKELPYWQSNGFFNNKKKPLKHVSKWKSIADCIQLKPDIIIIHEKGHQPTASTFHTEGNNLADKLATQGSYVVNAGKRTADGSEFEKRTADGSEFESPKKKAKVE

SEQ ID NO: 527 - protein, 2109 aa, synthetic construct
MPAAKRVKLDGGDKKYSIGLDIGTNSVGWAVITDEYKVPSKKFKVLGNTDRHSIKKNLIGALLFDSGETAEATRLKRTARRRYTRRKNRICYLQEIFSNEMAKVDDSFFHRLEESFLVEEDKKHERHPIFGNIVDEVAYHEKYPTIYHLRKKLVDSTDKADLRLIYLALAHMIKFRGHFLIEGDLNPDNSDVDKLFIQLVQTYNQLFEENPINASGVDAKAILSARLSKSRRLENLIAQLPGEKKNGLFGNLIALSLGLTPNFKSNFDLAEDAKLQLSKDTYDDDLDNLLAQIGDQYADLFLAAKNLSDAILLSDILRVNTEITKAPLSASMIKRYDEHHQDLTLLKALVRQQLPEKYKEIFFDQSKNGYAGYIDGGASQEEFYKFIKPILEKMDGTEELLVKLNREDLLRKQRTFDNGSIPHQIHLGELHAILRRQEDFYPFLKDNREKIEKILTFRIPYYVGPLARGNSRFAWMTRKSEETITPWNFEEVVDKGASAQSFIERMTNFDKNLPNEKVLPKHSLLYEYFTVYNELTKVKYVTEGMRKPAFLSGEQKKAIVDLLFKTNRKVTVKQLKEDYFKKIECFDSVEISGVEDRFNASLGTYHDLLKIIKDKDFLDNEENEDILEDIVLTLTLFEDREMIEERLKTYAHLFDDKVMKQLKRRRYTGWGRLSRKLINGIRDKQSGKTILDFLKSDGFANRNFMQLIHDDSLTFKEDIQKAQVSGQGDSLHEHIANLAGSPAIKKGILQTVKVVDELVKVMGRHKPENIVIEMARENQTTQKGQKNSRERMKRIEEGIKELGSQILKEHPVENTQLQNEKLYLYYLQNGRDMYVDQELDINRLSDYDVDHIVPQSFLKDDSIDNKVLTRSDKARGKSDNVPSEEVVKKMKNYWRQLLNAKLITQRKFDNLTKAERGGLSELDKAGFIKRQLVETRQITKHVAQILDSRMNTKYDENDKLIREVKVITLKSKLVSDFRKDFQFYKVREINNYHHAHDAYLNAVVGTALIKKYPKLESEFVYGDYKVYDVRKMIAKSEQEIGKATAKYFFYSNIMNFFKTEITLANGEIRKRPLIETNGETGEIVWDKGRDFATVRKVLSMPQVNIVKKTEVQTGGFSKESILPKRNSDKLIARKKDWDPKKYGGFDSPTVAYSVLVVAKVEKGKSKKLKSVKELLGITIMERSSFEKNPIDFLEAKGYKEVKKDLIIKLPKYSLFELENGRKRMLASAGELQKGNELALPSKYVNFLYLASHYEKLKGSPEDNEQKQLFVEQHKHYLDEIIEQISEFSKRVILADANLDKVLSAYNKHRDKPIREQAENIIHLFTLTNLGAPAAFKYFDTTIDRKRYTSTKEVLDATLIHQSITGLYETRIDLSQLGGDGGSGGSSGGSSGSETPGTSESATPESSGGSSGGSSGGIPWLMKKPLQLTTLVPLQEYEERLLKQTMLTGSYKEKLQSLFLKYDALWQHWENQVGHRRIKPHHIATGTVNPRPQKQYPINPKAKASIQTVINDLLKQGVLIQQNSIMNTPVYPVPKPDGKWRMVLDYREVNKTIPLIAAQNQHSAGILSSIFRGKYKTTLDLSNGFWAHSITPESYWLTAFTWLGQQYCWTRLPQGFLNSPALFTADVVDLLKEVPNVQVYVDDIYISHDDPREHLEQLEKVFSLLLNAGYVVSLKKSEIAQHEVEFLGFNITKEGRGLTETFKQKLLNITPPRDLKQLQSILGLLNFARNFIPNFSELVKPLYNIIATANGKYITWTTDNSQQLQNIISMLNSAENLEERNPEVRLIMKVNTSPSAGYIRFYNEFAKRPIMYLNYVYTKAEVKFTNTEKLLTTIHKGLIKALDLGMGQEILVYSPIVSMTKIQKTPLPERKALPIRWITWMSYLEDPRIQFHYDKTLPELQQVPTVTDDIIAKIKHPSEFSMVFYTDGSAIKHPNVNKSHNAGMGIAQVQFKPEFTVINTWSIPLGDHTAQLAEVAAVEFACKKALKIDGPVLIVTDSFYVAESVNKELPYWQSNGFFNNKKKPLKHVSKWKSIADCIQLKPDIIIIHEKGHQPTASTFHTEGNNLADKLATQGSYVVNAGKRTADGSEFEKRTADGSEFESPKKKAKVE

SEQ ID NO: 528 - protein, 2106 aa, synthetic construct
MPAAKRVKLDGGDKKYSIGLDIGTNSVGWAVITDEYKVPSKKFKVLGNTDRHSIKKNLIGALLFDSGETAEATRLKRTARRRYTRRKNRICYLQEIFSNEMAKVDDSFFHRLEESFLVEEDKKHERHPIFGNIVDEVAYHEKYPTIYHLRKKLVDSTDKADLRLIYLALAHMIKFRGHFLIEGDLNPDNSDVDKLFIQLVQTYNQLFEENPINASGVDAKAILSARLSKSRRLENLIAQLPGEKKNGLFGNLIALSLGLTPNFKSNFDLAEDAKLQLSKDTYDDDLDNLLAQIGDQYADLFLAAKNLSDAILLSDILRVNTEITKAPLSASMIKRYDEHHQDLTLLKALVRQQLPEKYKEIFFDQSKNGYAGYIDGGASQEEFYKFIKPILEKMDGTEELLVKLNREDLLRKQRTFDNGSIPHQIHLGELHAILRRQEDFYPFLKDNREKIEKILTFRIPYYVGPLARGNSRFAWMTRKSEETITPWNFEEVVDKGASAQSFIERMTNFDKNLPNEKVLPKHSLLYEYFTVYNELTKVKYVTEGMRKPAFLSGEQKKAIVDLLFKTNRKVTVKQLKEDYFKKIECFDSVEISGVEDRFNASLGTYHDLLKIIKDKDFLDNEENEDILEDIVLTLTLFEDREMIEERLKTYAHLFDDKVMKQLKRRRYTGWGRLSRKLINGIRDKQSGKTILDFLKSDGFANRNFMQLIHDDSLTFKEDIQKAQVSGQGDSLHEHIANLAGSPAIKKGILQTVKVVDELVKVMGRHKPENIVIEMARENQTTQKGQKNSRERMKRIEEGIKELGSQILKEHPVENTQLQNEKLYLYYLQNGRDMYVDQELDINRLSDYDVDHIVPQSFLKDDSIDNKVLTRSDKARGKSDNVPSEEVVKKMKNYWRQLLNAKLITQRKFDNLTKAERGGLSELDKAGFIKRQLVETRQITKHVAQILDSRMNTKYDENDKLIREVKVITLKSKLVSDFRKDFQFYKVREINNYHHAHDAYLNAVVGTALIKKYPKLESEFVYGDYKVYDVRKMIAKSEQEIGKATAKYFFYSNIMNFFKTEITLANGEIRKRPLIETNGETGEIVWDKGRDFATVRKVLSMPQVNIVKKTEVQTGGFSKESILPKRNSDKLIARKKDWDPKKYGGFDSPTVAYSVLVVAKVEKGKSKKLKSVKELLGITIMERSSFEKNPIDFLEAKGYKEVKKDLIIKLPKYSLFELENGRKRMLASAGELQKGNELALPSKYVNFLYLASHYEKLKGSPEDNEQKQLFVEQHKHYLDEIIEQISEFSKRVILADANLDKVLSAYNKHRDKPIREQAENIIHLFTLTNLGAPAAFKYFDTTIDRKRYTSTKEVLDATLIHQSITGLYETRIDLSQLGGDGGGGGGSGGGGSGGGGSGGGGSGGGGSGGGGSGGIPWLMKKPLQLTTLVPLQEYEERLLKQTMLTGSYKEKLQSLFLKYDALWQHWENQVGHRRIKPHHIATGTVNPRPQKQYPINPKAKASIQTVINDLLKQGVLIQQNSIMNTPVYPVPKPDGKWRMVLDYREVNKTIPLIAAQNQHSAGILSSIFRGKYKTTLDLSNGFWAHSITPESYWLTAFTWLGQQYCWTRLPQGFLNSPALFTADVVDLLKEVPNVQVYVDDIYISHDDPREHLEQLEKVFSLLLNAGYVVSLKKSEIAQHEVEFLGFNITKEGRGLTETFKQKLLNITPPRDLKQLQSILGLLNFARNFIPNFSELVKPLYNIIATANGKYITWTTDNSQQLQNIISMLNSAENLEERNPEVRLIMKVNTSPSAGYIRFYNEFAKRPIMYLNYVYTKAEVKFTNTEKLLTTIHKGLIKALDLGMGQEILVYSPIVSMTKIQKTPLPERKALPIRWITWMSYLEDPRIQFHYDKTLPELQQVPTVTDDIIAKIKHPSEFSMVFYTDGSAIKHPNVNKSHNAGMGIAQVQFKPEFTVINTWSIPLGDHTAQLAEVAAVEFACKKALKIDGPVLIVTDSFYVAESVNKELPYWQSNGFFNNKKKPLKHVSKWKSIADCIQLKPDIIIIHEKGHQPTASTFHTEGNNLADKLATQGSYVVNAGKRTADGSEFEKRTADGSEFESPKKKAKVE

SEQ ID NO: 529 - protein, 2082 aa, synthetic construct
MPAAKRVKLDGGDKKYSIGLDIGTNSVGWAVITDEYKVPSKKFKVLGNTDRHSIKKNLIGALLFDSGETAEATRLKRTARRRYTRRKNRICYLQEIFSNEMAKVDDSFFHRLEESFLVEEDKKHERHPIFGNIVDEVAYHEKYPTIYHLRKKLVDSTDKADLRLIYLALAHMIKFRGHFLIEGDLNPDNSDVDKLFIQLVQTYNQLFEENPINASGVDAKAILSARLSKSRRLENLIAQLPGEKKNGLFGNLIALSLGLTPNFKSNFDLAEDAKLQLSKDTYDDDLDNLLAQIGDQYADLFLAAKNLSDAILLSDILRVNTEITKAPLSASMIKRYDEHHQDLTLLKALVRQQLPEKYKEIFFDQSKNGYAGYIDGGASQEEFYKFIKPILEKMDGTEELLVKLNREDLLRKQRTFDNGSIPHQIHLGELHAILRRQEDFYPFLKDNREKIEKILTFRIPYYVGPLARGNSRFAWMTRKSEETITPWNFEEVVDKGASAQSFIERMTNFDKNLPNEKVLPKHSLLYEYFTVYNELTKVKYVTEGMRKPAFLSGEQKKAIVDLLFKTNRKVTVKQLKEDYFKKIECFDSVEISGVEDRFNASLGTYHDLLKIIKDKDFLDNEENEDILEDIVLTLTLFEDREMIEERLKTYAHLFDDKVMKQLKRRRYTGWGRLSRKLINGIRDKQSGKTILDFLKSDGFANRNFMQLIHDDSLTFKEDIQKAQVSGQGDSLHEHIANLAGSPAIKKGILQTVKVVDELVKVMGRHKPENIVIEMARENQTTQKGQKNSRERMKRIEEGIKELGSQILKEHPVENTQLQNEKLYLYYLQNGRDMYVDQELDINRLSDYDVDHIVPQSFLKDDSIDNKVLTRSDKARGKSDNVPSEEVVKKMKNYWRQLLNAKLITQRKFDNLTKAERGGLSELDKAGFIKRQLVETRQITKHVAQILDSRMNTKYDENDKLIREVKVITLKSKLVSDFRKDFQFYKVREINNYHHAHDAYLNAVVGTALIKKYPKLESEFVYGDYKVYDVRKMIAKSEQEIGKATAKYFFYSNIMNFFKTEITLANGEIRKRPLIETNGETGEIVWDKGRDFATVRKVLSMPQVNIVKKTEVQTGGFSKESILPKRNSDKLIARKKDWDPKKYGGFDSPTVAYSVLVVAKVEKGKSKKLKSVKELLGITIMERSSFEKNPIDFLEAKGYKEVKKDLIIKLPKYSLFELENGRKRMLASAGELQKGNELALPSKYVNFLYLASHYEKLKGSPEDNEQKQLFVEQHKHYLDEIIEQISEFSKRVILADANLDKVLSAYNKHRDKPIREQAENIIHLFTLTNLGAPAAFKYFDTTIDRKRYTSTKEVLDATLIHQSITGLYETRIDLSQLGGDGGGGGGGGGGIPWLMKKPLQLTTLVPLQEYEERLLKQTMLTGSYKEKLQSLFLKYDALWQHWENQVGHRRIKPHHIATGTVNPRPQKQYPINPKAKASIQTVINDLLKQGVLIQQNSIMNTPVYPVPKPDGKWRMVLDYREVNKTIPLIAAQNQHSAGILSSIFRGKYKTTLDLSNGFWAHSITPESYWLTAFTWLGQQYCWTRLPQGFLNSPALFTADVVDLLKEVPNVQVYVDDIYISHDDPREHLEQLEKVFSLLLNAGYVVSLKKSEIAQHEVEFLGFNITKEGRGLTETFKQKLLNITPPRDLKQLQSILGLLNFARNFIPNFSELVKPLYNIIATANGKYITWTTDNSQQLQNIISMLNSAENLEERNPEVRLIMKVNTSPSAGYIRFYNEFAKRPIMYLNYVYTKAEVKFTNTEKLLTTIHKGLIKALDLGMGQEILVYSPIVSMTKIQKTPLPERKALPIRWITWMSYLEDPRIQFHYDKTLPELQQVPTVTDDIIAKIKHPSEFSMVFYTDGSAIKHPNVNKSHNAGMGIAQVQFKPEFTVINTWSIPLGDHTAQLAEVAAVEFACKKALKIDGPVLIVTDSFYVAESVNKELPYWQSNGFFNNKKKPLKHVSKWKSIADCIQLKPDIIIIHEKGHQPTASTFHTEGNNLADKLATQGSYVVNAGKRTADGSEFEKRTADGSEFESPKKKAKVE

SEQ ID NO: 530 - protein, 2087 aa, synthetic construct
MPAAKRVKLDGGDKKYSIGLDIGTNSVGWAVITDEYKVPSKKFKVLGNTDRHSIKKNLIGALLFDSGETAEATRLKRTARRRYTRRKNRICYLQEIFSNEMAKVDDSFFHRLEESFLVEEDKKHERHPIFGNIVDEVAYHEKYPTIYHLRKKLVDSTDKADLRLIYLALAHMIKFRGHFLIEGDLNPDNSDVDKLFIQLVQTYNQLFEENPINASGVDAKAILSARLSKSRRLENLIAQLPGEKKNGLFGNLIALSLGLTPNFKSNFDLAEDAKLQLSKDTYDDDLDNLLAQIGDQYADLFLAAKNLSDAILLSDILRVNTEITKAPLSASMIKRYDEHHQDLTLLKALVRQQLPEKYKEIFFDQSKNGYAGYIDGGASQEEFYKFIKPILEKMDGTEELLVKLNREDLLRKQRTFDNGSIPHQIHLGELHAILRRQEDFYPFLKDNREKIEKILTFRIPYYVGPLARGNSRFAWMTRKSEETITPWNFEEVVDKGASAQSFIERMTNFDKNLPNEKVLPKHSLLYEYFTVYNELTKVKYVTEGMRKPAFLSGEQKKAIVDLLFKTNRKVTVKQLKEDYFKKIECFDSVEISGVEDRFNASLGTYHDLLKIIKDKDFLDNEENEDILEDIVLTLTLFEDREMIEERLKTYAHLFDDKVMKQLKRRRYTGWGRLSRKLINGIRDKQSGKTILDFLKSDGFANRNFMQLIHDDSLTFKEDIQKAQVSGQGDSLHEHIANLAGSPAIKKGILQTVKVVDELVKVMGRHKPENIVIEMARENQTTQKGQKNSRERMKRIEEGIKELGSQILKEHPVENTQLQNEKLYLYYLQNGRDMYVDQELDINRLSDYDVDHIVPQSFLKDDSIDNKVLTRSDKARGKSDNVPSEEVVKKMKNYWRQLLNAKLITQRKFDNLTKAERGGLSELDKAGFIKRQLVETRQITKHVAQILDSRMNTKYDENDKLIREVKVITLKSKLVSDFRKDFQFYKVREINNYHHAHDAYLNAVVGTALIKKYPKLESEFVYGDYKVYDVRKMIAKSEQEIGKATAKYFFYSNIMNFFKTEITLANGEIRKRPLIETNGETGEIVWDKGRDFATVRKVLSMPQVNIVKKTEVQTGGFSKESILPKRNSDKLIARKKDWDPKKYGGFDSPTVAYSVLVVAKVEKGKSKKLKSVKELLGITIMERSSFEKNPIDFLEAKGYKEVKKDLIIKLPKYSLFELENGRKRMLASAGELQKGNELALPSKYVNFLYLASHYEKLKGSPEDNEQKQLFVEQHKHYLDEIIEQISEFSKRVILADANLDKVLSAYNKHRDKPIREQAENIIHLFTLTNLGAPAAFKYFDTTIDRKRYTSTKEVLDATLIHQSITGLYETRIDLSQLGGDGGGSSGGGEAAAKGGIPWLMKKPLQLTTLVPLQEYEERLLKQTMLTGSYKEKLQSLFLKYDALWQHWENQVGHRRIKPHHIATGTVNPRPQKQYPINPKAKASIQTVINDLLKQGVLIQQNSIMNTPVYPVPKPDGKWRMVLDYREVNKTIPLIAAQNQHSAGILSSIFRGKYKTTLDLSNGFWAHSITPESYWLTAFTWLGQQYCWTRLPQGFLNSPALFTADVVDLLKEVPNVQVYVDDIYISHDDPREHLEQLEKVFSLLLNAGYVVSLKKSEIAQHEVEFLGFNITKEGRGLTETFKQKLLNITPPRDLKQLQSILGLLNFARNFIPNFSELVKPLYNIIATANGKYITWTTDNSQQLQNIISMLNSAENLEERNPEVRLIMKVNTSPSAGYIRFYNEFAKRPIMYLNYVYTKAEVKFTNTEKLLTTIHKGLIKALDLGMGQEILVYSPIVSMTKIQKTPLPERKALPIRWITWMSYLEDPRIQFHYDKTLPELQQVPTVTDDIIAKIKHPSEFSMVFYTDGSAIKHPNVNKSHNAGMGIAQVQFKPEFTVINTWSIPLGDHTAQLAEVAAVEFACKKALKIDGPVLIVTDSFYVAESVNKELPYWQSNGFFNNKKKPLKHVSKWKSIADCIQLKPDIIIIHEKGHQPTASTFHTEGNNLADKLATQGSYVVNAGKRTADGSEFEKRTADGSEFESPKKKAKVE

SEQ ID NO: 531 - protein, 2082 aa, synthetic construct
MPAAKRVKLDGGDKKYSIGLDIGTNSVGWAVITDEYKVPSKKFKVLGNTDRHSIKKNLIGALLFDSGETAEATRLKRTARRRYTRRKNRICYLQEIFSNEMAKVDDSFFHRLEESFLVEEDKKHERHPIFGNIVDEVAYHEKYPTIYHLRKKLVDSTDKADLRLIYLALAHMIKFRGHFLIEGDLNPDNSDVDKLFIQLVQTYNQLFEENPINASGVDAKAILSARLSKSRRLENLIAQLPGEKKNGLFGNLIALSLGLTPNFKSNFDLAEDAKLQLSKDTYDDDLDNLLAQIGDQYADLFLAAKNLSDAILLSDILRVNTEITKAPLSASMIKRYDEHHQDLTLLKALVRQQLPEKYKEIFFDQSKNGYAGYIDGGASQEEFYKFIKPILEKMDGTEELLVKLNREDLLRKQRTFDNGSIPHQIHLGELHAILRRQEDFYPFLKDNREKIEKILTFRIPYYVGPLARGNSRFAWMTRKSEETITPWNFEEVVDKGASAQSFIERMTNFDKNLPNEKVLPKHSLLYEYFTVYNELTKVKYVTEGMRKPAFLSGEQKKAIVDLLFKTNRKVTVKQLKEDYFKKIECFDSVEISGVEDRFNASLGTYHDLLKIIKDKDFLDNEENEDILEDIVLTLTLFEDREMIEERLKTYAHLFDDKVMKQLKRRRYTGWGRLSRKLINGIRDKQSGKTILDFLKSDGFANRNFMQLIHDDSLTFKEDIQKAQVSGQGDSLHEHIANLAGSPAIKKGILQTVKVVDELVKVMGRHKPENIVIEMARENQTTQKGQKNSRERMKRIEEGIKELGSQILKEHPVENTQLQNEKLYLYYLQNGRDMYVDQELDINRLSDYDVDHIVPQSFLKDDSIDNKVLTRSDKARGKSDNVPSEEVVKKMKNYWRQLLNAKLITQRKFDNLTKAERGGLSELDKAGFIKRQLVETRQITKHVAQILDSRMNTKYDENDKLIREVKVITLKSKLVSDFRKDFQFYKVREINNYHHAHDAYLNAVVGTALIKKYPKLESEFVYGDYKVYDVRKMIAKSEQEIGKATAKYFFYSNIMNFFKTEITLANGEIRKRPLIETNGETGEIVWDKGRDFATVRKVLSMPQVNIVKKTEVQTGGFSKESILPKRNSDKLIARKKDWDPKKYGGFDSPTVAYSVLVVAKVEKGKSKKLKSVKELLGITIMERSSFEKNPIDFLEAKGYKEVKKDLIIKLPKYSLFELENGRKRMLASAGELQKGNELALPSKYVNFLYLASHYEKLKGSPEDNEQKQLFVEQHKHYLDEIIEQISEFSKRVILADANLDKVLSAYNKHRDKPIREQAENIIHLFTLTNLGAPAAFKYFDTTIDRKRYTSTKEVLDATLIHQSITGLYETRIDLSQLGGDGGGGSGGSGGIPWLMKKPLQLTTLVPLQEYEERLLKQTMLTGSYKEKLQSLFLKYDALWQHWENQVGHRRIKPHHIATGTVNPRPQKQYPINPKAKASIQTVINDLLKQGVLIQQNSIMNTPVYPVPKPDGKWRMVLDYREVNKTIPLIAAQNQHSAGILSSIFRGKYKTTLDLSNGFWAHSITPESYWLTAFTWLGQQYCWTRLPQGFLNSPALFTADVVDLLKEVPNVQVYVDDIYISHDDPREHLEQLEKVFSLLLNAGYVVSLKKSEIAQHEVEFLGFNITKEGRGLTETFKQKLLNITPPRDLKQLQSILGLLNFARNFIPNFSELVKPLYNIIATANGKYITWTTDNSQQLQNIISMLNSAENLEERNPEVRLIMKVNTSPSAGYIRFYNEFAKRPIMYLNYVYTKAEVKFTNTEKLLTTIHKGLIKALDLGMGQEILVYSPIVSMTKIQKTPLPERKALPIRWITWMSYLEDPRIQFHYDKTLPELQQVPTVTDDIIAKIKHPSEFSMVFYTDGSAIKHPNVNKSHNAGMGIAQVQFKPEFTVINTWSIPLGDHTAQLAEVAAVEFACKKALKIDGPVLIVTDSFYVAESVNKELPYWQSNGFFNNKKKPLKHVSKWKSIADCIQLKPDIIIIHEKGHQPTASTFHTEGNNLADKLATQGSYVVNAGKRTADGSEFEKRTADGSEFESPKKKAKVE

SEQ ID NO: 532 - protein, 2085 aa, synthetic construct
MPAAKRVKLDGGDKKYSIGLDIGTNSVGWAVITDEYKVPSKKFKVLGNTDRHSIKKNLIGALLFDSGETAEATRLKRTARRRYTRRKNRICYLQEIFSNEMAKVDDSFFHRLEESFLVEEDKKHERHPIFGNIVDEVAYHEKYPTIYHLRKKLVDSTDKADLRLIYLALAHMIKFRGHFLIEGDLNPDNSDVDKLFIQLVQTYNQLFEENPINASGVDAKAILSARLSKSRRLENLIAQLPGEKKNGLFGNLIALSLGLTPNFKSNFDLAEDAKLQLSKDTYDDDLDNLLAQIGDQYADLFLAAKNLSDAILLSDILRVNTEITKAPLSASMIKRYDEHHQDLTLLKALVRQQLPEKYKEIFFDQSKNGYAGYIDGGASQEEFYKFIKPILEKMDGTEELLVKLNREDLLRKQRTFDNGSIPHQIHLGELHAILRRQEDFYPFLKDNREKIEKILTFRIPYYVGPLARGNSRFAWMTRKSEETITPWNFEEVVDKGASAQSFIERMTNFDKNLPNEKVLPKHSLLYEYFTVYNELTKVKYVTEGMRKPAFLSGEQKKAIVDLLFKTNRKVTVKQLKEDYFKKIECFDSVEISGVEDRFNASLGTYHDLLKIIKDKDFLDNEENEDILEDIVLTLTLFEDREMIEERLKTYAHLFDDKVMKQLKRRRYTGWGRLSRKLINGIRDKQSGKTILDFLKSDGFANRNFMQLIHDDSLTFKEDIQKAQVSGQGDSLHEHIANLAGSPAIKKGILQTVKVVDELVKVMGRHKPENIVIEMARENQTTQKGQKNSRERMKRIEEGIKELGSQILKEHPVENTQLQNEKLYLYYLQNGRDMYVDQELDINRLSDYDVDHIVPQSFLKDDSIDNKVLTRSDKARGKSDNVPSEEVVKKMKNYWRQLLNAKLITQRKFDNLTKAERGGLSELDKAGFIKRQLVETRQITKHVAQILDSRMNTKYDENDKLIREVKVITLKSKLVSDFRKDFQFYKVREINNYHHAHDAYLNAVVGTALIKKYPKLESEFVYGDYKVYDVRKMIAKSEQEIGKATAKYFFYSNIMNFFKTEITLANGEIRKRPLIETNGETGEIVWDKGRDFATVRKVLSMPQVNIVKKTEVQTGGFSKESILPKRNSDKLIARKKDWDPKKYGGFDSPTVAYSVLVVAKVEKGKSKKLKSVKELLGITIMERSSFEKNPIDFLEAKGYKEVKKDLIIKLPKYSLFELENGRKRMLASAGELQKGNELALPSKYVNFLYLASHYEKLKGSPEDNEQKQLFVEQHKHYLDEIIEQISEFSKRVILADANLDKVLSAYNKHRDKPIREQAENIIHLFTLTNLGAPAAFKYFDTTIDRKRYTSTKEVLDATLIHQSITGLYETRIDLSQLGGDGGPAPGGGGGSGGIPWLMKKPLQLTTLVPLQEYEERLLKQTMLTGSYKEKLQSLFLKYDALWQHWENQVGHRRIKPHHIATGTVNPRPQKQYPINPKAKASIQTVINDLLKQGVLIQQNSIMNTPVYPVPKPDGKWRMVLDYREVNKTIPLIAAQNQHSAGILSSIFRGKYKTTLDLSNGFWAHSITPESYWLTAFTWLGQQYCWTRLPQGFLNSPALFTADVVDLLKEVPNVQVYVDDIYISHDDPREHLEQLEKVFSLLLNAGYVVSLKKSEIAQHEVEFLGFNITKEGRGLTETFKQKLLNITPPRDLKQLQSILGLLNFARNFIPNFSELVKPLYNIIATANGKYITWTTDNSQQLQNIISMLNSAENLEERNPEVRLIMKVNTSPSAGYIRFYNEFAKRPIMYLNYVYTKAEVKFTNTEKLLTTIHKGLIKALDLGMGQEILVYSPIVSMTKIQKTPLPERKALPIRWITWMSYLEDPRIQFHYDKTLPELQQVPTVTDDIIAKIKHPSEFSMVFYTDGSAIKHPNVNKSHNAGMGIAQVQFKPEFTVINTWSIPLGDHTAQLAEVAAVEFACKKALKIDGPVLIVTDSFYVAESVNKELPYWQSNGFFNNKKKPLKHVSKWKSIADCIQLKPDIIIIHEKGHQPTASTFHTEGNNLADKLATQGSYVVNAGKRTADGSEFEKRTADGSEFESPKKKAKVE

SEQ ID NO: 533 - protein, 2087 aa, synthetic construct
MPAAKRVKLDGGDKKYSIGLDIGTNSVGWAVITDEYKVPSKKFKVLGNTDRHSIKKNLIGALLFDSGETAEATRLKRTARRRYTRRKNRICYLQEIFSNEMAKVDDSFFHRLEESFLVEEDKKHERHPIFGNIVDEVAYHEKYPTIYHLRKKLVDSTDKADLRLIYLALAHMIKFRGHFLIEGDLNPDNSDVDKLFIQLVQTYNQLFEENPINASGVDAKAILSARLSKSRRLENLIAQLPGEKKNGLFGNLIALSLGLTPNFKSNFDLAEDAKLQLSKDTYDDDLDNLLAQIGDQYADLFLAAKNLSDAILLSDILRVNTEITKAPLSASMIKRYDEHHQDLTLLKALVRQQLPEKYKEIFFDQSKNGYAGYIDGGASQEEFYKFIKPILEKMDGTEELLVKLNREDLLRKQRTFDNGSIPHQIHLGELHAILRRQEDFYPFLKDNREKIEKILTFRIPYYVGPLARGNSRFAWMTRKSEETITPWNFEEVVDKGASAQSFIERMTNFDKNLPNEKVLPKHSLLYEYFTVYNELTKVKYVTEGMRKPAFLSGEQKKAIVDLLFKTNRKVTVKQLKEDYFKKIECFDSVEISGVEDRFNASLGTYHDLLKIIKDKDFLDNEENEDILEDIVLTLTLFEDREMIEERLKTYAHLFDDKVMKQLKRRRYTGWGRLSRKLINGIRDKQSGKTILDFLKSDGFANRNFMQLIHDDSLTFKEDIQKAQVSGQGDSLHEHIANLAGSPAIKKGILQTVKVVDELVKVMGRHKPENIVIEMARENQTTQKGQKNSRERMKRIEEGIKELGSQILKEHPVENTQLQNEKLYLYYLQNGRDMYVDQELDINRLSDYDVDHIVPQSFLKDDSIDNKVLTRSDKARGKSDNVPSEEVVKKMKNYWRQLLNAKLITQRKFDNLTKAERGGLSELDKAGFIKRQLVETRQITKHVAQILDSRMNTKYDENDKLIREVKVITLKSKLVSDFRKDFQFYKVREINNYHHAHDAYLNAVVGTALIKKYPKLESEFVYGDYKVYDVRKMIAKSEQEIGKATAKYFFYSNIMNFFKTEITLANGEIRKRPLIETNGETGEIVWDKGRDFATVRKVLSMPQVNIVKKTEVQTGGFSKESILPKRNSDKLIARKKDWDPKKYGGFDSPTVAYSVLVVAKVEKGKSKKLKSVKELLGITIMERSSFEKNPIDFLEAKGYKEVKKDLIIKLPKYSLFELENGRKRMLASAGELQKGNELALPSKYVNFLYLASHYEKLKGSPEDNEQKQLFVEQHKHYLDEIIEQISEFSKRVILADANLDKVLSAYNKHRDKPIREQAENIIHLFTLTNLGAPAAFKYFDTTIDRKRYTSTKEVLDATLIHQSITGLYETRIDLSQLGGDGGGGSGGGEAAAKGGIPWLMKKPLQLTTLVPLQEYEERLLKQTMLTGSYKEKLQSLFLKYDALWQHWENQVGHRRIKPHHIATGTVNPRPQKQYPINPKAKASIQTVINDLLKQGVLIQQNSIMNTPVYPVPKPDGKWRMVLDYREVNKTIPLIAAQNQHSAGILSSIFRGKYKTTLDLSNGFWAHSITPESYWLTAFTWLGQQYCWTRLPQGFLNSPALFTADVVDLLKEVPNVQVYVDDIYISHDDPREHLEQLEKVFSLLLNAGYVVSLKKSEIAQHEVEFLGFNITKEGRGLTETFKQKLLNITPPRDLKQLQSILGLLNFARNFIPNFSELVKPLYNIIATANGKYITWTTDNSQQLQNIISMLNSAENLEERNPEVRLIMKVNTSPSAGYIRFYNEFAKRPIMYLNYVYTKAEVKFTNTEKLLTTIHKGLIKALDLGMGQEILVYSPIVSMTKIQKTPLPERKALPIRWITWMSYLEDPRIQFHYDKTLPELQQVPTVTDDIIAKIKHPSEFSMVFYTDGSAIKHPNVNKSHNAGMGIAQVQFKPEFTVINTWSIPLGDHTAQLAEVAAVEFACKKALKIDGPVLIVTDSFYVAESVNKELPYWQSNGFFNNKKKPLKHVSKWKSIADCIQLKPDIIIIHEKGHQPTASTFHTEGNNLADKLATQGSYVVNAGKRTADGSEFEKRTADGSEFESPKKKAKVE

SEQ ID NO: 534 - protein, 2079 aa, synthetic construct
MPAAKRVKLDGGDKKYSIGLDIGTNSVGWAVITDEYKVPSKKFKVLGNTDRHSIKKNLIGALLFDSGETAEATRLKRTARRRYTRRKNRICYLQEIFSNEMAKVDDSFFHRLEESFLVEEDKKHERHPIFGNIVDEVAYHEKYPTIYHLRKKLVDSTDKADLRLIYLALAHMIKFRGHFLIEGDLNPDNSDVDKLFIQLVQTYNQLFEENPINASGVDAKAILSARLSKSRRLENLIAQLPGEKKNGLFGNLIALSLGLTPNFKSNFDLAEDAKLQLSKDTYDDDLDNLLAQIGDQYADLFLAAKNLSDAILLSDILRVNTEITKAPLSASMIKRYDEHHQDLTLLKALVRQQLPEKYKEIFFDQSKNGYAGYIDGGASQEEFYKFIKPILEKMDGTEELLVKLNREDLLRKQRTFDNGSIPHQIHLGELHAILRRQEDFYPFLKDNREKIEKILTFRIPYYVGPLARGNSRFAWMTRKSEETITPWNFEEVVDKGASAQSFIERMTNFDKNLPNEKVLPKHSLLYEYFTVYNELTKVKYVTEGMRKPAFLSGEQKKAIVDLLFKTNRKVTVKQLKEDYFKKIECFDSVEISGVEDRFNASLGTYHDLLKIIKDKDFLDNEENEDILEDIVLTLTLFEDREMIEERLKTYAHLFDDKVMKQLKRRRYTGWGRLSRKLINGIRDKQSGKTILDFLKSDGFANRNFMQLIHDDSLTFKEDIQKAQVSGQGDSLHEHIANLAGSPAIKKGILQTVKVVDELVKVMGRHKPENIVIEMARENQTTQKGQKNSRERMKRIEEGIKELGSQILKEHPVENTQLQNEKLYLYYLQNGRDMYVDQELDINRLSDYDVDHIVPQSFLKDDSIDNKVLTRSDKARGKSDNVPSEEVVKKMKNYWRQLLNAKLITQRKFDNLTKAERGGLSELDKAGFIKRQLVETRQITKHVAQILDSRMNTKYDENDKLIREVKVITLKSKLVSDFRKDFQFYKVREINNYHHAHDAYLNAVVGTALIKKYPKLESEFVYGDYKVYDVRKMIAKSEQEIGKATAKYFFYSNIMNFFKTEITLANGEIRKRPLIETNGETGEIVWDKGRDFATVRKVLSMPQVNIVKKTEVQTGGFSKESILPKRNSDKLIARKKDWDPKKYGGFDSPTVAYSVLVVAKVEKGKSKKLKSVKELLGITIMERSSFEKNPIDFLEAKGYKEVKKDLIIKLPKYSLFELENGRKRMLASAGELQKGNELALPSKYVNFLYLASHYEKLKGSPEDNEQKQLFVEQHKHYLDEIIEQISEFSKRVILADANLDKVLSAYNKHRDKPIREQAENIIHLFTLTNLGAPAAFKYFDTTIDRKRYTSTKEVLDATLIHQSITGLYETRIDLSQLGGDGGGSSGGIPWLMKKPLQLTTLVPLQEYEERLLKQTMLTGSYKEKLQSLFLKYDALWQHWENQVGHRRIKPHHIATGTVNPRPQKQYPINPKAKASIQTVINDLLKQGVLIQQNSIMNTPVYPVPKPDGKWRMVLDYREVNKTIPLIAAQNQHSAGILSSIFRGKYKTTLDLSNGFWAHSITPESYWLTAFTWLGQQYCWTRLPQGFLNSPALFNADVVDLLKEVPNVQVYVDDIYISHDDPREHLEQLEKVFSLLLNAGYVVSLKKSEIAQHEVEFLGFNITKEGRGLTETFKQKLLNITPPRDLKQLQSILGLLNFARNFIPNFSELVKPLYNIIATAPGKYITWTTDNSQQLQNIISMLNSAENLEERNPEVRLIMKVNTSPSAGYIRFYNEFAKRPIMYLNYVYTKAEVKFTNTEKLLTTIHKGLIKALDLGMGQEILVYSPIVSMTKIQKTPLPERKALPIRWITWMSYLEDPRIQFHYDKTLPELQQVPTVTDDIIAKIKHPSEFSMVFYTDGSAIKHPNVNKSHNAGMGIAQVQFKPEFTVINTWSIPLGDHTAQLAEVAAVEFACKKALKIDGPVLIVTDSFYVAESVNKELPYWQSNGFFNNKKKPLKHVSKWKSIADCIQLKPDIIIIHEKGHQPTASTFHTEGNNLADKLATQGSYVVNAGKRTADGSEFEKRTADGSEFESPKKKAKVE

SEQ ID NO: 535 - protein, 2082 aa, synthetic construct
MPAAKRVKLDGGDKKYSIGLDIGTNSVGWAVITDEYKVPSKKFKVLGNTDRHSIKKNLIGALLFDSGETAEATRLKRTARRRYTRRKNRICYLQEIFSNEMAKVDDSFFHRLEESFLVEEDKKHERHPIFGNIVDEVAYHEKYPTIYHLRKKLVDSTDKADLRLIYLALAHMIKFRGHFLIEGDLNPDNSDVDKLFIQLVQTYNQLFEENPINASGVDAKAILSARLSKSRRLENLIAQLPGEKKNGLFGNLIALSLGLTPNFKSNFDLAEDAKLQLSKDTYDDDLDNLLAQIGDQYADLFLAAKNLSDAILLSDILRVNTEITKAPLSASMIKRYDEHHQDLTLLKALVRQQLPEKYKEIFFDQSKNGYAGYIDGGASQEEFYKFIKPILEKMDGTEELLVKLNREDLLRKQRTFDNGSIPHQIHLGELHAILRRQEDFYPFLKDNREKIEKILTFRIPYYVGPLARGNSRFAWMTRKSEETITPWNFEEVVDKGASAQSFIERMTNFDKNLPNEKVLPKHSLLYEYFTVYNELTKVKYVTEGMRKPAFLSGEQKKAIVDLLFKTNRKVTVKQLKEDYFKKIECFDSVEISGVEDRFNASLGTYHDLLKIIKDKDFLDNEENEDILEDIVLTLTLFEDREMIEERLKTYAHLFDDKVMKQLKRRRYTGWGRLSRKLINGIRDKQSGKTILDFLKSDGFANRNFMQLIHDDSLTFKEDIQKAQVSGQGDSLHEHIANLAGSPAIKKGILQTVKVVDELVKVMGRHKPENIVIEMARENQTTQKGQKNSRERMKRIEEGIKELGSQILKEHPVENTQLQNEKLYLYYLQNGRDMYVDQELDINRLSDYDVDHIVPQSFLKDDSIDNKVLTRSDKARGKSDNVPSEEVVKKMKNYWRQLLNAKLITQRKFDNLTKAERGGLSELDKAGFIKRQLVETRQITKHVAQILDSRMNTKYDENDKLIREVKVITLKSKLVSDFRKDFQFYKVREINNYHHAHDAYLNAVVGTALIKKYPKLESEFVYGDYKVYDVRKMIAKSEQEIGKATAKYFFYSNIMNFFKTEITLANGEIRKRPLIETNGETGEIVWDKGRDFATVRKVLSMPQVNIVKKTEVQTGGFSKESILPKRNSDKLIARKKDWDPKKYGGFDSPTVAYSVLVVAKVEKGKSKKLKSVKELLGITIMERSSFEKNPIDFLEAKGYKEVKKDLIIKLPKYSLFELENGRKRMLASAGELQKGNELALPSKYVNFLYLASHYEKLKGSPEDNEQKQLFVEQHKHYLDEIIEQISEFSKRVILADANLDKVLSAYNKHRDKPIREQAENIIHLFTLTNLGAPAAFKYFDTTIDRKRYTSTKEVLDATLIHQSITGLYETRIDLSQLGGDGGPAPGSSGGIPWLMKKPLQLTTLVPLQEYEERLLKQTMLTGSYKEKLQSLFLKYDALWQHWENQVGHRRIKPHHIATGTVNPRPQKQYPINPKAKASIQTVINDLLKQGVLIQQNSIMNTPVYPVPKPDGKWRMVLDYREVNKTIPLIAAQNQHSAGILSSIFRGKYKTTLDLSNGFWAHSITPESYWLTAFTWLGQQYCWTRLPQGFLNSPALFNADVVDLLKEVPNVQVYVDDIYISHDDPREHLEQLEKVFSLLLNAGYVVSLKKSEIAQHEVEFLGFNITKEGRGLTETFKQKLLNITPPRDLKQLQSILGLLNFARNFIPNFSELVKPLYNIIATAPGKYITWTTDNSQQLQNIISMLNSAENLEERNPEVRLIMKVNTSPSAGYIRFYNEFAKRPIMYLNYVYTKAEVKFTNTEKLLTTIHKGLIKALDLGMGQEILVYSPIVSMTKIQKTPLPERKALPIRWITWMSYLEDPRIQFHYDKTLPELQQVPTVTDDIIAKIKHPSEFSMVFYTDGSAIKHPNVNKSHNAGMGIAQVQFKPEFTVINTWSIPLGDHTAQLAEVAAVEFACKKALKIDGPVLIVTDSFYVAESVNKELPYWQSNGFFNNKKKPLKHVSKWKSIADCIQLKPDIIIIHEKGHQPTASTFHTEGNNLADKLATQGSYVVNAGKRTADGSEFEKRTADGSEFESPKKKAKVE

SEQ ID NO: 536 - protein, 2087 aa, synthetic construct
MPAAKRVKLDGGDKKYSIGLDIGTNSVGWAVITDEYKVPSKKFKVLGNTDRHSIKKNLIGALLFDSGETAEATRLKRTARRRYTRRKNRICYLQEIFSNEMAKVDDSFFHRLEESFLVEEDKKHERHPIFGNIVDEVAYHEKYPTIYHLRKKLVDSTDKADLRLIYLALAHMIKFRGHFLIEGDLNPDNSDVDKLFIQLVQTYNQLFEENPINASGVDAKAILSARLSKSRRLENLIAQLPGEKKNGLFGNLIALSLGLTPNFKSNFDLAEDAKLQLSKDTYDDDLDNLLAQIGDQYADLFLAAKNLSDAILLSDILRVNTEITKAPLSASMIKRYDEHHQDLTLLKALVRQQLPEKYKEIFFDQSKNGYAGYIDGGASQEEFYKFIKPILEKMDGTEELLVKLNREDLLRKQRTFDNGSIPHQIHLGELHAILRRQEDFYPFLKDNREKIEKILTFRIPYYVGPLARGNSRFAWMTRKSEETITPWNFEEVVDKGASAQSFIERMTNFDKNLPNEKVLPKHSLLYEYFTVYNELTKVKYVTEGMRKPAFLSGEQKKAIVDLLFKTNRKVTVKQLKEDYFKKIECFDSVEISGVEDRFNASLGTYHDLLKIIKDKDFLDNEENEDILEDIVLTLTLFEDREMIEERLKTYAHLFDDKVMKQLKRRRYTGWGRLSRKLINGIRDKQSGKTILDFLKSDGFANRNFMQLIHDDSLTFKEDIQKAQVSGQGDSLHEHIANLAGSPAIKKGILQTVKVVDELVKVMGRHKPENIVIEMARENQTTQKGQKNSRERMKRIEEGIKELGSQILKEHPVENTQLQNEKLYLYYLQNGRDMYVDQELDINRLSDYDVDHIVPQSFLKDDSIDNKVLTRSDKARGKSDNVPSEEVVKKMKNYWRQLLNAKLITQRKFDNLTKAERGGLSELDKAGFIKRQLVETRQITKHVAQILDSRMNTKYDENDKLIREVKVITLKSKLVSDFRKDFQFYKVREINNYHHAHDAYLNAVVGTALIKKYPKLESEFVYGDYKVYDVRKMIAKSEQEIGKATAKYFFYSNIMNFFKTEITLANGEIRKRPLIETNGETGEIVWDKGRDFATVRKVLSMPQVNIVKKTEVQTGGFSKESILPKRNSDKLIARKKDWDPKKYGGFDSPTVAYSVLVVAKVEKGKSKKLKSVKELLGITIMERSSFEKNPIDFLEAKGYKEVKKDLIIKLPKYSLFELENGRKRMLASAGELQKGNELALPSKYVNFLYLASHYEKLKGSPEDNEQKQLFVEQHKHYLDEIIEQISEFSKRVILADANLDKVLSAYNKHRDKPIREQAENIIHLFTLTNLGAPAAFKYFDTTIDRKRYTSTKEVLDATLIHQSITGLYETRIDLSQLGGDGGGSSGGSEAAAKGGIPWLMKKPLQLTTLVPLQEYEERLLKQTMLTGSYKEKLQSLFLKYDALWQHWENQVGHRRIKPHHIATGTVNPRPQKQYPINPKAKASIQTVINDLLKQGVLIQQNSIMNTPVYPVPKPDGKWRMVLDYREVNKTIPLIAAQNQHSAGILSSIFRGKYKTTLDLSNGFWAHSITPESYWLTAFTWLGQQYCWTRLPQGFLNSPALFNADVVDLLKEVPNVQVYVDDIYISHDDPREHLEQLEKVFSLLLNAGYVVSLKKSEIAQHEVEFLGFNITKEGRGLTETFKQKLLNITPPRDLKQLQSILGLLNFARNFIPNFSELVKPLYNIIATAPGKYITWTTDNSQQLQNIISMLNSAENLEERNPEVRLIMKVNTSPSAGYIRFYNEFAKRPIMYLNYVYTKAEVKFTNTEKLLTTIHKGLIKALDLGMGQEILVYSPIVSMTKIQKTPLPERKALPIRWITWMSYLEDPRIQFHYDKTLPELQQVPTVTDDIIAKIKHPSEFSMVFYTDGSAIKHPNVNKSHNAGMGIAQVQFKPEFTVINTWSIPLGDHTAQLAEVAAVEFACKKALKIDGPVLIVTDSFYVAESVNKELPYWQSNGFFNNKKKPLKHVSKWKSIADCIQLKPDIIIIHEKGHQPTASTFHTEGNNLADKLATQGSYVVNAGKRTADGSEFEKRTADGSEFESPKKKAKVE

SEQ ID NO: 537 - protein, 2087 aa, synthetic construct
MPAAKRVKLDGGDKKYSIGLDIGTNSVGWAVITDEYKVPSKKFKVLGNTDRHSIKKNLIGALLFDSGETAEATRLKRTARRRYTRRKNRICYLQEIFSNEMAKVDDSFFHRLEESFLVEEDKKHERHPIFGNIVDEVAYHEKYPTIYHLRKKLVDSTDKADLRLIYLALAHMIKFRGHFLIEGDLNPDNSDVDKLFIQLVQTYNQLFEENPINASGVDAKAILSARLSKSRRLENLIAQLPGEKKNGLFGNLIALSLGLTPNFKSNFDLAEDAKLQLSKDTYDDDLDNLLAQIGDQYADLFLAAKNLSDAILLSDILRVNTEITKAPLSASMIKRYDEHHQDLTLLKALVRQQLPEKYKEIFFDQSKNGYAGYIDGGASQEEFYKFIKPILEKMDGTEELLVKLNREDLLRKQRTFDNGSIPHQIHLGELHAILRRQEDFYPFLKDNREKIEKILTFRIPYYVGPLARGNSRFAWMTRKSEETITPWNFEEVVDKGASAQSFIERMTNFDKNLPNEKVLPKHSLLYEYFTVYNELTKVKYVTEGMRKPAFLSGEQKKAIVDLLFKTNRKVTVKQLKEDYFKKIECFDSVEISGVEDRFNASLGTYHDLLKIIKDKDFLDNEENEDILEDIVLTLTLFEDREMIEERLKTYAHLFDDKVMKQLKRRRYTGWGRLSRKLINGIRDKQSGKTILDFLKSDGFANRNFMQLIHDDSLTFKEDIQKAQVSGQGDSLHEHIANLAGSPAIKKGILQTVKVVDELVKVMGRHKPENIVIEMARENQTTQKGQKNSRERMKRIEEGIKELGSQILKEHPVENTQLQNEKLYLYYLQNGRDMYVDQELDINRLSDYDVDHIVPQSFLKDDSIDNKVLTRSDKARGKSDNVPSEEVVKKMKNYWRQLLNAKLITQRKFDNLTKAERGGLSELDKAGFIKRQLVETRQITKHVAQILDSRMNTKYDENDKLIREVKVITLKSKLVSDFRKDFQFYKVREINNYHHAHDAYLNAVVGTALIKKYPKLESEFVYGDYKVYDVRKMIAKSEQEIGKATAKYFFYSNIMNFFKTEITLANGEIRKRPLIETNGETGEIVWDKGRDFATVRKVLSMPQVNIVKKTEVQTGGFSKESILPKRNSDKLIARKKDWDPKKYGGFDSPTVAYSVLVVAKVEKGKSKKLKSVKELLGITIMERSSFEKNPIDFLEAKGYKEVKKDLIIKLPKYSLFELENGRKRMLASAGELQKGNELALPSKYVNFLYLASHYEKLKGSPEDNEQKQLFVEQHKHYLDEIIEQISEFSKRVILADANLDKVLSAYNKHRDKPIREQAENIIHLFTLTNLGAPAAFKYFDTTIDRKRYTSTKEVLDATLIHQSITGLYETRIDLSQLGGDGGGSSPAPEAAAKGGIPWLMKKPLQLTTLVPLQEYEERLLKQTMLTGSYKEKLQSLFLKYDALWQHWENQVGHRRIKPHHIATGTVNPRPQKQYPINPKAKASIQTVINDLLKQGVLIQQNSIMNTPVYPVPKPDGKWRMVLDYREVNKTIPLIAAQNQHSAGILSSIFRGKYKTTLDLSNGFWAHSITPESYWLTAFTWLGQQYCWTRLPQGFLNSPALFNADVVDLLKEVPNVQVYVDDIYISHDDPREHLEQLEKVFSLLLNAGYVVSLKKSEIAQHEVEFLGFNITKEGRGLTETFKQKLLNITPPRDLKQLQSILGLLNFARNFIPNFSELVKPLYNIIATAPGKYITWTTDNSQQLQNIISMLNSAENLEERNPEVRLIMKVNTSPSAGYIRFYNEFAKRPIMYLNYVYTKAEVKFTNTEKLLTTIHKGLIKALDLGMGQEILVYSPIVSMTKIQKTPLPERKALPIRWITWMSYLEDPRIQFHYDKTLPELQQVPTVTDDIIAKIKHPSEFSMVFYTDGSAIKHPNVNKSHNAGMGIAQVQFKPEFTVINTWSIPLGDHTAQLAEVAAVEFACKKALKIDGPVLIVTDSFYVAESVNKELPYWQSNGFFNNKKKPLKHVSKWKSIADCIQLKPDIIIIHEKGHQPTASTFHTEGNNLADKLATQGSYVVNAGKRTADGSEFEKRTADGSEFESPKKKAKVE

SEQ ID NO: 538 - protein, 2087 aa, synthetic construct
MPAAKRVKLDGGDKKYSIGLDIGTNSVGWAVITDEYKVPSKKFKVLGNTDRHSIKKNLIGALLFDSGETAEATRLKRTARRRYTRRKNRICYLQEIFSNEMAKVDDSFFHRLEESFLVEEDKKHERHPIFGNIVDEVAYHEKYPTIYHLRKKLVDSTDKADLRLIYLALAHMIKFRGHFLIEGDLNPDNSDVDKLFIQLVQTYNQLFEENPINASGVDAKAILSARLSKSRRLENLIAQLPGEKKNGLFGNLIALSLGLTPNFKSNFDLAEDAKLQLSKDTYDDDLDNLLAQIGDQYADLFLAAKNLSDAILLSDILRVNTEITKAPLSASMIKRYDEHHQDLTLLKALVRQQLPEKYKEIFFDQSKNGYAGYIDGGASQEEFYKFIKPILEKMDGTEELLVKLNREDLLRKQRTFDNGSIPHQIHLGELHAILRRQEDFYPFLKDNREKIEKILTFRIPYYVGPLARGNSRFAWMTRKSEETITPWNFEEVVDKGASAQSFIERMTNFDKNLPNEKVLPKHSLLYEYFTVYNELTKVKYVTEGMRKPAFLSGEQKKAIVDLLFKTNRKVTVKQLKEDYFKKIECFDSVEISGVEDRFNASLGTYHDLLKIIKDKDFLDNEENEDILEDIVLTLTLFEDREMIEERLKTYAHLFDDKVMKQLKRRRYTGWGRLSRKLINGIRDKQSGKTILDFLKSDGFANRNFMQLIHDDSLTFKEDIQKAQVSGQGDSLHEHIANLAGSPAIKKGILQTVKVVDELVKVMGRHKPENIVIEMARENQTTQKGQKNSRERMKRIEEGIKELGSQILKEHPVENTQLQNEKLYLYYLQNGRDMYVDQELDINRLSDYDVDHIVPQSFLKDDSIDNKVLTRSDKARGKSDNVPSEEVVKKMKNYWRQLLNAKLITQRKFDNLTKAERGGLSELDKAGFIKRQLVETRQITKHVAQILDSRMNTKYDENDKLIREVKVITLKSKLVSDFRKDFQFYKVREINNYHHAHDAYLNAVVGTALIKKYPKLESEFVYGDYKVYDVRKMIAKSEQEIGKATAKYFFYSNIMNFFKTEITLANGEIRKRPLIETNGETGEIVWDKGRDFATVRKVLSMPQVNIVKKTEVQTGGFSKESILPKRNSDKLIARKKDWDPKKYGGFDSPTVAYSVLVVAKVEKGKSKKLKSVKELLGITIMERSSFEKNPIDFLEAKGYKEVKKDLIIKLPKYSLFELENGRKRMLASAGELQKGNELALPSKYVNFLYLASHYEKLKGSPEDNEQKQLFVEQHKHYLDEIIEQISEFSKRVILADANLDKVLSAYNKHRDKPIREQAENIIHLFTLTNLGAPAAFKYFDTTIDRKRYTSTKEVLDATLIHQSITGLYETRIDLSQLGGDGGPAPEAAAKGGSGGIPWLMKKPLQLTTLVPLQEYEERLLKQTMLTGSYKEKLQSLFLKYDALWQHWENQVGHRRIKPHHIATGTVNPRPQKQYPINPKAKASIQTVINDLLKQGVLIQQNSIMNTPVYPVPKPDGKWRMVLDYREVNKTIPLIAAQNQHSAGILSSIFRGKYKTTLDLSNGFWAHSITPESYWLTAFTWLGQQYCWTRLPQGFLNSPALFNADVVDLLKEVPNVQVYVDDIYISHDDPREHLEQLEKVFSLLLNAGYVVSLKKSEIAQHEVEFLGFNITKEGRGLTETFKQKLLNITPPRDLKQLQSILGLLNFARNFIPNFSELVKPLYNIIATAPGKYITWTTDNSQQLQNIISMLNSAENLEERNPEVRLIMKVNTSPSAGYIRFYNEFAKRPIMYLNYVYTKAEVKFTNTEKLLTTIHKGLIKALDLGMGQEILVYSPIVSMTKIQKTPLPERKALPIRWITWMSYLEDPRIQFHYDKTLPELQQVPTVTDDIIAKIKHPSEFSMVFYTDGSAIKHPNVNKSHNAGMGIAQVQFKPEFTVINTWSIPLGDHTAQLAEVAAVEFACKKALKIDGPVLIVTDSFYVAESVNKELPYWQSNGFFNNKKKPLKHVSKWKSIADCIQLKPDIIIIHEKGHQPTASTFHTEGNNLADKLATQGSYVVNAGKRTADGSEFEKRTADGSEFESPKKKAKVE

SEQ ID NO: 539 - protein, 2096 aa, synthetic construct
MPAAKRVKLDGGDKKYSIGLDIGTNSVGWAVITDEYKVPSKKFKVLGNTDRHSIKKNLIGALLFDSGETAEATRLKRTARRRYTRRKNRICYLQEIFSNEMAKVDDSFFHRLEESFLVEEDKKHERHPIFGNIVDEVAYHEKYPTIYHLRKKLVDSTDKADLRLIYLALAHMIKFRGHFLIEGDLNPDNSDVDKLFIQLVQTYNQLFEENPINASGVDAKAILSARLSKSRRLENLIAQLPGEKKNGLFGNLIALSLGLTPNFKSNFDLAEDAKLQLSKDTYDDDLDNLLAQIGDQYADLFLAAKNLSDAILLSDILRVNTEITKAPLSASMIKRYDEHHQDLTLLKALVRQQLPEKYKEIFFDQSKNGYAGYIDGGASQEEFYKFIKPILEKMDGTEELLVKLNREDLLRKQRTFDNGSIPHQIHLGELHAILRRQEDFYPFLKDNREKIEKILTFRIPYYVGPLARGNSRFAWMTRKSEETITPWNFEEVVDKGASAQSFIERMTNFDKNLPNEKVLPKHSLLYEYFTVYNELTKVKYVTEGMRKPAFLSGEQKKAIVDLLFKTNRKVTVKQLKEDYFKKIECFDSVEISGVEDRFNASLGTYHDLLKIIKDKDFLDNEENEDILEDIVLTLTLFEDREMIEERLKTYAHLFDDKVMKQLKRRRYTGWGRLSRKLINGIRDKQSGKTILDFLKSDGFANRNFMQLIHDDSLTFKEDIQKAQVSGQGDSLHEHIANLAGSPAIKKGILQTVKVVDELVKVMGRHKPENIVIEMARENQTTQKGQKNSRERMKRIEEGIKELGSQILKEHPVENTQLQNEKLYLYYLQNGRDMYVDQELDINRLSDYDVDHIVPQSFLKDDSIDNKVLTRSDKARGKSDNVPSEEVVKKMKNYWRQLLNAKLITQRKFDNLTKAERGGLSELDKAGFIKRQLVETRQITKHVAQILDSRMNTKYDENDKLIREVKVITLKSKLVSDFRKDFQFYKVREINNYHHAHDAYLNAVVGTALIKKYPKLESEFVYGDYKVYDVRKMIAKSEQEIGKATAKYFFYSNIMNFFKTEITLANGEIRKRPLIETNGETGEIVWDKGRDFATVRKVLSMPQVNIVKKTEVQTGGFSKESILPKRNSDKLIARKKDWDPKKYGGFDSPTVAYSVLVVAKVEKGKSKKLKSVKELLGITIMERSSFEKNPIDFLEAKGYKEVKKDLIIKLPKYSLFELENGRKRMLASAGELQKGNELALPSKYVNFLYLASHYEKLKGSPEDNEQKQLFVEQHKHYLDEIIEQISEFSKRVILADANLDKVLSAYNKHRDKPIREQAENIIHLFTLTNLGAPAAFKYFDTTIDRKRYTSTKEVLDATLIHQSITGLYETRIDLSQLGGDGGEAAAKEAAAKEAAAKEAAAKGGIPWLMKKPLQLTTLVPLQEYEERLLKQTMLTGSYKEKLQSLFLKYDALWQHWENQVGHRRIKPHHIATGTVNPRPQKQYPINPKAKASIQTVINDLLKQGVLIQQNSIMNTPVYPVPKPDGKWRMVLDYREVNKTIPLIAAQNQHSAGILSSIFRGKYKTTLDLSNGFWAHSITPESYWLTAFTWLGQQYCWTRLPQGFLNSPALFNADVVDLLKEVPNVQVYVDDIYISHDDPREHLEQLEKVFSLLLNAGYVVSLKKSEIAQHEVEFLGFNITKEGRGLTETFKQKLLNITPPRDLKQLQSILGLLNFARNFIPNFSELVKPLYNIIATAPGKYITWTTDNSQQLQNIISMLNSAENLEERNPEVRLIMKVNTSPSAGYIRFYNEFAKRPIMYLNYVYTKAEVKFTNTEKLLTTIHKGLIKALDLGMGQEILVYSPIVSMTKIQKTPLPERKALPIRWITWMSYLEDPRIQFHYDKTLPELQQVPTVTDDIIAKIKHPSEFSMVFYTDGSAIKHPNVNKSHNAGMGIAQVQFKPEFTVINTWSIPLGDHTAQLAEVAAVEFACKKALKIDGPVLIVTDSFYVAESVNKELPYWQSNGFFNNKKKPLKHVSKWKSIADCIQLKPDIIIIHEKGHQPTASTFHTEGNNLADKLATQGSYVVNAGKRTADGSEFEKRTADGSEFESPKKKAKVE

SEQ ID NO: 540 - protein, 2085 aa, synthetic construct
MPAAKRVKLDGGDKKYSIGLDIGTNSVGWAVITDEYKVPSKKFKVLGNTDRHSIKKNLIGALLFDSGETAEATRLKRTARRRYTRRKNRICYLQEIFSNEMAKVDDSFFHRLEESFLVEEDKKHERHPIFGNIVDEVAYHEKYPTIYHLRKKLVDSTDKADLRLIYLALAHMIKFRGHFLIEGDLNPDNSDVDKLFIQLVQTYNQLFEENPINASGVDAKAILSARLSKSRRLENLIAQLPGEKKNGLFGNLIALSLGLTPNFKSNFDLAEDAKLQLSKDTYDDDLDNLLAQIGDQYADLFLAAKNLSDAILLSDILRVNTEITKAPLSASMIKRYDEHHQDLTLLKALVRQQLPEKYKEIFFDQSKNGYAGYIDGGASQEEFYKFIKPILEKMDGTEELLVKLNREDLLRKQRTFDNGSIPHQIHLGELHAILRRQEDFYPFLKDNREKIEKILTFRIPYYVGPLARGNSRFAWMTRKSEETITPWNFEEVVDKGASAQSFIERMTNFDKNLPNEKVLPKHSLLYEYFTVYNELTKVKYVTEGMRKPAFLSGEQKKAIVDLLFKTNRKVTVKQLKEDYFKKIECFDSVEISGVEDRFNASLGTYHDLLKIIKDKDFLDNEENEDILEDIVLTLTLFEDREMIEERLKTYAHLFDDKVMKQLKRRRYTGWGRLSRKLINGIRDKQSGKTILDFLKSDGFANRNFMQLIHDDSLTFKEDIQKAQVSGQGDSLHEHIANLAGSPAIKKGILQTVKVVDELVKVMGRHKPENIVIEMARENQTTQKGQKNSRERMKRIEEGIKELGSQILKEHPVENTQLQNEKLYLYYLQNGRDMYVDQELDINRLSDYDVDHIVPQSFLKDDSIDNKVLTRSDKARGKSDNVPSEEVVKKMKNYWRQLLNAKLITQRKFDNLTKAERGGLSELDKAGFIKRQLVETRQITKHVAQILDSRMNTKYDENDKLIREVKVITLKSKLVSDFRKDFQFYKVREINNYHHAHDAYLNAVVGTALIKKYPKLESEFVYGDYKVYDVRKMIAKSEQEIGKATAKYFFYSNIMNFFKTEITLANGEIRKRPLIETNGETGEIVWDKGRDFATVRKVLSMPQVNIVKKTEVQTGGFSKESILPKRNSDKLIARKKDWDPKKYGGFDSPTVAYSVLVVAKVEKGKSKKLKSVKELLGITIMERSSFEKNPIDFLEAKGYKEVKKDLIIKLPKYSLFELENGRKRMLASAGELQKGNELALPSKYVNFLYLASHYEKLKGSPEDNEQKQLFVEQHKHYLDEIIEQISEFSKRVILADANLDKVLSAYNKHRDKPIREQAENIIHLFTLTNLGAPAAFKYFDTTIDRKRYTSTKEVLDATLIHQSITGLYETRIDLSQLGGDGGGGSPAPGSSGGIPWLMKKPLQLTTLVPLQEYEERLLKQTMLTGSYKEKLQSLFLKYDALWQHWENQVGHRRIKPHHIATGTVNPRPQKQYPINPKAKASIQTVINDLLKQGVLIQQNSIMNTPVYPVPKPDGKWRMVLDYREVNKTIPLIAAQNQHSAGILSSIFRGKYKTTLDLSNGFWAHSITPESYWLTAFTWLGQQYCWTRLPQGFLNSPALFNADVVDLLKEVPNVQVYVDDIYISHDDPREHLEQLEKVFSLLLNAGYVVSLKKSEIAQHEVEFLGFNITKEGRGLTETFKQKLLNITPPRDLKQLQSILGLLNFARNFIPNFSELVKPLYNIIATAPGKYITWTTDNSQQLQNIISMLNSAENLEERNPEVRLIMKVNTSPSAGYIRFYNEFAKRPIMYLNYVYTKAEVKFTNTEKLLTTIHKGLIKALDLGMGQEILVYSPIVSMTKIQKTPLPERKALPIRWITWMSYLEDPRIQFHYDKTLPELQQVPTVTDDIIAKIKHPSEFSMVFYTDGSAIKHPNVNKSHNAGMGIAQVQFKPEFTVINTWSIPLGDHTAQLAEVAAVEFACKKALKIDGPVLIVTDSFYVAESVNKELPYWQSNGFFNNKKKPLKHVSKWKSIADCIQLKPDIIIIHEKGHQPTASTFHTEGNNLADKLATQGSYVVNAGKRTADGSEFEKRTADGSEFESPKKKAKVE

SEQ ID NO: 541 - protein, 2091 aa, synthetic construct
MPAAKRVKLDGGDKKYSIGLDIGTNSVGWAVITDEYKVPSKKFKVLGNTDRHSIKKNLIGALLFDSGETAEATRLKRTARRRYTRRKNRICYLQEIFSNEMAKVDDSFFHRLEESFLVEEDKKHERHPIFGNIVDEVAYHEKYPTIYHLRKKLVDSTDKADLRLIYLALAHMIKFRGHFLIEGDLNPDNSDVDKLFIQLVQTYNQLFEENPINASGVDAKAILSARLSKSRRLENLIAQLPGEKKNGLFGNLIALSLGLTPNFKSNFDLAEDAKLQLSKDTYDDDLDNLLAQIGDQYADLFLAAKNLSDAILLSDILRVNTEITKAPLSASMIKRYDEHHQDLTLLKALVRQQLPEKYKEIFFDQSKNGYAGYIDGGASQEEFYKFIKPILEKMDGTEELLVKLNREDLLRKQRTFDNGSIPHQIHLGELHAILRRQEDFYPFLKDNREKIEKILTFRIPYYVGPLARGNSRFAWMTRKSEETITPWNFEEVVDKGASAQSFIERMTNFDKNLPNEKVLPKHSLLYEYFTVYNELTKVKYVTEGMRKPAFLSGEQKKAIVDLLFKTNRKVTVKQLKEDYFKKIECFDSVEISGVEDRFNASLGTYHDLLKIIKDKDFLDNEENEDILEDIVLTLTLFEDREMIEERLKTYAHLFDDKVMKQLKRRRYTGWGRLSRKLINGIRDKQSGKTILDFLKSDGFANRNFMQLIHDDSLTFKEDIQKAQVSGQGDSLHEHIANLAGSPAIKKGILQTVKVVDELVKVMGRHKPENIVIEMARENQTTQKGQKNSRERMKRIEEGIKELGSQILKEHPVENTQLQNEKLYLYYLQNGRDMYVDQELDINRLSDYDVDHIVPQSFLKDDSIDNKVLTRSDKARGKSDNVPSEEVVKKMKNYWRQLLNAKLITQRKFDNLTKAERGGLSELDKAGFIKRQLVETRQITKHVAQILDSRMNTKYDENDKLIREVKVITLKSKLVSDFRKDFQFYKVREINNYHHAHDAYLNAVVGTALIKKYPKLESEFVYGDYKVYDVRKMIAKSEQEIGKATAKYFFYSNIMNFFKTEITLANGEIRKRPLIETNGETGEIVWDKGRDFATVRKVLSMPQVNIVKKTEVQTGGFSKESILPKRNSDKLIARKKDWDPKKYGGFDSPTVAYSVLVVAKVEKGKSKKLKSVKELLGITIMERSSFEKNPIDFLEAKGYKEVKKDLIIKLPKYSLFELENGRKRMLASAGELQKGNELALPSKYVNFLYLASHYEKLKGSPEDNEQKQLFVEQHKHYLDEIIEQISEFSKRVILADANLDKVLSAYNKHRDKPIREQAENIIHLFTLTNLGAPAAFKYFDTTIDRKRYTSTKEVLDATLIHQSITGLYETRIDLSQLGGDGGEAAAKGGGGSEAAAKGGIPWLMKKPLQLTTLVPLQEYEERLLKQTMLTGSYKEKLQSLFLKYDALWQHWENQVGHRRIKPHHIATGTVNPRPQKQYPINPKAKASIQTVINDLLKQGVLIQQNSIMNTPVYPVPKPDGKWRMVLDYREVNKTIPLIAAQNQHSAGILSSIFRGKYKTTLDLSNGFWAHSITPESYWLTAFTWLGQQYCWTRLPQGFLNSPALFNADVVDLLKEVPNVQVYVDDIYISHDDPREHLEQLEKVFSLLLNAGYVVSLKKSEIAQHEVEFLGFNITKEGRGLTETFKQKLLNITPPRDLKQLQSILGLLNFARNFIPNFSELVKPLYNIIATAPGKYITWTTDNSQQLQNIISMLNSAENLEERNPEVRLIMKVNTSPSAGYIRFYNEFAKRPIMYLNYVYTKAEVKFTNTEKLLTTIHKGLIKALDLGMGQEILVYSPIVSMTKIQKTPLPERKALPIRWITWMSYLEDPRIQFHYDKTLPELQQVPTVTDDIIAKIKHPSEFSMVFYTDGSAIKHPNVNKSHNAGMGIAQVQFKPEFTVINTWSIPLGDHTAQLAEVAAVEFACKKALKIDGPVLIVTDSFYVAESVNKELPYWQSNGFFNNKKKPLKHVSKWKSIADCIQLKPDIIIIHEKGHQPTASTFHTEGNNLADKLATQGSYVVNAGKRTADGSEFEKRTADGSEFESPKKKAKVE

SEQ ID NO: 542 - protein, 2085 aa, synthetic construct
MPAAKRVKLDGGDKKYSIGLDIGTNSVGWAVITDEYKVPSKKFKVLGNTDRHSIKKNLIGALLFDSGETAEATRLKRTARRRYTRRKNRICYLQEIFSNEMAKVDDSFFHRLEESFLVEEDKKHERHPIFGNIVDEVAYHEKYPTIYHLRKKLVDSTDKADLRLIYLALAHMIKFRGHFLIEGDLNPDNSDVDKLFIQLVQTYNQLFEENPINASGVDAKAILSARLSKSRRLENLIAQLPGEKKNGLFGNLIALSLGLTPNFKSNFDLAEDAKLQLSKDTYDDDLDNLLAQIGDQYADLFLAAKNLSDAILLSDILRVNTEITKAPLSASMIKRYDEHHQDLTLLKALVRQQLPEKYKEIFFDQSKNGYAGYIDGGASQEEFYKFIKPILEKMDGTEELLVKLNREDLLRKQRTFDNGSIPHQIHLGELHAILRRQEDFYPFLKDNREKIEKILTFRIPYYVGPLARGNSRFAWMTRKSEETITPWNFEEVVDKGASAQSFIERMTNFDKNLPNEKVLPKHSLLYEYFTVYNELTKVKYVTEGMRKPAFLSGEQKKAIVDLLFKTNRKVTVKQLKEDYFKKIECFDSVEISGVEDRFNASLGTYHDLLKIIKDKDFLDNEENEDILEDIVLTLTLFEDREMIEERLKTYAHLFDDKVMKQLKRRRYTGWGRLSRKLINGIRDKQSGKTILDFLKSDGFANRNFMQLIHDDSLTFKEDIQKAQVSGQGDSLHEHIANLAGSPAIKKGILQTVKVVDELVKVMGRHKPENIVIEMARENQTTQKGQKNSRERMKRIEEGIKELGSQILKEHPVENTQLQNEKLYLYYLQNGRDMYVDQELDINRLSDYDVDHIVPQSFLKDDSIDNKVLTRSDKARGKSDNVPSEEVVKKMKNYWRQLLNAKLITQRKFDNLTKAERGGLSELDKAGFIKRQLVETRQITKHVAQILDSRMNTKYDENDKLIREVKVITLKSKLVSDFRKDFQFYKVREINNYHHAHDAYLNAVVGTALIKKYPKLESEFVYGDYKVYDVRKMIAKSEQEIGKATAKYFFYSNIMNFFKTEITLANGEIRKRPLIETNGETGEIVWDKGRDFATVRKVLSMPQVNIVKKTEVQTGGFSKESILPKRNSDKLIARKKDWDPKKYGGFDSPTVAYSVLVVAKVEKGKSKKLKSVKELLGITIMERSSFEKNPIDFLEAKGYKEVKKDLIIKLPKYSLFELENGRKRMLASAGELQKGNELALPSKYVNFLYLASHYEKLKGSPEDNEQKQLFVEQHKHYLDEIIEQISEFSKRVILADANLDKVLSAYNKHRDKPIREQAENIIHLFTLTNLGAPAAFKYFDTTIDRKRYTSTKEVLDATLIHQSITGLYETRIDLSQLGGDGGPAPGGGGGSGGIPWLMKKPLQLTTLVPLQEYEERLLKQTMLTGSYKEKLQSLFLKYDALWQHWENQVGHRRIKPHHIATGTVNPRPQKQYPINPKAKASIQTVINDLLKQGVLIQQNSIMNTPVYPVPKPDGKWRMVLDYREVNKTIPLIAAQNQHSAGILSSIFRGKYKTTLDLSNGFWAHSITPESYWLTAFTWLGQQYCWTRLPQGFLNSPALFNADVVDLLKEVPNVQVYVDDIYISHDDPREHLEQLEKVFSLLLNAGYVVSLKKSEIAQHEVEFLGFNITKEGRGLTETFKQKLLNITPPRDLKQLQSILGLLNFARNFIPNFSELVKPLYNIIATAPGKYITWTTDNSQQLQNIISMLNSAENLEERNPEVRLIMKVNTSPSAGYIRFYNEFAKRPIMYLNYVYTKAEVKFTNTEKLLTTIHKGLIKALDLGMGQEILVYSPIVSMTKIQKTPLPERKALPIRWITWMSYLEDPRIQFHYDKTLPELQQVPTVTDDIIAKIKHPSEFSMVFYTDGSAIKHPNVNKSHNAGMGIAQVQFKPEFTVINTWSIPLGDHTAQLAEVAAVEFACKKALKIDGPVLIVTDSFYVAESVNKELPYWQSNGFFNNKKKPLKHVSKWKSIADCIQLKPDIIIIHEKGHQPTASTFHTEGNNLADKLATQGSYVVNAGKRTADGSEFEKRTADGSEFESPKKKAKVE

SEQ ID NO: 543 - protein, 2087 aa, synthetic construct
MPAAKRVKLDGGDKKYSIGLDIGTNSVGWAVITDEYKVPSKKFKVLGNTDRHSIKKNLIGALLFDSGETAEATRLKRTARRRYTRRKNRICYLQEIFSNEMAKVDDSFFHRLEESFLVEEDKKHERHPIFGNIVDEVAYHEKYPTIYHLRKKLVDSTDKADLRLIYLALAHMIKFRGHFLIEGDLNPDNSDVDKLFIQLVQTYNQLFEENPINASGVDAKAILSARLSKSRRLENLIAQLPGEKKNGLFGNLIALSLGLTPNFKSNFDLAEDAKLQLSKDTYDDDLDNLLAQIGDQYADLFLAAKNLSDAILLSDILRVNTEITKAPLSASMIKRYDEHHQDLTLLKALVRQQLPEKYKEIFFDQSKNGYAGYIDGGASQEEFYKFIKPILEKMDGTEELLVKLNREDLLRKQRTFDNGSIPHQIHLGELHAILRRQEDFYPFLKDNREKIEKILTFRIPYYVGPLARGNSRFAWMTRKSEETITPWNFEEVVDKGASAQSFIERMTNFDKNLPNEKVLPKHSLLYEYFTVYNELTKVKYVTEGMRKPAFLSGEQKKAIVDLLFKTNRKVTVKQLKEDYFKKIECFDSVEISGVEDRFNASLGTYHDLLKIIKDKDFLDNEENEDILEDIVLTLTLFEDREMIEERLKTYAHLFDDKVMKQLKRRRYTGWGRLSRKLINGIRDKQSGKTILDFLKSDGFANRNFMQLIHDDSLTFKEDIQKAQVSGQGDSLHEHIANLAGSPAIKKGILQTVKVVDELVKVMGRHKPENIVIEMARENQTTQKGQKNSRERMKRIEEGIKELGSQILKEHPVENTQLQNEKLYLYYLQNGRDMYVDQELDINRLSDYDVDHIVPQSFLKDDSIDNKVLTRSDKARGKSDNVPSEEVVKKMKNYWRQLLNAKLITQRKFDNLTKAERGGLSELDKAGFIKRQLVETRQITKHVAQILDSRMNTKYDENDKLIREVKVITLKSKLVSDFRKDFQFYKVREINNYHHAHDAYLNAVVGTALIKKYPKLESEFVYGDYKVYDVRKMIAKSEQEIGKATAKYFFYSNIMNFFKTEITLANGEIRKRPLIETNGETGEIVWDKGRDFATVRKVLSMPQVNIVKKTEVQTGGFSKESILPKRNSDKLIARKKDWDPKKYGGFDSPTVAYSVLVVAKVEKGKSKKLKSVKELLGITIMERSSFEKNPIDFLEAKGYKEVKKDLIIKLPKYSLFELENGRKRMLASAGELQKGNELALPSKYVNFLYLASHYEKLKGSPEDNEQKQLFVEQHKHYLDEIIEQISEFSKRVILADANLDKVLSAYNKHRDKPIREQAENIIHLFTLTNLGAPAAFKYFDTTIDRKRYTSTKEVLDATLIHQSITGLYETRIDLSQLGGDGGGGSEAAAKGGGGGIPWLMKKPLQLTTLVPLQEYEERLLKQTMLTGSYKEKLQSLFLKYDALWQHWENQVGHRRIKPHHIATGTVNPRPQKQYPINPKAKASIQTVINDLLKQGVLIQQNSIMNTPVYPVPKPDGKWRMVLDYREVNKTIPLIAAQNQHSAGILSSIFRGKYKTTLDLSNGFWAHSITPESYWLTAFTWLGQQYCWTRLPQGFLNSPALFNADVVDLLKEVPNVQVYVDDIYISHDDPREHLEQLEKVFSLLLNAGYVVSLKKSEIAQHEVEFLGFNITKEGRGLTETFKQKLLNITPPRDLKQLQSILGLLNFARNFIPNFSELVKPLYNIIATAPGKYITWTTDNSQQLQNIISMLNSAENLEERNPEVRLIMKVNTSPSAGYIRFYNEFAKRPIMYLNYVYTKAEVKFTNTEKLLTTIHKGLIKALDLGMGQEILVYSPIVSMTKIQKTPLPERKALPIRWITWMSYLEDPRIQFHYDKTLPELQQVPTVTDDIIAKIKHPSEFSMVFYTDGSAIKHPNVNKSHNAGMGIAQVQFKPEFTVINTWSIPLGDHTAQLAEVAAVEFACKKALKIDGPVLIVTDSFYVAESVNKELPYWQSNGFFNNKKKPLKHVSKWKSIADCIQLKPDIIIIHEKGHQPTASTFHTEGNNLADKLATQGSYVVNAGKRTADGSEFEKRTADGSEFESPKKKAKVE

SEQ ID NO: 544 - protein, 2082 aa, synthetic construct
MPAAKRVKLDGGDKKYSIGLDIGTNSVGWAVITDEYKVPSKKFKVLGNTDRHSIKKNLIGALLFDSGETAEATRLKRTARRRYTRRKNRICYLQEIFSNEMAKVDDSFFHRLEESFLVEEDKKHERHPIFGNIVDEVAYHEKYPTIYHLRKKLVDSTDKADLRLIYLALAHMIKFRGHFLIEGDLNPDNSDVDKLFIQLVQTYNQLFEENPINASGVDAKAILSARLSKSRRLENLIAQLPGEKKNGLFGNLIALSLGLTPNFKSNFDLAEDAKLQLSKDTYDDDLDNLLAQIGDQYADLFLAAKNLSDAILLSDILRVNTEITKAPLSASMIKRYDEHHQDLTLLKALVRQQLPEKYKEIFFDQSKNGYAGYIDGGASQEEFYKFIKPILEKMDGTEELLVKLNREDLLRKQRTFDNGSIPHQIHLGELHAILRRQEDFYPFLKDNREKIEKILTFRIPYYVGPLARGNSRFAWMTRKSEETITPWNFEEVVDKGASAQSFIERMTNFDKNLPNEKVLPKHSLLYEYFTVYNELTKVKYVTEGMRKPAFLSGEQKKAIVDLLFKTNRKVTVKQLKEDYFKKIECFDSVEISGVEDRFNASLGTYHDLLKIIKDKDFLDNEENEDILEDIVLTLTLFEDREMIEERLKTYAHLFDDKVMKQLKRRRYTGWGRLSRKLINGIRDKQSGKTILDFLKSDGFANRNFMQLIHDDSLTFKEDIQKAQVSGQGDSLHEHIANLAGSPAIKKGILQTVKVVDELVKVMGRHKPENIVIEMARENQTTQKGQKNSRERMKRIEEGIKELGSQILKEHPVENTQLQNEKLYLYYLQNGRDMYVDQELDINRLSDYDVDHIVPQSFLKDDSIDNKVLTRSDKARGKSDNVPSEEVVKKMKNYWRQLLNAKLITQRKFDNLTKAERGGLSELDKAGFIKRQLVETRQITKHVAQILDSRMNTKYDENDKLIREVKVITLKSKLVSDFRKDFQFYKVREINNYHHAHDAYLNAVVGTALIKKYPKLESEFVYGDYKVYDVRKMIAKSEQEIGKATAKYFFYSNIMNFFKTEITLANGEIRKRPLIETNGETGEIVWDKGRDFATVRKVLSMPQVNIVKKTEVQTGGFSKESILPKRNSDKLIARKKDWDPKKYGGFDSPTVAYSVLVVAKVEKGKSKKLKSVKELLGITIMERSSFEKNPIDFLEAKGYKEVKKDLIIKLPKYSLFELENGRKRMLASAGELQKGNELALPSKYVNFLYLASHYEKLKGSPEDNEQKQLFVEQHKHYLDEIIEQISEFSKRVILADANLDKVLSAYNKHRDKPIREQAENIIHLFTLTNLGAPAAFKYFDTTIDRKRYTSTKEVLDATLIHQSITGLYETRIDLSQLGGDGGGSSGGGGGIPWLMKKPLQLTTLVPLQEYEERLLKQTMLTGSYKEKLQSLFLKYDALWQHWENQVGHRRIKPHHIATGTVNPRPQKQYPINPKAKASIQTVINDLLKQGVLIQQNSIMNTPVYPVPKPDGKWRMVLDYREVNKTIPLIAAQNQHSAGILSSIFRGKYKTTLDLSNGFWAHSITPESYWLTAFTWLGQQYCWTRLPQGFLNSPALFNADVVDLLKEVPNVQVYVDDIYISHDDPREHLEQLEKVFSLLLNAGYVVSLKKSEIAQHEVEFLGFNITKEGRGLTETFKQKLLNITPPRDLKQLQSILGLLNFARNFIPNFSELVKPLYNIIATAPGKYITWTTDNSQQLQNIISMLNSAENLEERNPEVRLIMKVNTSPSAGYIRFYNEFAKRPIMYLNYVYTKAEVKFTNTEKLLTTIHKGLIKALDLGMGQEILVYSPIVSMTKIQKTPLPERKALPIRWITWMSYLEDPRIQFHYDKTLPELQQVPTVTDDIIAKIKHPSEFSMVFYTDGSAIKHPNVNKSHNAGMGIAQVQFKPEFTVINTWSIPLGDHTAQLAEVAAVEFACKKALKIDGPVLIVTDSFYVAESVNKELPYWQSNGFFNNKKKPLKHVSKWKSIADCIQLKPDIIIIHEKGHQPTASTFHTEGNNLADKLATQGSYVVNAGKRTADGSEFEKRTADGSEFESPKKKAKVE

SEQ ID NO: 545 - protein, 2085 aa, synthetic construct
MPAAKRVKLDGGDKKYSIGLDIGTNSVGWAVITDEYKVPSKKFKVLGNTDRHSIKKNLIGALLFDSGETAEATRLKRTARRRYTRRKNRICYLQEIFSNEMAKVDDSFFHRLEESFLVEEDKKHERHPIFGNIVDEVAYHEKYPTIYHLRKKLVDSTDKADLRLIYLALAHMIKFRGHFLIEGDLNPDNSDVDKLFIQLVQTYNQLFEENPINASGVDAKAILSARLSKSRRLENLIAQLPGEKKNGLFGNLIALSLGLTPNFKSNFDLAEDAKLQLSKDTYDDDLDNLLAQIGDQYADLFLAAKNLSDAILLSDILRVNTEITKAPLSASMIKRYDEHHQDLTLLKALVRQQLPEKYKEIFFDQSKNGYAGYIDGGASQEEFYKFIKPILEKMDGTEELLVKLNREDLLRKQRTFDNGSIPHQIHLGELHAILRRQEDFYPFLKDNREKIEKILTFRIPYYVGPLARGNSRFAWMTRKSEETITPWNFEEVVDKGASAQSFIERMTNFDKNLPNEKVLPKHSLLYEYFTVYNELTKVKYVTEGMRKPAFLSGEQKKAIVDLLFKTNRKVTVKQLKEDYFKKIECFDSVEISGVEDRFNASLGTYHDLLKIIKDKDFLDNEENEDILEDIVLTLTLFEDREMIEERLKTYAHLFDDKVMKQLKRRRYTGWGRLSRKLINGIRDKQSGKTILDFLKSDGFANRNFMQLIHDDSLTFKEDIQKAQVSGQGDSLHEHIANLAGSPAIKKGILQTVKVVDELVKVMGRHKPENIVIEMARENQTTQKGQKNSRERMKRIEEGIKELGSQILKEHPVENTQLQNEKLYLYYLQNGRDMYVDQELDINRLSDYDVDHIVPQSFLKDDSIDNKVLTRSDKARGKSDNVPSEEVVKKMKNYWRQLLNAKLITQRKFDNLTKAERGGLSELDKAGFIKRQLVETRQITKHVAQILDSRMNTKYDENDKLIREVKVITLKSKLVSDFRKDFQFYKVREINNYHHAHDAYLNAVVGTALIKKYPKLESEFVYGDYKVYDVRKMIAKSEQEIGKATAKYFFYSNIMNFFKTEITLANGEIRKRPLIETNGETGEIVWDKGRDFATVRKVLSMPQVNIVKKTEVQTGGFSKESILPKRNSDKLIARKKDWDPKKYGGFDSPTVAYSVLVVAKVEKGKSKKLKSVKELLGITIMERSSFEKNPIDFLEAKGYKEVKKDLIIKLPKYSLFELENGRKRMLASAGELQKGNELALPSKYVNFLYLASHYEKLKGSPEDNEQKQLFVEQHKHYLDEIIEQISEFSKRVILADANLDKVLSAYNKHRDKPIREQAENIIHLFTLTNLGAPAAFKYFDTTIDRKRYTSTKEVLDATLIHQSITGLYETRIDLSQLGGDGGGSSGGSPAPGGIPWLMKKPLQLTTLVPLQEYEERLLKQTMLTGSYKEKLQSLFLKYDALWQHWENQVGHRRIKPHHIATGTVNPRPQKQYPINPKAKASIQTVINDLLKQGVLIQQNSIMNTPVYPVPKPDGKWRMVLDYREVNKTIPLIAAQNQHSAGILSSIFRGKYKTTLDLSNGFWAHSITPESYWLTAFTWLGQQYCWTRLPQGFLNSPALFNADVVDLLKEVPNVQVYVDDIYISHDDPREHLEQLEKVFSLLLNAGYVVSLKKSEIAQHEVEFLGFNITKEGRGLTETFKQKLLNITPPRDLKQLQSILGLLNFARNFIPNFSELVKPLYNIIATAPGKYITWTTDNSQQLQNIISMLNSAENLEERNPEVRLIMKVNTSPSAGYIRFYNEFAKRPIMYLNYVYTKAEVKFTNTEKLLTTIHKGLIKALDLGMGQEILVYSPIVSMTKIQKTPLPERKALPIRWITWMSYLEDPRIQFHYDKTLPELQQVPTVTDDIIAKIKHPSEFSMVFYTDGSAIKHPNVNKSHNAGMGIAQVQFKPEFTVINTWSIPLGDHTAQLAEVAAVEFACKKALKIDGPVLIVTDSFYVAESVNKELPYWQSNGFFNNKKKPLKHVSKWKSIADCIQLKPDIIIIHEKGHQPTASTFHTEGNNLADKLATQGSYVVNAGKRTADGSEFEKRTADGSEFESPKKKAKVE

SEQ ID NO: 546 - protein, 2085 aa, synthetic construct
MPAAKRVKLDGGDKKYSIGLDIGTNSVGWAVITDEYKVPSKKFKVLGNTDRHSIKKNLIGALLFDSGETAEATRLKRTARRRYTRRKNRICYLQEIFSNEMAKVDDSFFHRLEESFLVEEDKKHERHPIFGNIVDEVAYHEKYPTIYHLRKKLVDSTDKADLRLIYLALAHMIKFRGHFLIEGDLNPDNSDVDKLFIQLVQTYNQLFEENPINASGVDAKAILSARLSKSRRLENLIAQLPGEKKNGLFGNLIALSLGLTPNFKSNFDLAEDAKLQLSKDTYDDDLDNLLAQIGDQYADLFLAAKNLSDAILLSDILRVNTEITKAPLSASMIKRYDEHHQDLTLLKALVRQQLPEKYKEIFFDQSKNGYAGYIDGGASQEEFYKFIKPILEKMDGTEELLVKLNREDLLRKQRTFDNGSIPHQIHLGELHAILRRQEDFYPFLKDNREKIEKILTFRIPYYVGPLARGNSRFAWMTRKSEETITPWNFEEVVDKGASAQSFIERMTNFDKNLPNEKVLPKHSLLYEYFTVYNELTKVKYVTEGMRKPAFLSGEQKKAIVDLLFKTNRKVTVKQLKEDYFKKIECFDSVEISGVEDRFNASLGTYHDLLKIIKDKDFLDNEENEDILEDIVLTLTLFEDREMIEERLKTYAHLFDDKVMKQLKRRRYTGWGRLSRKLINGIRDKQSGKTILDFLKSDGFANRNFMQLIHDDSLTFKEDIQKAQVSGQGDSLHEHIANLAGSPAIKKGILQTVKVVDELVKVMGRHKPENIVIEMARENQTTQKGQKNSRERMKRIEEGIKELGSQILKEHPVENTQLQNEKLYLYYLQNGRDMYVDQELDINRLSDYDVDHIVPQSFLKDDSIDNKVLTRSDKARGKSDNVPSEEVVKKMKNYWRQLLNAKLITQRKFDNLTKAERGGLSELDKAGFIKRQLVETRQITKHVAQILDSRMNTKYDENDKLIREVKVITLKSKLVSDFRKDFQFYKVREINNYHHAHDAYLNAVVGTALIKKYPKLESEFVYGDYKVYDVRKMIAKSEQEIGKATAKYFFYSNIMNFFKTEITLANGEIRKRPLIETNGETGEIVWDKGRDFATVRKVLSMPQVNIVKKTEVQTGGFSKESILPKRNSDKLIARKKDWDPKKYGGFDSPTVAYSVLVVAKVEKGKSKKLKSVKELLGITIMERSSFEKNPIDFLEAKGYKEVKKDLIIKLPKYSLFELENGRKRMLASAGELQKGNELALPSKYVNFLYLASHYEKLKGSPEDNEQKQLFVEQHKHYLDEIIEQISEFSKRVILADANLDKVLSAYNKHRDKPIREQAENIIHLFTLTNLGAPAAFKYFDTTIDRKRYTSTKEVLDATLIHQSITGLYETRIDLSQLGGDGGPAPGSSGGGGGIPWLMKKPLQLTTLVPLQEYEERLLKQTMLTGSYKEKLQSLFLKYDALWQHWENQVGHRRIKPHHIATGTVNPRPQKQYPINPKAKASIQTVINDLLKQGVLIQQNSIMNTPVYPVPKPDGKWRMVLDYREVNKTIPLIAAQNQHSAGILSSIFRGKYKTTLDLSNGFWAHSITPESYWLTAFTWLGQQYCWTRLPQGFLNSPALFNADVVDLLKEVPNVQVYVDDIYISHDDPREHLEQLEKVFSLLLNAGYVVSLKKSEIAQHEVEFLGFNITKEGRGLTETFKQKLLNITPPRDLKQLQSILGLLNFARNFIPNFSELVKPLYNIIATAPGKYITWTTDNSQQLQNIISMLNSAENLEERNPEVRLIMKVNTSPSAGYIRFYNEFAKRPIMYLNYVYTKAEVKFTNTEKLLTTIHKGLIKALDLGMGQEILVYSPIVSMTKIQKTPLPERKALPIRWITWMSYLEDPRIQFHYDKTLPELQQVPTVTDDIIAKIKHPSEFSMVFYTDGSAIKHPNVNKSHNAGMGIAQVQFKPEFTVINTWSIPLGDHTAQLAEVAAVEFACKKALKIDGPVLIVTDSFYVAESVNKELPYWQSNGFFNNKKKPLKHVSKWKSIADCIQLKPDIIIIHEKGHQPTASTFHTEGNNLADKLATQGSYVVNAGKRTADGSEFEKRTADGSEFESPKKKAKVE

SEQ ID NO: 547 - protein, 2085 aa, synthetic construct
MPAAKRVKLDGGDKKYSIGLDIGTNSVGWAVITDEYKVPSKKFKVLGNTDRHSIKKNLIGALLFDSGETAEATRLKRTARRRYTRRKNRICYLQEIFSNEMAKVDDSFFHRLEESFLVEEDKKHERHPIFGNIVDEVAYHEKYPTIYHLRKKLVDSTDKADLRLIYLALAHMIKFRGHFLIEGDLNPDNSDVDKLFIQLVQTYNQLFEENPINASGVDAKAILSARLSKSRRLENLIAQLPGEKKNGLFGNLIALSLGLTPNFKSNFDLAEDAKLQLSKDTYDDDLDNLLAQIGDQYADLFLAAKNLSDAILLSDILRVNTEITKAPLSASMIKRYDEHHQDLTLLKALVRQQLPEKYKEIFFDQSKNGYAGYIDGGASQEEFYKFIKPILEKMDGTEELLVKLNREDLLRKQRTFDNGSIPHQIHLGELHAILRRQEDFYPFLKDNREKIEKILTFRIPYYVGPLARGNSRFAWMTRKSEETITPWNFEEVVDKGASAQSFIERMTNFDKNLPNEKVLPKHSLLYEYFTVYNELTKVKYVTEGMRKPAFLSGEQKKAIVDLLFKTNRKVTVKQLKEDYFKKIECFDSVEISGVEDRFNASLGTYHDLLKIIKDKDFLDNEENEDILEDIVLTLTLFEDREMIEERLKTYAHLFDDKVMKQLKRRRYTGWGRLSRKLINGIRDKQSGKTILDFLKSDGFANRNFMQLIHDDSLTFKEDIQKAQVSGQGDSLHEHIANLAGSPAIKKGILQTVKVVDELVKVMGRHKPENIVIEMARENQTTQKGQKNSRERMKRIEEGIKELGSQILKEHPVENTQLQNEKLYLYYLQNGRDMYVDQELDINRLSDYDVDHIVPQSFLKDDSIDNKVLTRSDKARGKSDNVPSEEVVKKMKNYWRQLLNAKLITQRKFDNLTKAERGGLSELDKAGFIKRQLVETRQITKHVAQILDSRMNTKYDENDKLIREVKVITLKSKLVSDFRKDFQFYKVREINNYHHAHDAYLNAVVGTALIKKYPKLESEFVYGDYKVYDVRKMIAKSEQEIGKATAKYFFYSNIMNFFKTEITLANGEIRKRPLIETNGETGEIVWDKGRDFATVRKVLSMPQVNIVKKTEVQTGGFSKESILPKRNSDKLIARKKDWDPKKYGGFDSPTVAYSVLVVAKVEKGKSKKLKSVKELLGITIMERSSFEKNPIDFLEAKGYKEVKKDLIIKLPKYSLFELENGRKRMLASAGELQKGNELALPSKYVNFLYLASHYEKLKGSPEDNEQKQLFVEQHKHYLDEIIEQISEFSKRVILADANLDKVLSAYNKHRDKPIREQAENIIHLFTLTNLGAPAAFKYFDTTIDRKRYTSTKEVLDATLIHQSITGLYETRIDLSQLGGDGGGSSGGGPAPGGIPWLMKKPLQLTTLVPLQEYEERLLKQTMLTGSYKEKLQSLFLKYDALWQHWENQVGHRRIKPHHIATGTVNPRPQKQYPINPKAKASIQTVINDLLKQGVLIQQNSIMNTPVYPVPKPDGKWRMVLDYREVNKTIPLIAAQNQHSAGILSSIFRGKYKTTLDLSNGFWAHSITPESYWLTAFTWLGQQYCWTRLPQGFLNSPALFNADVVDLLKEVPNVQVYVDDIYISHDDPREHLEQLEKVFSLLLNAGYVVSLKKSEIAQHEVEFLGFNITKEGRGLTETFKQKLLNITPPRDLKQLQSILGLLNFARNFIPNFSELVKPLYNIIATAPGKYITWTTDNSQQLQNIISMLNSAENLEERNPEVRLIMKVNTSPSAGYIRFYNEFAKRPIMYLNYVYTKAEVKFTNTEKLLTTIHKGLIKALDLGMGQEILVYSPIVSMTKIQKTPLPERKALPIRWITWMSYLEDPRIQFHYDKTLPELQQVPTVTDDIIAKIKHPSEFSMVFYTDGSAIKHPNVNKSHNAGMGIAQVQFKPEFTVINTWSIPLGDHTAQLAEVAAVEFACKKALKIDGPVLIVTDSFYVAESVNKELPYWQSNGFFNNKKKPLKHVSKWKSIADCIQLKPDIIIIHEKGHQPTASTFHTEGNNLADKLATQGSYVVNAGKRTADGSEFEKRTADGSEFESPKKKAKVE

SEQ ID NO: 548 - protein, 2087 aa, synthetic construct
MPAAKRVKLDGGDKKYSIGLDIGTNSVGWAVITDEYKVPSKKFKVLGNTDRHSIKKNLIGALLFDSGETAEATRLKRTARRRYTRRKNRICYLQEIFSNEMAKVDDSFFHRLEESFLVEEDKKHERHPIFGNIVDEVAYHEKYPTIYHLRKKLVDSTDKADLRLIYLALAHMIKFRGHFLIEGDLNPDNSDVDKLFIQLVQTYNQLFEENPINASGVDAKAILSARLSKSRRLENLIAQLPGEKKNGLFGNLIALSLGLTPNFKSNFDLAEDAKLQLSKDTYDDDLDNLLAQIGDQYADLFLAAKNLSDAILLSDILRVNTEITKAPLSASMIKRYDEHHQDLTLLKALVRQQLPEKYKEIFFDQSKNGYAGYIDGGASQEEFYKFIKPILEKMDGTEELLVKLNREDLLRKQRTFDNGSIPHQIHLGELHAILRRQEDFYPFLKDNREKIEKILTFRIPYYVGPLARGNSRFAWMTRKSEETITPWNFEEVVDKGASAQSFIERMTNFDKNLPNEKVLPKHSLLYEYFTVYNELTKVKYVTEGMRKPAFLSGEQKKAIVDLLFKTNRKVTVKQLKEDYFKKIECFDSVEISGVEDRFNASLGTYHDLLKIIKDKDFLDNEENEDILEDIVLTLTLFEDREMIEERLKTYAHLFDDKVMKQLKRRRYTGWGRLSRKLINGIRDKQSGKTILDFLKSDGFANRNFMQLIHDDSLTFKEDIQKAQVSGQGDSLHEHIANLAGSPAIKKGILQTVKVVDELVKVMGRHKPENIVIEMARENQTTQKGQKNSRERMKRIEEGIKELGSQILKEHPVENTQLQNEKLYLYYLQNGRDMYVDQELDINRLSDYDVDHIVPQSFLKDDSIDNKVLTRSDKARGKSDNVPSEEVVKKMKNYWRQLLNAKLITQRKFDNLTKAERGGLSELDKAGFIKRQLVETRQITKHVAQILDSRMNTKYDENDKLIREVKVITLKSKLVSDFRKDFQFYKVREINNYHHAHDAYLNAVVGTALIKKYPKLESEFVYGDYKVYDVRKMIAKSEQEIGKATAKYFFYSNIMNFFKTEITLANGEIRKRPLIETNGETGEIVWDKGRDFATVRKVLSMPQVNIVKKTEVQTGGFSKESILPKRNSDKLIARKKDWDPKKYGGFDSPTVAYSVLVVAKVEKGKSKKLKSVKELLGITIMERSSFEKNPIDFLEAKGYKEVKKDLIIKLPKYSLFELENGRKRMLASAGELQKGNELALPSKYVNFLYLASHYEKLKGSPEDNEQKQLFVEQHKHYLDEIIEQISEFSKRVILADANLDKVLSAYNKHRDKPIREQAENIIHLFTLTNLGAPAAFKYFDTTIDRKRYTSTKEVLDATLIHQSITGLYETRIDLSQLGGDGGGGSEAAAKPAPGGIPWLMKKPLQLTTLVPLQEYEERLLKQTMLTGSYKEKLQSLFLKYDALWQHWENQVGHRRIKPHHIATGTVNPRPQKQYPINPKAKASIQTVINDLLKQGVLIQQNSIMNTPVYPVPKPDGKWRMVLDYREVNKTIPLIAAQNQHSAGILSSIFRGKYKTTLDLSNGFWAHSITPESYWLTAFTWLGQQYCWTRLPQGFLNSPALFNADVVDLLKEVPNVQVYVDDIYISHDDPREHLEQLEKVFSLLLNAGYVVSLKKSEIAQHEVEFLGFNITKEGRGLTETFKQKLLNITPPRDLKQLQSILGLLNFARNFIPNFSELVKPLYNIIATAPGKYITWTTDNSQQLQNIISMLNSAENLEERNPEVRLIMKVNTSPSAGYIRFYNEFAKRPIMYLNYVYTKAEVKFTNTEKLLTTIHKGLIKALDLGMGQEILVYSPIVSMTKIQKTPLPERKALPIRWITWMSYLEDPRIQFHYDKTLPELQQVPTVTDDIIAKIKHPSEFSMVFYTDGSAIKHPNVNKSHNAGMGIAQVQFKPEFTVINTWSIPLGDHTAQLAEVAAVEFACKKALKIDGPVLIVTDSFYVAESVNKELPYWQSNGFFNNKKKPLKHVSKWKSIADCIQLKPDIIIIHEKGHQPTASTFHTEGNNLADKLATQGSYVVNAGKRTADGSEFEKRTADGSEFESPKKKAKVE

SEQ ID NO: 549 - protein, 2087 aa, synthetic construct
MPAAKRVKLDGGDKKYSIGLDIGTNSVGWAVITDEYKVPSKKFKVLGNTDRHSIKKNLIGALLFDSGETAEATRLKRTARRRYTRRKNRICYLQEIFSNEMAKVDDSFFHRLEESFLVEEDKKHERHPIFGNIVDEVAYHEKYPTIYHLRKKLVDSTDKADLRLIYLALAHMIKFRGHFLIEGDLNPDNSDVDKLFIQLVQTYNQLFEENPINASGVDAKAILSARLSKSRRLENLIAQLPGEKKNGLFGNLIALSLGLTPNFKSNFDLAEDAKLQLSKDTYDDDLDNLLAQIGDQYADLFLAAKNLSDAILLSDILRVNTEITKAPLSASMIKRYDEHHQDLTLLKALVRQQLPEKYKEIFFDQSKNGYAGYIDGGASQEEFYKFIKPILEKMDGTEELLVKLNREDLLRKQRTFDNGSIPHQIHLGELHAILRRQEDFYPFLKDNREKIEKILTFRIPYYVGPLARGNSRFAWMTRKSEETITPWNFEEVVDKGASAQSFIERMTNFDKNLPNEKVLPKHSLLYEYFTVYNELTKVKYVTEGMRKPAFLSGEQKKAIVDLLFKTNRKVTVKQLKEDYFKKIECFDSVEISGVEDRFNASLGTYHDLLKIIKDKDFLDNEENEDILEDIVLTLTLFEDREMIEERLKTYAHLFDDKVMKQLKRRRYTGWGRLSRKLINGIRDKQSGKTILDFLKSDGFANRNFMQLIHDDSLTFKEDIQKAQVSGQGDSLHEHIANLAGSPAIKKGILQTVKVVDELVKVMGRHKPENIVIEMARENQTTQKGQKNSRERMKRIEEGIKELGSQILKEHPVENTQLQNEKLYLYYLQNGRDMYVDQELDINRLSDYDVDHIVPQSFLKDDSIDNKVLTRSDKARGKSDNVPSEEVVKKMKNYWRQLLNAKLITQRKFDNLTKAERGGLSELDKAGFIKRQLVETRQITKHVAQILDSRMNTKYDENDKLIREVKVITLKSKLVSDFRKDFQFYKVREINNYHHAHDAYLNAVVGTALIKKYPKLESEFVYGDYKVYDVRKMIAKSEQEIGKATAKYFFYSNIMNFFKTEITLANGEIRKRPLIETNGETGEIVWDKGRDFATVRKVLSMPQVNIVKKTEVQTGGFSKESILPKRNSDKLIARKKDWDPKKYGGFDSPTVAYSVLVVAKVEKGKSKKLKSVKELLGITIMERSSFEKNPIDFLEAKGYKEVKKDLIIKLPKYSLFELENGRKRMLASAGELQKGNELALPSKYVNFLYLASHYEKLKGSPEDNEQKQLFVEQHKHYLDEIIEQISEFSKRVILADANLDKVLSAYNKHRDKPIREQAENIIHLFTLTNLGAPAAFKYFDTTIDRKRYTSTKEVLDATLIHQSITGLYETRIDLSQLGGDGGGGGPAPEAAAKGGIPWLMKKPLQLTTLVPLQEYEERLLKQTMLTGSYKEKLQSLFLKYDALWQHWENQVGHRRIKPHHIATGTVNPRPQKQYPINPKAKASIQTVINDLLKQGVLIQQNSIMNTPVYPVPKPDGKWRMVLDYREVNKTIPLIAAQNQHSAGILSSIFRGKYKTTLDLSNGFWAHSITPESYWLTAFTWLGQQYCWTRLPQGFLNSPALFNADVVDLLKEVPNVQVYVDDIYISHDDPREHLEQLEKVFSLLLNAGYVVSLKKSEIAQHEVEFLGFNITKEGRGLTETFKQKLLNITPPRDLKQLQSILGLLNFARNFIPNFSELVKPLYNIIATAPGKYITWTTDNSQQLQNIISMLNSAENLEERNPEVRLIMKVNTSPSAGYIRFYNEFAKRPIMYLNYVYTKAEVKFTNTEKLLTTIHKGLIKALDLGMGQEILVYSPIVSMTKIQKTPLPERKALPIRWITWMSYLEDPRIQFHYDKTLPELQQVPTVTDDIIAKIKHPSEFSMVFYTDGSAIKHPNVNKSHNAGMGIAQVQFKPEFTVINTWSIPLGDHTAQLAEVAAVEFACKKALKIDGPVLIVTDSFYVAESVNKELPYWQSNGFFNNKKKPLKHVSKWKSIADCIQLKPDIIIIHEKGHQPTASTFHTEGNNLADKLATQGSYVVNAGKRTADGSEFEKRTADGSEFESPKKKAKVE

SEQ ID NO: 550 - protein, 2106 aa, synthetic construct
MPAAKRVKLDGGDKKYSIGLDIGTNSVGWAVITDEYKVPSKKFKVLGNTDRHSIKKNLIGALLFDSGETAEATRLKRTARRRYTRRKNRICYLQEIFSNEMAKVDDSFFHRLEESFLVEEDKKHERHPIFGNIVDEVAYHEKYPTIYHLRKKLVDSTDKADLRLIYLALAHMIKFRGHFLIEGDLNPDNSDVDKLFIQLVQTYNQLFEENPINASGVDAKAILSARLSKSRRLENLIAQLPGEKKNGLFGNLIALSLGLTPNFKSNFDLAEDAKLQLSKDTYDDDLDNLLAQIGDQYADLFLAAKNLSDAILLSDILRVNTEITKAPLSASMIKRYDEHHQDLTLLKALVRQQLPEKYKEIFFDQSKNGYAGYIDGGASQEEFYKFIKPILEKMDGTEELLVKLNREDLLRKQRTFDNGSIPHQIHLGELHAILRRQEDFYPFLKDNREKIEKILTFRIPYYVGPLARGNSRFAWMTRKSEETITPWNFEEVVDKGASAQSFIERMTNFDKNLPNEKVLPKHSLLYEYFTVYNELTKVKYVTEGMRKPAFLSGEQKKAIVDLLFKTNRKVTVKQLKEDYFKKIECFDSVEISGVEDRFNASLGTYHDLLKIIKDKDFLDNEENEDILEDIVLTLTLFEDREMIEERLKTYAHLFDDKVMKQLKRRRYTGWGRLSRKLINGIRDKQSGKTILDFLKSDGFANRNFMQLIHDDSLTFKEDIQKAQVSGQGDSLHEHIANLAGSPAIKKGILQTVKVVDELVKVMGRHKPENIVIEMARENQTTQKGQKNSRERMKRIEEGIKELGSQILKEHPVENTQLQNEKLYLYYLQNGRDMYVDQELDINRLSDYDVDHIVPQSFLKDDSIDNKVLTRSDKARGKSDNVPSEEVVKKMKNYWRQLLNAKLITQRKFDNLTKAERGGLSELDKAGFIKRQLVETRQITKHVAQILDSRMNTKYDENDKLIREVKVITLKSKLVSDFRKDFQFYKVREINNYHHAHDAYLNAVVGTALIKKYPKLESEFVYGDYKVYDVRKMIAKSEQEIGKATAKYFFYSNIMNFFKTEITLANGEIRKRPLIETNGETGEIVWDKGRDFATVRKVLSMPQVNIVKKTEVQTGGFSKESILPKRNSDKLIARKKDWDPKKYGGFDSPTVAYSVLVVAKVEKGKSKKLKSVKELLGITIMERSSFEKNPIDFLEAKGYKEVKKDLIIKLPKYSLFELENGRKRMLASAGELQKGNELALPSKYVNFLYLASHYEKLKGSPEDNEQKQLFVEQHKHYLDEIIEQISEFSKRVILADANLDKVLSAYNKHRDKPIREQAENIIHLFTLTNLGAPAAFKYFDTTIDRKRYTSTKEVLDATLIHQSITGLYETRIDLSQLGGDGGEAAAKEAAAKEAAAKEAAAKEAAAKEAAAKGGIPWLMKKPLQLTTLVPLQEYEERLLKQTMLTGSYKEKLQSLFLKYDALWQHWENQVGHRRIKPHHIATGTVNPRPQKQYPINPKAKASIQTVINDLLKQGVLIQQNSIMNTPVYPVPKPDGKWRMVLDYREVNKTIPLIAAQNQHSAGILSSIFRGKYKTTLDLSNGFWAHSITPESYWLTAFTWLGQQYCWTRLPQGFLNSPALFNADVVDLLKEVPNVQVYVDDIYISHDDPREHLEQLEKVFSLLLNAGYVVSLKKSEIAQHEVEFLGFNITKEGRGLTETFKQKLLNITPPRDLKQLQSILGKLNFARNFIPNFSELVKPLYNIIATAPGKYITWTTDNSQQLQNIISMLNSAENLEERNPEVRLIMKVNTSPSAGYIRFYNEFAKRPIMYLNYVYTKAEVKFTNTEKLLTTIHKGLIKALDLGMGQEILVYSPIVSMTKIQKTPLPERKALPIRWITWMSYLEDPRIQFHYDKTLPELQQVPTVTDDIIAKIKHPSEFSMVFYTDGSAIKHPNVNKSHNAGMGIAQVQFKPEFTVINTWSIPLGDHTAQLAEVAAVEFACKKALKIDGPVLIVTDSFYVAESVNKELPYWQSNGFFNNKKKPLKHVSKWKSIADCIQLKPDIIIIHEKGHQPTASTFHTEGNNLADKLATQGSYVVNAGKRTADGSEFEKRTADGSEFESPKKKAKVE

SEQ ID NO: 551 - protein, 2079 aa, synthetic construct
MPAAKRVKLDGGDKKYSIGLDIGTNSVGWAVITDEYKVPSKKFKVLGNTDRHSIKKNLIGALLFDSGETAEATRLKRTARRRYTRRKNRICYLQEIFSNEMAKVDDSFFHRLEESFLVEEDKKHERHPIFGNIVDEVAYHEKYPTIYHLRKKLVDSTDKADLRLIYLALAHMIKFRGHFLIEGDLNPDNSDVDKLFIQLVQTYNQLFEENPINASGVDAKAILSARLSKSRRLENLIAQLPGEKKNGLFGNLIALSLGLTPNFKSNFDLAEDAKLQLSKDTYDDDLDNLLAQIGDQYADLFLAAKNLSDAILLSDILRVNTEITKAPLSASMIKRYDEHHQDLTLLKALVRQQLPEKYKEIFFDQSKNGYAGYIDGGASQEEFYKFIKPILEKMDGTEELLVKLNREDLLRKQRTFDNGSIPHQIHLGELHAILRRQEDFYPFLKDNREKIEKILTFRIPYYVGPLARGNSRFAWMTRKSEETITPWNFEEVVDKGASAQSFIERMTNFDKNLPNEKVLPKHSLLYEYFTVYNELTKVKYVTEGMRKPAFLSGEQKKAIVDLLFKTNRKVTVKQLKEDYFKKIECFDSVEISGVEDRFNASLGTYHDLLKIIKDKDFLDNEENEDILEDIVLTLTLFEDREMIEERLKTYAHLFDDKVMKQLKRRRYTGWGRLSRKLINGIRDKQSGKTILDFLKSDGFANRNFMQLIHDDSLTFKEDIQKAQVSGQGDSLHEHIANLAGSPAIKKGILQTVKVVDELVKVMGRHKPENIVIEMARENQTTQKGQKNSRERMKRIEEGIKELGSQILKEHPVENTQLQNEKLYLYYLQNGRDMYVDQELDINRLSDYDVDHIVPQSFLKDDSIDNKVLTRSDKARGKSDNVPSEEVVKKMKNYWRQLLNAKLITQRKFDNLTKAERGGLSELDKAGFIKRQLVETRQITKHVAQILDSRMNTKYDENDKLIREVKVITLKSKLVSDFRKDFQFYKVREINNYHHAHDAYLNAVVGTALIKKYPKLESEFVYGDYKVYDVRKMIAKSEQEIGKATAKYFFYSNIMNFFKTEITLANGEIRKRPLIETNGETGEIVWDKGRDFATVRKVLSMPQVNIVKKTEVQTGGFSKESILPKRNSDKLIARKKDWDPKKYGGFDSPTVAYSVLVVAKVEKGKSKKLKSVKELLGITIMERSSFEKNPIDFLEAKGYKEVKKDLIIKLPKYSLFELENGRKRMLASAGELQKGNELALPSKYVNFLYLASHYEKLKGSPEDNEQKQLFVEQHKHYLDEIIEQISEFSKRVILADANLDKVLSAYNKHRDKPIREQAENIIHLFTLTNLGAPAAFKYFDTTIDRKRYTSTKEVLDATLIHQSITGLYETRIDLSQLGGDGGGSSGGIPWLMKKPLQLTTLVPLQEYEERLLKQTMLTGSYKEKLQSLFLKYDALWQHWENQVGHRRIKPHHIATGTVNPRPQKQYPINPKAKASIQTVINDLLKQGVLIQQNSIMNTPVYPVPKPDGKWRMVLDYREVNKTIPLIAAQNQHSAGILSSIFRGKYKTTLDLSNGFWAHSITPESYWLTAFTWLGQQYCWTRLPQGFLNSPALFNADVVDLLKEVPNVQVYVDDIYISHDDPREHLEQLEKVFSLLLNAGYVVSLKKSEIAQHEVEFLGFNITKEGRGLTETFKQKLLNITPPRDLKQLQSILGKLNFARNFIPNFSELVKPLYNIIATAPGKYITWTTDNSQQLQNIISMLNSAENLEERNPEVRLIMKVNTSPSAGYIRFYNEFAKRPIMYLNYVYTKAEVKFTNTEKLLTTIHKGLIKALDLGMGQEILVYSPIVSMTKIQKTPLPERKALPIRWITWMSYLEDPRIQFHYDKTLPELQQVPTVTDDIIAKIKHPSEFSMVFYTDGSAIKHPNVNKSHNAGMGIAQVQFKPEFTVINTWSIPLGDHTAQLAEVAAVEFACKKALKIDGPVLIVTDSFYVAESVNKELPYWQSNGFFNNKKKPLKHVSKWKSIADCIQLKPDIIIIHEKGHQPTASTFHTEGNNLADKLATQGSYVVNAGKRTADGSEFEKRTADGSEFESPKKKAKVE

SEQ ID NO: 552 - protein, 2079 aa, synthetic construct
MPAAKRVKLDGGDKKYSIGLDIGTNSVGWAVITDEYKVPSKKFKVLGNTDRHSIKKNLIGALLFDSGETAEATRLKRTARRRYTRRKNRICYLQEIFSNEMAKVDDSFFHRLEESFLVEEDKKHERHPIFGNIVDEVAYHEKYPTIYHLRKKLVDSTDKADLRLIYLALAHMIKFRGHFLIEGDLNPDNSDVDKLFIQLVQTYNQLFEENPINASGVDAKAILSARLSKSRRLENLIAQLPGEKKNGLFGNLIALSLGLTPNFKSNFDLAEDAKLQLSKDTYDDDLDNLLAQIGDQYADLFLAAKNLSDAILLSDILRVNTEITKAPLSASMIKRYDEHHQDLTLLKALVRQQLPEKYKEIFFDQSKNGYAGYIDGGASQEEFYKFIKPILEKMDGTEELLVKLNREDLLRKQRTFDNGSIPHQIHLGELHAILRRQEDFYPFLKDNREKIEKILTFRIPYYVGPLARGNSRFAWMTRKSEETITPWNFEEVVDKGASAQSFIERMTNFDKNLPNEKVLPKHSLLYEYFTVYNELTKVKYVTEGMRKPAFLSGEQKKAIVDLLFKTNRKVTVKQLKEDYFKKIECFDSVEISGVEDRFNASLGTYHDLLKIIKDKDFLDNEENEDILEDIVLTLTLFEDREMIEERLKTYAHLFDDKVMKQLKRRRYTGWGRLSRKLINGIRDKQSGKTILDFLKSDGFANRNFMQLIHDDSLTFKEDIQKAQVSGQGDSLHEHIANLAGSPAIKKGILQTVKVVDELVKVMGRHKPENIVIEMARENQTTQKGQKNSRERMKRIEEGIKELGSQILKEHPVENTQLQNEKLYLYYLQNGRDMYVDQELDINRLSDYDVDHIVPQSFLKDDSIDNKVLTRSDKARGKSDNVPSEEVVKKMKNYWRQLLNAKLITQRKFDNLTKAERGGLSELDKAGFIKRQLVETRQITKHVAQILDSRMNTKYDENDKLIREVKVITLKSKLVSDFRKDFQFYKVREINNYHHAHDAYLNAVVGTALIKKYPKLESEFVYGDYKVYDVRKMIAKSEQEIGKATAKYFFYSNIMNFFKTEITLANGEIRKRPLIETNGETGEIVWDKGRDFATVRKVLSMPQVNIVKKTEVQTGGFSKESILPKRNSDKLIARKKDWDPKKYGGFDSPTVAYSVLVVAKVEKGKSKKLKSVKELLGITIMERSSFEKNPIDFLEAKGYKEVKKDLIIKLPKYSLFELENGRKRMLASAGELQKGNELALPSKYVNFLYLASHYEKLKGSPEDNEQKQLFVEQHKHYLDEIIEQISEFSKRVILADANLDKVLSAYNKHRDKPIREQAENIIHLFTLTNLGAPAAFKYFDTTIDRKRYTSTKEVLDATLIHQSITGLYETRIDLSQLGGDGGGGSGGIPWLMKKPLQLTTLVPLQEYEERLLKQTMLTGSYKEKLQSLFLKYDALWQHWENQVGHRRIKPHHIATGTVNPRPQKQYPINPKAKASIQTVINDLLKQGVLIQQNSIMNTPVYPVPKPDGKWRMVLDYREVNKTIPLIAAQNQHSAGILSSIFRGKYKTTLDLSNGFWAHSITPESYWLTAFTWLGQQYCWTRLPQGFLNSPALFNADVVDLLKEVPNVQVYVDDIYISHDDPREHLEQLEKVFSLLLNAGYVVSLKKSEIAQHEVEFLGFNITKEGRGLTETFKQKLLNITPPRDLKQLQSILGKLNFARNFIPNFSELVKPLYNIIATAPGKYITWTTDNSQQLQNIISMLNSAENLEERNPEVRLIMKVNTSPSAGYIRFYNEFAKRPIMYLNYVYTKAEVKFTNTEKLLTTIHKGLIKALDLGMGQEILVYSPIVSMTKIQKTPLPERKALPIRWITWMSYLEDPRIQFHYDKTLPELQQVPTVTDDIIAKIKHPSEFSMVFYTDGSAIKHPNVNKSHNAGMGIAQVQFKPEFTVINTWSIPLGDHTAQLAEVAAVEFACKKALKIDGPVLIVTDSFYVAESVNKELPYWQSNGFFNNKKKPLKHVSKWKSIADCIQLKPDIIIIHEKGHQPTASTFHTEGNNLADKLATQGSYVVNAGKRTADGSEFEKRTADGSEFESPKKKAKVE

SEQ ID NO: 553 - protein, 2087 aa, synthetic construct
MPAAKRVKLDGGDKKYSIGLDIGTNSVGWAVITDEYKVPSKKFKVLGNTDRHSIKKNLIGALLFDSGETAEATRLKRTARRRYTRRKNRICYLQEIFSNEMAKVDDSFFHRLEESFLVEEDKKHERHPIFGNIVDEVAYHEKYPTIYHLRKKLVDSTDKADLRLIYLALAHMIKFRGHFLIEGDLNPDNSDVDKLFIQLVQTYNQLFEENPINASGVDAKAILSARLSKSRRLENLIAQLPGEKKNGLFGNLIALSLGLTPNFKSNFDLAEDAKLQLSKDTYDDDLDNLLAQIGDQYADLFLAAKNLSDAILLSDILRVNTEITKAPLSASMIKRYDEHHQDLTLLKALVRQQLPEKYKEIFFDQSKNGYAGYIDGGASQEEFYKFIKPILEKMDGTEELLVKLNREDLLRKQRTFDNGSIPHQIHLGELHAILRRQEDFYPFLKDNREKIEKILTFRIPYYVGPLARGNSRFAWMTRKSEETITPWNFEEVVDKGASAQSFIERMTNFDKNLPNEKVLPKHSLLYEYFTVYNELTKVKYVTEGMRKPAFLSGEQKKAIVDLLFKTNRKVTVKQLKEDYFKKIECFDSVEISGVEDRFNASLGTYHDLLKIIKDKDFLDNEENEDILEDIVLTLTLFEDREMIEERLKTYAHLFDDKVMKQLKRRRYTGWGRLSRKLINGIRDKQSGKTILDFLKSDGFANRNFMQLIHDDSLTFKEDIQKAQVSGQGDSLHEHIANLAGSPAIKKGILQTVKVVDELVKVMGRHKPENIVIEMARENQTTQKGQKNSRERMKRIEEGIKELGSQILKEHPVENTQLQNEKLYLYYLQNGRDMYVDQELDINRLSDYDVDHIVPQSFLKDDSIDNKVLTRSDKARGKSDNVPSEEVVKKMKNYWRQLLNAKLITQRKFDNLTKAERGGLSELDKAGFIKRQLVETRQITKHVAQILDSRMNTKYDENDKLIREVKVITLKSKLVSDFRKDFQFYKVREINNYHHAHDAYLNAVVGTALIKKYPKLESEFVYGDYKVYDVRKMIAKSEQEIGKATAKYFFYSNIMNFFKTEITLANGEIRKRPLIETNGETGEIVWDKGRDFATVRKVLSMPQVNIVKKTEVQTGGFSKESILPKRNSDKLIARKKDWDPKKYGGFDSPTVAYSVLVVAKVEKGKSKKLKSVKELLGITIMERSSFEKNPIDFLEAKGYKEVKKDLIIKLPKYSLFELENGRKRMLASAGELQKGNELALPSKYVNFLYLASHYEKLKGSPEDNEQKQLFVEQHKHYLDEIIEQISEFSKRVILADANLDKVLSAYNKHRDKPIREQAENIIHLFTLTNLGAPAAFKYFDTTIDRKRYTSTKEVLDATLIHQSITGLYETRIDLSQLGGDGGGSSEAAAKPAPGGIPWLMKKPLQLTTLVPLQEYEERLLKQTMLTGSYKEKLQSLFLKYDALWQHWENQVGHRRIKPHHIATGTVNPRPQKQYPINPKAKASIQTVINDLLKQGVLIQQNSIMNTPVYPVPKPDGKWRMVLDYREVNKTIPLIAAQNQHSAGILSSIFRGKYKTTLDLSNGFWAHSITPESYWLTAFTWLGQQYCWTRLPQGFLNSPALFNADVVDLLKEVPNVQVYVDDIYISHDDPREHLEQLEKVFSLLLNAGYVVSLKKSEIAQHEVEFLGFNITKEGRGLTETFKQKLLNITPPRDLKQLQSILGKLNFARNFIPNFSELVKPLYNIIATAPGKYITWTTDNSQQLQNIISMLNSAENLEERNPEVRLIMKVNTSPSAGYIRFYNEFAKRPIMYLNYVYTKAEVKFTNTEKLLTTIHKGLIKALDLGMGQEILVYSPIVSMTKIQKTPLPERKALPIRWITWMSYLEDPRIQFHYDKTLPELQQVPTVTDDIIAKIKHPSEFSMVFYTDGSAIKHPNVNKSHNAGMGIAQVQFKPEFTVINTWSIPLGDHTAQLAEVAAVEFACKKALKIDGPVLIVTDSFYVAESVNKELPYWQSNGFFNNKKKPLKHVSKWKSIADCIQLKPDIIIIHEKGHQPTASTFHTEGNNLADKLATQGSYVVNAGKRTADGSEFEKRTADGSEFESPKKKAKVE

SEQ ID NO: 554 - protein, 2081 aa, synthetic construct
MPAAKRVKLDGGDKKYSIGLDIGTNSVGWAVITDEYKVPSKKFKVLGNTDRHSIKKNLIGALLFDSGETAEATRLKRTARRRYTRRKNRICYLQEIFSNEMAKVDDSFFHRLEESFLVEEDKKHERHPIFGNIVDEVAYHEKYPTIYHLRKKLVDSTDKADLRLIYLALAHMIKFRGHFLIEGDLNPDNSDVDKLFIQLVQTYNQLFEENPINASGVDAKAILSARLSKSRRLENLIAQLPGEKKNGLFGNLIALSLGLTPNFKSNFDLAEDAKLQLSKDTYDDDLDNLLAQIGDQYADLFLAAKNLSDAILLSDILRVNTEITKAPLSASMIKRYDEHHQDLTLLKALVRQQLPEKYKEIFFDQSKNGYAGYIDGGASQEEFYKFIKPILEKMDGTEELLVKLNREDLLRKQRTFDNGSIPHQIHLGELHAILRRQEDFYPFLKDNREKIEKILTFRIPYYVGPLARGNSRFAWMTRKSEETITPWNFEEVVDKGASAQSFIERMTNFDKNLPNEKVLPKHSLLYEYFTVYNELTKVKYVTEGMRKPAFLSGEQKKAIVDLLFKTNRKVTVKQLKEDYFKKIECFDSVEISGVEDRFNASLGTYHDLLKIIKDKDFLDNEENEDILEDIVLTLTLFEDREMIEERLKTYAHLFDDKVMKQLKRRRYTGWGRLSRKLINGIRDKQSGKTILDFLKSDGFANRNFMQLIHDDSLTFKEDIQKAQVSGQGDSLHEHIANLAGSPAIKKGILQTVKVVDELVKVMGRHKPENIVIEMARENQTTQKGQKNSRERMKRIEEGIKELGSQILKEHPVENTQLQNEKLYLYYLQNGRDMYVDQELDINRLSDYDVDHIVPQSFLKDDSIDNKVLTRSDKARGKSDNVPSEEVVKKMKNYWRQLLNAKLITQRKFDNLTKAERGGLSELDKAGFIKRQLVETRQITKHVAQILDSRMNTKYDENDKLIREVKVITLKSKLVSDFRKDFQFYKVREINNYHHAHDAYLNAVVGTALIKKYPKLESEFVYGDYKVYDVRKMIAKSEQEIGKATAKYFFYSNIMNFFKTEITLANGEIRKRPLIETNGETGEIVWDKGRDFATVRKVLSMPQVNIVKKTEVQTGGFSKESILPKRNSDKLIARKKDWDPKKYGGFDSPTVAYSVLVVAKVEKGKSKKLKSVKELLGITIMERSSFEKNPIDFLEAKGYKEVKKDLIIKLPKYSLFELENGRKRMLASAGELQKGNELALPSKYVNFLYLASHYEKLKGSPEDNEQKQLFVEQHKHYLDEIIEQISEFSKRVILADANLDKVLSAYNKHRDKPIREQAENIIHLFTLTNLGAPAAFKYFDTTIDRKRYTSTKEVLDATLIHQSITGLYETRIDLSQLGGDGGEAAAKGGIPWLMKKPLQLTTLVPLQEYEERLLKQTMLTGSYKEKLQSLFLKYDALWQHWENQVGHRRIKPHHIATGTVNPRPQKQYPINPKAKASIQTVINDLLKQGVLIQQNSIMNTPVYPVPKPDGKWRMVLDYREVNKTIPLIAAQNQHSAGILSSIFRGKYKTTLDLSNGFWAHSITPESYWLTAFTWLGQQYCWTRLPQGFLNSPALFNADVVDLLKEVPNVQVYVDDIYISHDDPREHLEQLEKVFSLLLNAGYVVSLKKSEIAQHEVEFLGFNITKEGRGLTETFKQKLLNITPPRDLKQLQSILGKLNFARNFIPNFSELVKPLYNIIATAPGKYITWTTDNSQQLQNIISMLNSAENLEERNPEVRLIMKVNTSPSAGYIRFYNEFAKRPIMYLNYVYTKAEVKFTNTEKLLTTIHKGLIKALDLGMGQEILVYSPIVSMTKIQKTPLPERKALPIRWITWMSYLEDPRIQFHYDKTLPELQQVPTVTDDIIAKIKHPSEFSMVFYTDGSAIKHPNVNKSHNAGMGIAQVQFKPEFTVINTWSIPLGDHTAQLAEVAAVEFACKKALKIDGPVLIVTDSFYVAESVNKELPYWQSNGFFNNKKKPLKHVSKWKSIADCIQLKPDIIIIHEKGHQPTASTFHTEGNNLADKLATQGSYVVNAGKRTADGSEFEKRTADGSEFESPKKKAKVE

SEQ ID NO: 555 - protein, 2087 aa, synthetic construct
MPAAKRVKLDGGDKKYSIGLDIGTNSVGWAVITDEYKVPSKKFKVLGNTDRHSIKKNLIGALLFDSGETAEATRLKRTARRRYTRRKNRICYLQEIFSNEMAKVDDSFFHRLEESFLVEEDKKHERHPIFGNIVDEVAYHEKYPTIYHLRKKLVDSTDKADLRLIYLALAHMIKFRGHFLIEGDLNPDNSDVDKLFIQLVQTYNQLFEENPINASGVDAKAILSARLSKSRRLENLIAQLPGEKKNGLFGNLIALSLGLTPNFKSNFDLAEDAKLQLSKDTYDDDLDNLLAQIGDQYADLFLAAKNLSDAILLSDILRVNTEITKAPLSASMIKRYDEHHQDLTLLKALVRQQLPEKYKEIFFDQSKNGYAGYIDGGASQEEFYKFIKPILEKMDGTEELLVKLNREDLLRKQRTFDNGSIPHQIHLGELHAILRRQEDFYPFLKDNREKIEKILTFRIPYYVGPLARGNSRFAWMTRKSEETITPWNFEEVVDKGASAQSFIERMTNFDKNLPNEKVLPKHSLLYEYFTVYNELTKVKYVTEGMRKPAFLSGEQKKAIVDLLFKTNRKVTVKQLKEDYFKKIECFDSVEISGVEDRFNASLGTYHDLLKIIKDKDFLDNEENEDILEDIVLTLTLFEDREMIEERLKTYAHLFDDKVMKQLKRRRYTGWGRLSRKLINGIRDKQSGKTILDFLKSDGFANRNFMQLIHDDSLTFKEDIQKAQVSGQGDSLHEHIANLAGSPAIKKGILQTVKVVDELVKVMGRHKPENIVIEMARENQTTQKGQKNSRERMKRIEEGIKELGSQILKEHPVENTQLQNEKLYLYYLQNGRDMYVDQELDINRLSDYDVDHIVPQSFLKDDSIDNKVLTRSDKARGKSDNVPSEEVVKKMKNYWRQLLNAKLITQRKFDNLTKAERGGLSELDKAGFIKRQLVETRQITKHVAQILDSRMNTKYDENDKLIREVKVITLKSKLVSDFRKDFQFYKVREINNYHHAHDAYLNAVVGTALIKKYPKLESEFVYGDYKVYDVRKMIAKSEQEIGKATAKYFFYSNIMNFFKTEITLANGEIRKRPLIETNGETGEIVWDKGRDFATVRKVLSMPQVNIVKKTEVQTGGFSKESILPKRNSDKLIARKKDWDPKKYGGFDSPTVAYSVLVVAKVEKGKSKKLKSVKELLGITIMERSSFEKNPIDFLEAKGYKEVKKDLIIKLPKYSLFELENGRKRMLASAGELQKGNELALPSKYVNFLYLASHYEKLKGSPEDNEQKQLFVEQHKHYLDEIIEQISEFSKRVILADANLDKVLSAYNKHRDKPIREQAENIIHLFTLTNLGAPAAFKYFDTTIDRKRYTSTKEVLDATLIHQSITGLYETRIDLSQLGGDGGEAAAKGGSGGGGGIPWLMKKPLQLTTLVPLQEYEERLLKQTMLTGSYKEKLQSLFLKYDALWQHWENQVGHRRIKPHHIATGTVNPRPQKQYPINPKAKASIQTVINDLLKQGVLIQQNSIMNTPVYPVPKPDGKWRMVLDYREVNKTIPLIAAQNQHSAGILSSIFRGKYKTTLDLSNGFWAHSITPESYWLTAFTWLGQQYCWTRLPQGFLNSPALFNADVVDLLKEVPNVQVYVDDIYISHDDPREHLEQLEKVFSLLLNAGYVVSLKKSEIAQHEVEFLGFNITKEGRGLTETFKQKLLNITPPRDLKQLQSILGKLNFARNFIPNFSELVKPLYNIIATAPGKYITWTTDNSQQLQNIISMLNSAENLEERNPEVRLIMKVNTSPSAGYIRFYNEFAKRPIMYLNYVYTKAEVKFTNTEKLLTTIHKGLIKALDLGMGQEILVYSPIVSMTKIQKTPLPERKALPIRWITWMSYLEDPRIQFHYDKTLPELQQVPTVTDDIIAKIKHPSEFSMVFYTDGSAIKHPNVNKSHNAGMGIAQVQFKPEFTVINTWSIPLGDHTAQLAEVAAVEFACKKALKIDGPVLIVTDSFYVAESVNKELPYWQSNGFFNNKKKPLKHVSKWKSIADCIQLKPDIIIIHEKGHQPTASTFHTEGNNLADKLATQGSYVVNAGKRTADGSEFEKRTADGSEFESPKKKAKVE

SEQ ID NO: 556 - protein, 2096 aa, synthetic construct
MPAAKRVKLDGGDKKYSIGLDIGTNSVGWAVITDEYKVPSKKFKVLGNTDRHSIKKNLIGALLFDSGETAEATRLKRTARRRYTRRKNRICYLQEIFSNEMAKVDDSFFHRLEESFLVEEDKKHERHPIFGNIVDEVAYHEKYPTIYHLRKKLVDSTDKADLRLIYLALAHMIKFRGHFLIEGDLNPDNSDVDKLFIQLVQTYNQLFEENPINASGVDAKAILSARLSKSRRLENLIAQLPGEKKNGLFGNLIALSLGLTPNFKSNFDLAEDAKLQLSKDTYDDDLDNLLAQIGDQYADLFLAAKNLSDAILLSDILRVNTEITKAPLSASMIKRYDEHHQDLTLLKALVRQQLPEKYKEIFFDQSKNGYAGYIDGGASQEEFYKFIKPILEKMDGTEELLVKLNREDLLRKQRTFDNGSIPHQIHLGELHAILRRQEDFYPFLKDNREKIEKILTFRIPYYVGPLARGNSRFAWMTRKSEETITPWNFEEVVDKGASAQSFIERMTNFDKNLPNEKVLPKHSLLYEYFTVYNELTKVKYVTEGMRKPAFLSGEQKKAIVDLLFKTNRKVTVKQLKEDYFKKIECFDSVEISGVEDRFNASLGTYHDLLKIIKDKDFLDNEENEDILEDIVLTLTLFEDREMIEERLKTYAHLFDDKVMKQLKRRRYTGWGRLSRKLINGIRDKQSGKTILDFLKSDGFANRNFMQLIHDDSLTFKEDIQKAQVSGQGDSLHEHIANLAGSPAIKKGILQTVKVVDELVKVMGRHKPENIVIEMARENQTTQKGQKNSRERMKRIEEGIKELGSQILKEHPVENTQLQNEKLYLYYLQNGRDMYVDQELDINRLSDYDVDHIVPQSFLKDDSIDNKVLTRSDKARGKSDNVPSEEVVKKMKNYWRQLLNAKLITQRKFDNLTKAERGGLSELDKAGFIKRQLVETRQITKHVAQILDSRMNTKYDENDKLIREVKVITLKSKLVSDFRKDFQFYKVREINNYHHAHDAYLNAVVGTALIKKYPKLESEFVYGDYKVYDVRKMIAKSEQEIGKATAKYFFYSNIMNFFKTEITLANGEIRKRPLIETNGETGEIVWDKGRDFATVRKVLSMPQVNIVKKTEVQTGGFSKESILPKRNSDKLIARKKDWDPKKYGGFDSPTVAYSVLVVAKVEKGKSKKLKSVKELLGITIMERSSFEKNPIDFLEAKGYKEVKKDLIIKLPKYSLFELENGRKRMLASAGELQKGNELALPSKYVNFLYLASHYEKLKGSPEDNEQKQLFVEQHKHYLDEIIEQISEFSKRVILADANLDKVLSAYNKHRDKPIREQAENIIHLFTLTNLGAPAAFKYFDTTIDRKRYTSTKEVLDATLIHQSITGLYETRIDLSQLGGDGGEAAAKEAAAKEAAAKEAAAKGGIPWLMKKPLQLTTLVPLQEYEERLLKQTMLTGSYKEKLQSLFLKYDALWQHWENQVGHRRIKPHHIATGTVNPRPQKQYPINPKAKASIQTVINDLLKQGVLIQQNSIMNTPVYPVPKPDGKWRMVLDYREVNKTIPLIAAQNQHSAGILSSIFRGKYKTTLDLSNGFWAHSITPESYWLTAFTWLGQQYCWTRLPQGFLNSPALFNADVVDLLKEVPNVQVYVDDIYISHDDPREHLEQLEKVFSLLLNAGYVVSLKKSEIAQHEVEFLGFNITKEGRGLTETFKQKLLNITPPRDLKQLQSILGKLNFARNFIPNFSELVKPLYNIIATAPGKYITWTTDNSQQLQNIISMLNSAENLEERNPEVRLIMKVNTSPSAGYIRFYNEFAKRPIMYLNYVYTKAEVKFTNTEKLLTTIHKGLIKALDLGMGQEILVYSPIVSMTKIQKTPLPERKALPIRWITWMSYLEDPRIQFHYDKTLPELQQVPTVTDDIIAKIKHPSEFSMVFYTDGSAIKHPNVNKSHNAGMGIAQVQFKPEFTVINTWSIPLGDHTAQLAEVAAVEFACKKALKIDGPVLIVTDSFYVAESVNKELPYWQSNGFFNNKKKPLKHVSKWKSIADCIQLKPDIIIIHEKGHQPTASTFHTEGNNLADKLATQGSYVVNAGKRTADGSEFEKRTADGSEFESPKKKAKVE

SEQ ID NO: 557 - protein, 2086 aa, synthetic construct
MPAAKRVKLDGGDKKYSIGLDIGTNSVGWAVITDEYKVPSKKFKVLGNTDRHSIKKNLIGALLFDSGETAEATRLKRTARRRYTRRKNRICYLQEIFSNEMAKVDDSFFHRLEESFLVEEDKKHERHPIFGNIVDEVAYHEKYPTIYHLRKKLVDSTDKADLRLIYLALAHMIKFRGHFLIEGDLNPDNSDVDKLFIQLVQTYNQLFEENPINASGVDAKAILSARLSKSRRLENLIAQLPGEKKNGLFGNLIALSLGLTPNFKSNFDLAEDAKLQLSKDTYDDDLDNLLAQIGDQYADLFLAAKNLSDAILLSDILRVNTEITKAPLSASMIKRYDEHHQDLTLLKALVRQQLPEKYKEIFFDQSKNGYAGYIDGGASQEEFYKFIKPILEKMDGTEELLVKLNREDLLRKQRTFDNGSIPHQIHLGELHAILRRQEDFYPFLKDNREKIEKILTFRIPYYVGPLARGNSRFAWMTRKSEETITPWNFEEVVDKGASAQSFIERMTNFDKNLPNEKVLPKHSLLYEYFTVYNELTKVKYVTEGMRKPAFLSGEQKKAIVDLLFKTNRKVTVKQLKEDYFKKIECFDSVEISGVEDRFNASLGTYHDLLKIIKDKDFLDNEENEDILEDIVLTLTLFEDREMIEERLKTYAHLFDDKVMKQLKRRRYTGWGRLSRKLINGIRDKQSGKTILDFLKSDGFANRNFMQLIHDDSLTFKEDIQKAQVSGQGDSLHEHIANLAGSPAIKKGILQTVKVVDELVKVMGRHKPENIVIEMARENQTTQKGQKNSRERMKRIEEGIKELGSQILKEHPVENTQLQNEKLYLYYLQNGRDMYVDQELDINRLSDYDVDHIVPQSFLKDDSIDNKVLTRSDKARGKSDNVPSEEVVKKMKNYWRQLLNAKLITQRKFDNLTKAERGGLSELDKAGFIKRQLVETRQITKHVAQILDSRMNTKYDENDKLIREVKVITLKSKLVSDFRKDFQFYKVREINNYHHAHDAYLNAVVGTALIKKYPKLESEFVYGDYKVYDVRKMIAKSEQEIGKATAKYFFYSNIMNFFKTEITLANGEIRKRPLIETNGETGEIVWDKGRDFATVRKVLSMPQVNIVKKTEVQTGGFSKESILPKRNSDKLIARKKDWDPKKYGGFDSPTVAYSVLVVAKVEKGKSKKLKSVKELLGITIMERSSFEKNPIDFLEAKGYKEVKKDLIIKLPKYSLFELENGRKRMLASAGELQKGNELALPSKYVNFLYLASHYEKLKGSPEDNEQKQLFVEQHKHYLDEIIEQISEFSKRVILADANLDKVLSAYNKHRDKPIREQAENIIHLFTLTNLGAPAAFKYFDTTIDRKRYTSTKEVLDATLIHQSITGLYETRIDLSQLGGDGGGGGGSGGGGSGGIPWLMKKPLQLTTLVPLQEYEERLLKQTMLTGSYKEKLQSLFLKYDALWQHWENQVGHRRIKPHHIATGTVNPRPQKQYPINPKAKASIQTVINDLLKQGVLIQQNSIMNTPVYPVPKPDGKWRMVLDYREVNKTIPLIAAQNQHSAGILSSIFRGKYKTTLDLSNGFWAHSITPESYWLTAFTWLGQQYCWTRLPQGFLNSPALFNADVVDLLKEVPNVQVYVDDIYISHDDPREHLEQLEKVFSLLLNAGYVVSLKKSEIAQHEVEFLGFNITKEGRGLTETFKQKLLNITPPRDLKQLQSILGKLNFARNFIPNFSELVKPLYNIIATAPGKYITWTTDNSQQLQNIISMLNSAENLEERNPEVRLIMKVNTSPSAGYIRFYNEFAKRPIMYLNYVYTKAEVKFTNTEKLLTTIHKGLIKALDLGMGQEILVYSPIVSMTKIQKTPLPERKALPIRWITWMSYLEDPRIQFHYDKTLPELQQVPTVTDDIIAKIKHPSEFSMVFYTDGSAIKHPNVNKSHNAGMGIAQVQFKPEFTVINTWSIPLGDHTAQLAEVAAVEFACKKALKIDGPVLIVTDSFYVAESVNKELPYWQSNGFFNNKKKPLKHVSKWKSIADCIQLKPDIIIIHEKGHQPTASTFHTEGNNLADKLATQGSYVVNAGKRTADGSEFEKRTADGSEFESPKKKAKVE

SEQ ID NO: 558 - protein, 2087 aa, synthetic construct
MPAAKRVKLDGGDKKYSIGLDIGTNSVGWAVITDEYKVPSKKFKVLGNTDRHSIKKNLIGALLFDSGETAEATRLKRTARRRYTRRKNRICYLQEIFSNEMAKVDDSFFHRLEESFLVEEDKKHERHPIFGNIVDEVAYHEKYPTIYHLRKKLVDSTDKADLRLIYLALAHMIKFRGHFLIEGDLNPDNSDVDKLFIQLVQTYNQLFEENPINASGVDAKAILSARLSKSRRLENLIAQLPGEKKNGLFGNLIALSLGLTPNFKSNFDLAEDAKLQLSKDTYDDDLDNLLAQIGDQYADLFLAAKNLSDAILLSDILRVNTEITKAPLSASMIKRYDEHHQDLTLLKALVRQQLPEKYKEIFFDQSKNGYAGYIDGGASQEEFYKFIKPILEKMDGTEELLVKLNREDLLRKQRTFDNGSIPHQIHLGELHAILRRQEDFYPFLKDNREKIEKILTFRIPYYVGPLARGNSRFAWMTRKSEETITPWNFEEVVDKGASAQSFIERMTNFDKNLPNEKVLPKHSLLYEYFTVYNELTKVKYVTEGMRKPAFLSGEQKKAIVDLLFKTNRKVTVKQLKEDYFKKIECFDSVEISGVEDRFNASLGTYHDLLKIIKDKDFLDNEENEDILEDIVLTLTLFEDREMIEERLKTYAHLFDDKVMKQLKRRRYTGWGRLSRKLINGIRDKQSGKTILDFLKSDGFANRNFMQLIHDDSLTFKEDIQKAQVSGQGDSLHEHIANLAGSPAIKKGILQTVKVVDELVKVMGRHKPENIVIEMARENQTTQKGQKNSRERMKRIEEGIKELGSQILKEHPVENTQLQNEKLYLYYLQNGRDMYVDQELDINRLSDYDVDHIVPQSFLKDDSIDNKVLTRSDKARGKSDNVPSEEVVKKMKNYWRQLLNAKLITQRKFDNLTKAERGGLSELDKAGFIKRQLVETRQITKHVAQILDSRMNTKYDENDKLIREVKVITLKSKLVSDFRKDFQFYKVREINNYHHAHDAYLNAVVGTALIKKYPKLESEFVYGDYKVYDVRKMIAKSEQEIGKATAKYFFYSNIMNFFKTEITLANGEIRKRPLIETNGETGEIVWDKGRDFATVRKVLSMPQVNIVKKTEVQTGGFSKESILPKRNSDKLIARKKDWDPKKYGGFDSPTVAYSVLVVAKVEKGKSKKLKSVKELLGITIMERSSFEKNPIDFLEAKGYKEVKKDLIIKLPKYSLFELENGRKRMLASAGELQKGNELALPSKYVNFLYLASHYEKLKGSPEDNEQKQLFVEQHKHYLDEIIEQISEFSKRVILADANLDKVLSAYNKHRDKPIREQAENIIHLFTLTNLGAPAAFKYFDTTIDRKRYTSTKEVLDATLIHQSITGLYETRIDLSQLGGDGGEAAAKPAPGSSGGIPWLMKKPLQLTTLVPLQEYEERLLKQTMLTGSYKEKLQSLFLKYDALWQHWENQVGHRRIKPHHIATGTVNPRPQKQYPINPKAKASIQTVINDLLKQGVLIQQNSIMNTPVYPVPKPDGKWRMVLDYREVNKTIPLIAAQNQHSAGILSSIFRGKYKTTLDLSNGFWAHSITPESYWLTAFTWLGQQYCWTRLPQGFLNSPALFNADVVDLLKEVPNVQVYVDDIYISHDDPREHLEQLEKVFSLLLNAGYVVSLKKSEIAQHEVEFLGFNITKEGRGLTETFKQKLLNITPPRDLKQLQSILGKLNFARNFIPNFSELVKPLYNIIATAPGKYITWTTDNSQQLQNIISMLNSAENLEERNPEVRLIMKVNTSPSAGYIRFYNEFAKRPIMYLNYVYTKAEVKFTNTEKLLTTIHKGLIKALDLGMGQEILVYSPIVSMTKIQKTPLPERKALPIRWITWMSYLEDPRIQFHYDKTLPELQQVPTVTDDIIAKIKHPSEFSMVFYTDGSAIKHPNVNKSHNAGMGIAQVQFKPEFTVINTWSIPLGDHTAQLAEVAAVEFACKKALKIDGPVLIVTDSFYVAESVNKELPYWQSNGFFNNKKKPLKHVSKWKSIADCIQLKPDIIIIHEKGHQPTASTFHTEGNNLADKLATQGSYVVNAGKRTADGSEFEKRTADGSEFESPKKKAKVE

SEQ ID NO: 559 - protein, 2087 aa, synthetic construct
MPAAKRVKLDGGDKKYSIGLDIGTNSVGWAVITDEYKVPSKKFKVLGNTDRHSIKKNLIGALLFDSGETAEATRLKRTARRRYTRRKNRICYLQEIFSNEMAKVDDSFFHRLEESFLVEEDKKHERHPIFGNIVDEVAYHEKYPTIYHLRKKLVDSTDKADLRLIYLALAHMIKFRGHFLIEGDLNPDNSDVDKLFIQLVQTYNQLFEENPINASGVDAKAILSARLSKSRRLENLIAQLPGEKKNGLFGNLIALSLGLTPNFKSNFDLAEDAKLQLSKDTYDDDLDNLLAQIGDQYADLFLAAKNLSDAILLSDILRVNTEITKAPLSASMIKRYDEHHQDLTLLKALVRQQLPEKYKEIFFDQSKNGYAGYIDGGASQEEFYKFIKPILEKMDGTEELLVKLNREDLLRKQRTFDNGSIPHQIHLGELHAILRRQEDFYPFLKDNREKIEKILTFRIPYYVGPLARGNSRFAWMTRKSEETITPWNFEEVVDKGASAQSFIERMTNFDKNLPNEKVLPKHSLLYEYFTVYNELTKVKYVTEGMRKPAFLSGEQKKAIVDLLFKTNRKVTVKQLKEDYFKKIECFDSVEISGVEDRFNASLGTYHDLLKIIKDKDFLDNEENEDILEDIVLTLTLFEDREMIEERLKTYAHLFDDKVMKQLKRRRYTGWGRLSRKLINGIRDKQSGKTILDFLKSDGFANRNFMQLIHDDSLTFKEDIQKAQVSGQGDSLHEHIANLAGSPAIKKGILQTVKVVDELVKVMGRHKPENIVIEMARENQTTQKGQKNSRERMKRIEEGIKELGSQILKEHPVENTQLQNEKLYLYYLQNGRDMYVDQELDINRLSDYDVDHIVPQSFLKDDSIDNKVLTRSDKARGKSDNVPSEEVVKKMKNYWRQLLNAKLITQRKFDNLTKAERGGLSELDKAGFIKRQLVETRQITKHVAQILDSRMNTKYDENDKLIREVKVITLKSKLVSDFRKDFQFYKVREINNYHHAHDAYLNAVVGTALIKKYPKLESEFVYGDYKVYDVRKMIAKSEQEIGKATAKYFFYSNIMNFFKTEITLANGEIRKRPLIETNGETGEIVWDKGRDFATVRKVLSMPQVNIVKKTEVQTGGFSKESILPKRNSDKLIARKKDWDPKKYGGFDSPTVAYSVLVVAKVEKGKSKKLKSVKELLGITIMERSSFEKNPIDFLEAKGYKEVKKDLIIKLPKYSLFELENGRKRMLASAGELQKGNELALPSKYVNFLYLASHYEKLKGSPEDNEQKQLFVEQHKHYLDEIIEQISEFSKRVILADANLDKVLSAYNKHRDKPIREQAENIIHLFTLTNLGAPAAFKYFDTTIDRKRYTSTKEVLDATLIHQSITGLYETRIDLSQLGGDGGPAPEAAAKGGGGGIPWLMKKPLQLTTLVPLQEYEERLLKQTMLTGSYKEKLQSLFLKYDALWQHWENQVGHRRIKPHHIATGTVNPRPQKQYPINPKAKASIQTVINDLLKQGVLIQQNSIMNTPVYPVPKPDGKWRMVLDYREVNKTIPLIAAQNQHSAGILSSIFRGKYKTTLDLSNGFWAHSITPESYWLTAFTWLGQQYCWTRLPQGFLNSPALFNADVVDLLKEVPNVQVYVDDIYISHDDPREHLEQLEKVFSLLLNAGYVVSLKKSEIAQHEVEFLGFNITKEGRGLTETFKQKLLNITPPRDLKQLQSILGKLNFARNFIPNFSELVKPLYNIIATAPGKYITWTTDNSQQLQNIISMLNSAENLEERNPEVRLIMKVNTSPSAGYIRFYNEFAKRPIMYLNYVYTKAEVKFTNTEKLLTTIHKGLIKALDLGMGQEILVYSPIVSMTKIQKTPLPERKALPIRWITWMSYLEDPRIQFHYDKTLPELQQVPTVTDDIIAKIKHPSEFSMVFYTDGSAIKHPNVNKSHNAGMGIAQVQFKPEFTVINTWSIPLGDHTAQLAEVAAVEFACKKALKIDGPVLIVTDSFYVAESVNKELPYWQSNGFFNNKKKPLKHVSKWKSIADCIQLKPDIIIIHEKGHQPTASTFHTEGNNLADKLATQGSYVVNAGKRTADGSEFEKRTADGSEFESPKKKAKVE

SEQ ID NO: 560 - protein, 2083 aa, synthetic construct
MPAAKRVKLDGGDKKYSIGLDIGTNSVGWAVITDEYKVPSKKFKVLGNTDRHSIKKNLIGALLFDSGETAEATRLKRTARRRYTRRKNRICYLQEIFSNEMAKVDDSFFHRLEESFLVEEDKKHERHPIFGNIVDEVAYHEKYPTIYHLRKKLVDSTDKADLRLIYLALAHMIKFRGHFLIEGDLNPDNSDVDKLFIQLVQTYNQLFEENPINASGVDAKAILSARLSKSRRLENLIAQLPGEKKNGLFGNLIALSLGLTPNFKSNFDLAEDAKLQLSKDTYDDDLDNLLAQIGDQYADLFLAAKNLSDAILLSDILRVNTEITKAPLSASMIKRYDEHHQDLTLLKALVRQQLPEKYKEIFFDQSKNGYAGYIDGGASQEEFYKFIKPILEKMDGTEELLVKLNREDLLRKQRTFDNGSIPHQIHLGELHAILRRQEDFYPFLKDNREKIEKILTFRIPYYVGPLARGNSRFAWMTRKSEETITPWNFEEVVDKGASAQSFIERMTNFDKNLPNEKVLPKHSLLYEYFTVYNELTKVKYVTEGMRKPAFLSGEQKKAIVDLLFKTNRKVTVKQLKEDYFKKIECFDSVEISGVEDRFNASLGTYHDLLKIIKDKDFLDNEENEDILEDIVLTLTLFEDREMIEERLKTYAHLFDDKVMKQLKRRRYTGWGRLSRKLINGIRDKQSGKTILDFLKSDGFANRNFMQLIHDDSLTFKEDIQKAQVSGQGDSLHEHIANLAGSPAIKKGILQTVKVVDELVKVMGRHKPENIVIEMARENQTTQKGQKNSRERMKRIEEGIKELGSQILKEHPVENTQLQNEKLYLYYLQNGRDMYVDQELDINRLSDYDVDHIVPQSFLKDDSIDNKVLTRSDKARGKSDNVPSEEVVKKMKNYWRQLLNAKLITQRKFDNLTKAERGGLSELDKAGFIKRQLVETRQITKHVAQILDSRMNTKYDENDKLIREVKVITLKSKLVSDFRKDFQFYKVREINNYHHAHDAYLNAVVGTALIKKYPKLESEFVYGDYKVYDVRKMIAKSEQEIGKATAKYFFYSNIMNFFKTEITLANGEIRKRPLIETNGETGEIVWDKGRDFATVRKVLSMPQVNIVKKTEVQTGGFSKESILPKRNSDKLIARKKDWDPKKYGGFDSPTVAYSVLVVAKVEKGKSKKLKSVKELLGITIMERSSFEKNPIDFLEAKGYKEVKKDLIIKLPKYSLFELENGRKRMLASAGELQKGNELALPSKYVNFLYLASHYEKLKGSPEDNEQKQLFVEQHKHYLDEIIEQISEFSKRVILADANLDKVLSAYNKHRDKPIREQAENIIHLFTLTNLGAPAAFKYFDTTIDRKRYTSTKEVLDATLIHQSITGLYETRIDLSQLGGDGGPAPAPAPGGIPWLMKKPLQLTTLVPLQEYEERLLKQTMLTGSYKEKLQSLFLKYDALWQHWENQVGHRRIKPHHIATGTVNPRPQKQYPINPKAKASIQTVINDLLKQGVLIQQNSIMNTPVYPVPKPDGKWRMVLDYREVNKTIPLIAAQNQHSAGILSSIFRGKYKTTLDLSNGFWAHSITPESYWLTAFTWLGQQYCWTRLPQGFLNSPALFNADVVDLLKEVPNVQVYVDDIYISHDDPREHLEQLEKVFSLLLNAGYVVSLKKSEIAQHEVEFLGFNITKEGRGLTETFKQKLLNITPPRDLKQLQSILGKLNFARNFIPNFSELVKPLYNIIATAPGKYITWTTDNSQQLQNIISMLNSAENLEERNPEVRLIMKVNTSPSAGYIRFYNEFAKRPIMYLNYVYTKAEVKFTNTEKLLTTIHKGLIKALDLGMGQEILVYSPIVSMTKIQKTPLPERKALPIRWITWMSYLEDPRIQFHYDKTLPELQQVPTVTDDIIAKIKHPSEFSMVFYTDGSAIKHPNVNKSHNAGMGIAQVQFKPEFTVINTWSIPLGDHTAQLAEVAAVEFACKKALKIDGPVLIVTDSFYVAESVNKELPYWQSNGFFNNKKKPLKHVSKWKSIADCIQLKPDIIIIHEKGHQPTASTFHTEGNNLADKLATQGSYVVNAGKRTADGSEFEKRTADGSEFESPKKKAKVE

SEQ ID NO: 561 - protein, 2087 aa, synthetic construct
MPAAKRVKLDGGDKKYSIGLDIGTNSVGWAVITDEYKVPSKKFKVLGNTDRHSIKKNLIGALLFDSGETAEATRLKRTARRRYTRRKNRICYLQEIFSNEMAKVDDSFFHRLEESFLVEEDKKHERHPIFGNIVDEVAYHEKYPTIYHLRKKLVDSTDKADLRLIYLALAHMIKFRGHFLIEGDLNPDNSDVDKLFIQLVQTYNQLFEENPINASGVDAKAILSARLSKSRRLENLIAQLPGEKKNGLFGNLIALSLGLTPNFKSNFDLAEDAKLQLSKDTYDDDLDNLLAQIGDQYADLFLAAKNLSDAILLSDILRVNTEITKAPLSASMIKRYDEHHQDLTLLKALVRQQLPEKYKEIFFDQSKNGYAGYIDGGASQEEFYKFIKPILEKMDGTEELLVKLNREDLLRKQRTFDNGSIPHQIHLGELHAILRRQEDFYPFLKDNREKIEKILTFRIPYYVGPLARGNSRFAWMTRKSEETITPWNFEEVVDKGASAQSFIERMTNFDKNLPNEKVLPKHSLLYEYFTVYNELTKVKYVTEGMRKPAFLSGEQKKAIVDLLFKTNRKVTVKQLKEDYFKKIECFDSVEISGVEDRFNASLGTYHDLLKIIKDKDFLDNEENEDILEDIVLTLTLFEDREMIEERLKTYAHLFDDKVMKQLKRRRYTGWGRLSRKLINGIRDKQSGKTILDFLKSDGFANRNFMQLIHDDSLTFKEDIQKAQVSGQGDSLHEHIANLAGSPAIKKGILQTVKVVDELVKVMGRHKPENIVIEMARENQTTQKGQKNSRERMKRIEEGIKELGSQILKEHPVENTQLQNEKLYLYYLQNGRDMYVDQELDINRLSDYDVDHIVPQSFLKDDSIDNKVLTRSDKARGKSDNVPSEEVVKKMKNYWRQLLNAKLITQRKFDNLTKAERGGLSELDKAGFIKRQLVETRQITKHVAQILDSRMNTKYDENDKLIREVKVITLKSKLVSDFRKDFQFYKVREINNYHHAHDAYLNAVVGTALIKKYPKLESEFVYGDYKVYDVRKMIAKSEQEIGKATAKYFFYSNIMNFFKTEITLANGEIRKRPLIETNGETGEIVWDKGRDFATVRKVLSMPQVNIVKKTEVQTGGFSKESILPKRNSDKLIARKKDWDPKKYGGFDSPTVAYSVLVVAKVEKGKSKKLKSVKELLGITIMERSSFEKNPIDFLEAKGYKEVKKDLIIKLPKYSLFELENGRKRMLASAGELQKGNELALPSKYVNFLYLASHYEKLKGSPEDNEQKQLFVEQHKHYLDEIIEQISEFSKRVILADANLDKVLSAYNKHRDKPIREQAENIIHLFTLTNLGAPAAFKYFDTTIDRKRYTSTKEVLDATLIHQSITGLYETRIDLSQLGGDGGGGSEAAAKGSSGGIPWLMKKPLQLTTLVPLQEYEERLLKQTMLTGSYKEKLQSLFLKYDALWQHWENQVGHRRIKPHHIATGTVNPRPQKQYPINPKAKASIQTVINDLLKQGVLIQQNSIMNTPVYPVPKPDGKWRMVLDYREVNKTIPLIAAQNQHSAGILSSIFRGKYKTTLDLSNGFWAHSITPESYWLTAFTWLGQQYCWTRLPQGFLNSPALFNADVVDLLKEVPNVQVYVDDIYISHDDPREHLEQLEKVFSLLLNAGYVVSLKKSEIAQHEVEFLGFNITKEGRGLTETFKQKLLNITPPRDLKQLQSILGKLNFARNFIPNFSELVKPLYNIIATAPGKYITWTTDNSQQLQNIISMLNSAENLEERNPEVRLIMKVNTSPSAGYIRFYNEFAKRPIMYLNYVYTKAEVKFTNTEKLLTTIHKGLIKALDLGMGQEILVYSPIVSMTKIQKTPLPERKALPIRWITWMSYLEDPRIQFHYDKTLPELQQVPTVTDDIIAKIKHPSEFSMVFYTDGSAIKHPNVNKSHNAGMGIAQVQFKPEFTVINTWSIPLGDHTAQLAEVAAVEFACKKALKIDGPVLIVTDSFYVAESVNKELPYWQSNGFFNNKKKPLKHVSKWKSIADCIQLKPDIIIIHEKGHQPTASTFHTEGNNLADKLATQGSYVVNAGKRTADGSEFEKRTADGSEFESPKKKAKVE

SEQ ID NO: 562 - protein, 2085 aa, synthetic construct
MPAAKRVKLDGGDKKYSIGLDIGTNSVGWAVITDEYKVPSKKFKVLGNTDRHSIKKNLIGALLFDSGETAEATRLKRTARRRYTRRKNRICYLQEIFSNEMAKVDDSFFHRLEESFLVEEDKKHERHPIFGNIVDEVAYHEKYPTIYHLRKKLVDSTDKADLRLIYLALAHMIKFRGHFLIEGDLNPDNSDVDKLFIQLVQTYNQLFEENPINASGVDAKAILSARLSKSRRLENLIAQLPGEKKNGLFGNLIALSLGLTPNFKSNFDLAEDAKLQLSKDTYDDDLDNLLAQIGDQYADLFLAAKNLSDAILLSDILRVNTEITKAPLSASMIKRYDEHHQDLTLLKALVRQQLPEKYKEIFFDQSKNGYAGYIDGGASQEEFYKFIKPILEKMDGTEELLVKLNREDLLRKQRTFDNGSIPHQIHLGELHAILRRQEDFYPFLKDNREKIEKILTFRIPYYVGPLARGNSRFAWMTRKSEETITPWNFEEVVDKGASAQSFIERMTNFDKNLPNEKVLPKHSLLYEYFTVYNELTKVKYVTEGMRKPAFLSGEQKKAIVDLLFKTNRKVTVKQLKEDYFKKIECFDSVEISGVEDRFNASLGTYHDLLKIIKDKDFLDNEENEDILEDIVLTLTLFEDREMIEERLKTYAHLFDDKVMKQLKRRRYTGWGRLSRKLINGIRDKQSGKTILDFLKSDGFANRNFMQLIHDDSLTFKEDIQKAQVSGQGDSLHEHIANLAGSPAIKKGILQTVKVVDELVKVMGRHKPENIVIEMARENQTTQKGQKNSRERMKRIEEGIKELGSQILKEHPVENTQLQNEKLYLYYLQNGRDMYVDQELDINRLSDYDVDHIVPQSFLKDDSIDNKVLTRSDKARGKSDNVPSEEVVKKMKNYWRQLLNAKLITQRKFDNLTKAERGGLSELDKAGFIKRQLVETRQITKHVAQILDSRMNTKYDENDKLIREVKVITLKSKLVSDFRKDFQFYKVREINNYHHAHDAYLNAVVGTALIKKYPKLESEFVYGDYKVYDVRKMIAKSEQEIGKATAKYFFYSNIMNFFKTEITLANGEIRKRPLIETNGETGEIVWDKGRDFATVRKVLSMPQVNIVKKTEVQTGGFSKESILPKRNSDKLIARKKDWDPKKYGGFDSPTVAYSVLVVAKVEKGKSKKLKSVKELLGITIMERSSFEKNPIDFLEAKGYKEVKKDLIIKLPKYSLFELENGRKRMLASAGELQKGNELALPSKYVNFLYLASHYEKLKGSPEDNEQKQLFVEQHKHYLDEIIEQISEFSKRVILADANLDKVLSAYNKHRDKPIREQAENIIHLFTLTNLGAPAAFKYFDTTIDRKRYTSTKEVLDATLIHQSITGLYETRIDLSQLGGDGGGSSPAPGGGGGIPWLMKKPLQLTTLVPLQEYEERLLKQTMLTGSYKEKLQSLFLKYDALWQHWENQVGHRRIKPHHIATGTVNPRPQKQYPINPKAKASIQTVINDLLKQGVLIQQNSIMNTPVYPVPKPDGKWRMVLDYREVNKTIPLIAAQNQHSAGILSSIFRGKYKTTLDLSNGFWAHSITPESYWLTAFTWLGQQYCWTRLPQGFLNSPALFNADVVDLLKEVPNVQVYVDDIYISHDDPREHLEQLEKVFSLLLNAGYVVSLKKSEIAQHEVEFLGFNITKEGRGLTETFKQKLLNITPPRDLKQLQSILGKLNFARNFIPNFSELVKPLYNIIATAPGKYITWTTDNSQQLQNIISMLNSAENLEERNPEVRLIMKVNTSPSAGYIRFYNEFAKRPIMYLNYVYTKAEVKFTNTEKLLTTIHKGLIKALDLGMGQEILVYSPIVSMTKIQKTPLPERKALPIRWITWMSYLEDPRIQFHYDKTLPELQQVPTVTDDIIAKIKHPSEFSMVFYTDGSAIKHPNVNKSHNAGMGIAQVQFKPEFTVINTWSIPLGDHTAQLAEVAAVEFACKKALKIDGPVLIVTDSFYVAESVNKELPYWQSNGFFNNKKKPLKHVSKWKSIADCIQLKPDIIIIHEKGHQPTASTFHTEGNNLADKLATQGSYVVNAGKRTADGSEFEKRTADGSEFESPKKKAKVE

SEQ ID NO: 563 - protein, 2087 aa, synthetic construct
MPAAKRVKLDGGDKKYSIGLDIGTNSVGWAVITDEYKVPSKKFKVLGNTDRHSIKKNLIGALLFDSGETAEATRLKRTARRRYTRRKNRICYLQEIFSNEMAKVDDSFFHRLEESFLVEEDKKHERHPIFGNIVDEVAYHEKYPTIYHLRKKLVDSTDKADLRLIYLALAHMIKFRGHFLIEGDLNPDNSDVDKLFIQLVQTYNQLFEENPINASGVDAKAILSARLSKSRRLENLIAQLPGEKKNGLFGNLIALSLGLTPNFKSNFDLAEDAKLQLSKDTYDDDLDNLLAQIGDQYADLFLAAKNLSDAILLSDILRVNTEITKAPLSASMIKRYDEHHQDLTLLKALVRQQLPEKYKEIFFDQSKNGYAGYIDGGASQEEFYKFIKPILEKMDGTEELLVKLNREDLLRKQRTFDNGSIPHQIHLGELHAILRRQEDFYPFLKDNREKIEKILTFRIPYYVGPLARGNSRFAWMTRKSEETITPWNFEEVVDKGASAQSFIERMTNFDKNLPNEKVLPKHSLLYEYFTVYNELTKVKYVTEGMRKPAFLSGEQKKAIVDLLFKTNRKVTVKQLKEDYFKKIECFDSVEISGVEDRFNASLGTYHDLLKIIKDKDFLDNEENEDILEDIVLTLTLFEDREMIEERLKTYAHLFDDKVMKQLKRRRYTGWGRLSRKLINGIRDKQSGKTILDFLKSDGFANRNFMQLIHDDSLTFKEDIQKAQVSGQGDSLHEHIANLAGSPAIKKGILQTVKVVDELVKVMGRHKPENIVIEMARENQTTQKGQKNSRERMKRIEEGIKELGSQILKEHPVENTQLQNEKLYLYYLQNGRDMYVDQELDINRLSDYDVDHIVPQSFLKDDSIDNKVLTRSDKARGKSDNVPSEEVVKKMKNYWRQLLNAKLITQRKFDNLTKAERGGLSELDKAGFIKRQLVETRQITKHVAQILDSRMNTKYDENDKLIREVKVITLKSKLVSDFRKDFQFYKVREINNYHHAHDAYLNAVVGTALIKKYPKLESEFVYGDYKVYDVRKMIAKSEQEIGKATAKYFFYSNIMNFFKTEITLANGEIRKRPLIETNGETGEIVWDKGRDFATVRKVLSMPQVNIVKKTEVQTGGFSKESILPKRNSDKLIARKKDWDPKKYGGFDSPTVAYSVLVVAKVEKGKSKKLKSVKELLGITIMERSSFEKNPIDFLEAKGYKEVKKDLIIKLPKYSLFELENGRKRMLASAGELQKGNELALPSKYVNFLYLASHYEKLKGSPEDNEQKQLFVEQHKHYLDEIIEQISEFSKRVILADANLDKVLSAYNKHRDKPIREQAENIIHLFTLTNLGAPAAFKYFDTTIDRKRYTSTKEVLDATLIHQSITGLYETRIDLSQLGGDGGGGSEAAAKGGGGGIPWLMKKPLQLTTLVPLQEYEERLLKQTMLTGSYKEKLQSLFLKYDALWQHWENQVGHRRIKPHHIATGTVNPRPQKQYPINPKAKASIQTVINDLLKQGVLIQQNSIMNTPVYPVPKPDGKWRMVLDYREVNKTIPLIAAQNQHSAGILSSIFRGKYKTTLDLSNGFWAHSITPESYWLTAFTWLGQQYCWTRLPQGFLNSPALFNADVVDLLKEVPNVQVYVDDIYISHDDPREHLEQLEKVFSLLLNAGYVVSLKKSEIAQHEVEFLGFNITKEGRGLTETFKQKLLNITPPRDLKQLQSILGKLNFARNFIPNFSELVKPLYNIIATAPGKYITWTTDNSQQLQNIISMLNSAENLEERNPEVRLIMKVNTSPSAGYIRFYNEFAKRPIMYLNYVYTKAEVKFTNTEKLLTTIHKGLIKALDLGMGQEILVYSPIVSMTKIQKTPLPERKALPIRWITWMSYLEDPRIQFHYDKTLPELQQVPTVTDDIIAKIKHPSEFSMVFYTDGSAIKHPNVNKSHNAGMGIAQVQFKPEFTVINTWSIPLGDHTAQLAEVAAVEFACKKALKIDGPVLIVTDSFYVAESVNKELPYWQSNGFFNNKKKPLKHVSKWKSIADCIQLKPDIIIIHEKGHQPTASTFHTEGNNLADKLATQGSYVVNAGKRTADGSEFEKRTADGSEFESPKKKAKVE

SEQ ID NO: 564 - protein, 2082 aa, synthetic construct
MPAAKRVKLDGGDKKYSIGLDIGTNSVGWAVITDEYKVPSKKFKVLGNTDRHSIKKNLIGALLFDSGETAEATRLKRTARRRYTRRKNRICYLQEIFSNEMAKVDDSFFHRLEESFLVEEDKKHERHPIFGNIVDEVAYHEKYPTIYHLRKKLVDSTDKADLRLIYLALAHMIKFRGHFLIEGDLNPDNSDVDKLFIQLVQTYNQLFEENPINASGVDAKAILSARLSKSRRLENLIAQLPGEKKNGLFGNLIALSLGLTPNFKSNFDLAEDAKLQLSKDTYDDDLDNLLAQIGDQYADLFLAAKNLSDAILLSDILRVNTEITKAPLSASMIKRYDEHHQDLTLLKALVRQQLPEKYKEIFFDQSKNGYAGYIDGGASQEEFYKFIKPILEKMDGTEELLVKLNREDLLRKQRTFDNGSIPHQIHLGELHAILRRQEDFYPFLKDNREKIEKILTFRIPYYVGPLARGNSRFAWMTRKSEETITPWNFEEVVDKGASAQSFIERMTNFDKNLPNEKVLPKHSLLYEYFTVYNELTKVKYVTEGMRKPAFLSGEQKKAIVDLLFKTNRKVTVKQLKEDYFKKIECFDSVEISGVEDRFNASLGTYHDLLKIIKDKDFLDNEENEDILEDIVLTLTLFEDREMIEERLKTYAHLFDDKVMKQLKRRRYTGWGRLSRKLINGIRDKQSGKTILDFLKSDGFANRNFMQLIHDDSLTFKEDIQKAQVSGQGDSLHEHIANLAGSPAIKKGILQTVKVVDELVKVMGRHKPENIVIEMARENQTTQKGQKNSRERMKRIEEGIKELGSQILKEHPVENTQLQNEKLYLYYLQNGRDMYVDQELDINRLSDYDVDHIVPQSFLKDDSIDNKVLTRSDKARGKSDNVPSEEVVKKMKNYWRQLLNAKLITQRKFDNLTKAERGGLSELDKAGFIKRQLVETRQITKHVAQILDSRMNTKYDENDKLIREVKVITLKSKLVSDFRKDFQFYKVREINNYHHAHDAYLNAVVGTALIKKYPKLESEFVYGDYKVYDVRKMIAKSEQEIGKATAKYFFYSNIMNFFKTEITLANGEIRKRPLIETNGETGEIVWDKGRDFATVRKVLSMPQVNIVKKTEVQTGGFSKESILPKRNSDKLIARKKDWDPKKYGGFDSPTVAYSVLVVAKVEKGKSKKLKSVKELLGITIMERSSFEKNPIDFLEAKGYKEVKKDLIIKLPKYSLFELENGRKRMLASAGELQKGNELALPSKYVNFLYLASHYEKLKGSPEDNEQKQLFVEQHKHYLDEIIEQISEFSKRVILADANLDKVLSAYNKHRDKPIREQAENIIHLFTLTNLGAPAAFKYFDTTIDRKRYTSTKEVLDATLIHQSITGLYETRIDLSQLGGDGGGGGGSSGGIPWLMKKPLQLTTLVPLQEYEERLLKQTMLTGSYKEKLQSLFLKYDALWQHWENQVGHRRIKPHHIATGTVNPRPQKQYPINPKAKASIQTVINDLLKQGVLIQQNSIMNTPVYPVPKPDGKWRMVLDYREVNKTIPLIAAQNQHSAGILSSIFRGKYKTTLDLSNGFWAHSITPESYWLTAFTWLGQQYCWTRLPQGFLNSPALFNADVVDLLKEVPNVQVYVDDIYISHDDPREHLEQLEKVFSLLLNAGYVVSLKKSEIAQHEVEFLGFNITKEGRGLTETFKQKLLNITPPRDLKQLQSILGKLNFARNFIPNFSELVKPLYNIIATAPGKYITWTTDNSQQLQNIISMLNSAENLEERNPEVRLIMKVNTSPSAGYIRFYNEFAKRPIMYLNYVYTKAEVKFTNTEKLLTTIHKGLIKALDLGMGQEILVYSPIVSMTKIQKTPLPERKALPIRWITWMSYLEDPRIQFHYDKTLPELQQVPTVTDDIIAKIKHPSEFSMVFYTDGSAIKHPNVNKSHNAGMGIAQVQFKPEFTVINTWSIPLGDHTAQLAEVAAVEFACKKALKIDGPVLIVTDSFYVAESVNKELPYWQSNGFFNNKKKPLKHVSKWKSIADCIQLKPDIIIIHEKGHQPTASTFHTEGNNLADKLATQGSYVVNAGKRTADGSEFEKRTADGSEFESPKKKAKVE

SEQ ID NO: 565 - protein, 2085 aa, synthetic construct
MPAAKRVKLDGGDKKYSIGLDIGTNSVGWAVITDEYKVPSKKFKVLGNTDRHSIKKNLIGALLFDSGETAEATRLKRTARRRYTRRKNRICYLQEIFSNEMAKVDDSFFHRLEESFLVEEDKKHERHPIFGNIVDEVAYHEKYPTIYHLRKKLVDSTDKADLRLIYLALAHMIKFRGHFLIEGDLNPDNSDVDKLFIQLVQTYNQLFEENPINASGVDAKAILSARLSKSRRLENLIAQLPGEKKNGLFGNLIALSLGLTPNFKSNFDLAEDAKLQLSKDTYDDDLDNLLAQIGDQYADLFLAAKNLSDAILLSDILRVNTEITKAPLSASMIKRYDEHHQDLTLLKALVRQQLPEKYKEIFFDQSKNGYAGYIDGGASQEEFYKFIKPILEKMDGTEELLVKLNREDLLRKQRTFDNGSIPHQIHLGELHAILRRQEDFYPFLKDNREKIEKILTFRIPYYVGPLARGNSRFAWMTRKSEETITPWNFEEVVDKGASAQSFIERMTNFDKNLPNEKVLPKHSLLYEYFTVYNELTKVKYVTEGMRKPAFLSGEQKKAIVDLLFKTNRKVTVKQLKEDYFKKIECFDSVEISGVEDRFNASLGTYHDLLKIIKDKDFLDNEENEDILEDIVLTLTLFEDREMIEERLKTYAHLFDDKVMKQLKRRRYTGWGRLSRKLINGIRDKQSGKTILDFLKSDGFANRNFMQLIHDDSLTFKEDIQKAQVSGQGDSLHEHIANLAGSPAIKKGILQTVKVVDELVKVMGRHKPENIVIEMARENQTTQKGQKNSRERMKRIEEGIKELGSQILKEHPVENTQLQNEKLYLYYLQNGRDMYVDQELDINRLSDYDVDHIVPQSFLKDDSIDNKVLTRSDKARGKSDNVPSEEVVKKMKNYWRQLLNAKLITQRKFDNLTKAERGGLSELDKAGFIKRQLVETRQITKHVAQILDSRMNTKYDENDKLIREVKVITLKSKLVSDFRKDFQFYKVREINNYHHAHDAYLNAVVGTALIKKYPKLESEFVYGDYKVYDVRKMIAKSEQEIGKATAKYFFYSNIMNFFKTEITLANGEIRKRPLIETNGETGEIVWDKGRDFATVRKVLSMPQVNIVKKTEVQTGGFSKESILPKRNSDKLIARKKDWDPKKYGGFDSPTVAYSVLVVAKVEKGKSKKLKSVKELLGITIMERSSFEKNPIDFLEAKGYKEVKKDLIIKLPKYSLFELENGRKRMLASAGELQKGNELALPSKYVNFLYLASHYEKLKGSPEDNEQKQLFVEQHKHYLDEIIEQISEFSKRVILADANLDKVLSAYNKHRDKPIREQAENIIHLFTLTNLGAPAAFKYFDTTIDRKRYTSTKEVLDATLIHQSITGLYETRIDLSQLGGDGGGGSGSSGGGGGIPWLMKKPLQLTTLVPLQEYEERLLKQTMLTGSYKEKLQSLFLKYDALWQHWENQVGHRRIKPHHIATGTVNPRPQKQYPINPKAKASIQTVINDLLKQGVLIQQNSIMNTPVYPVPKPDGKWRMVLDYREVNKTIPLIAAQNQHSAGILSSIFRGKYKTTLDLSNGFWAHSITPESYWLTAFTWLGQQYCWTRLPQGFLNSPALFNADVVDLLKEVPNVQVYVDDIYISHDDPREHLEQLEKVFSLLLNAGYVVSLKKSEIAQHEVEFLGFNITKEGRGLTETFKQKLLNITPPRDLKQLQSILGKLNFARNFIPNFSELVKPLYNIIATAPGKYITWTTDNSQQLQNIISMLNSAENLEERNPEVRLIMKVNTSPSAGYIRFYNEFAKRPIMYLNYVYTKAEVKFTNTEKLLTTIHKGLIKALDLGMGQEILVYSPIVSMTKIQKTPLPERKALPIRWITWMSYLEDPRIQFHYDKTLPELQQVPTVTDDIIAKIKHPSEFSMVFYTDGSAIKHPNVNKSHNAGMGIAQVQFKPEFTVINTWSIPLGDHTAQLAEVAAVEFACKKALKIDGPVLIVTDSFYVAESVNKELPYWQSNGFFNNKKKPLKHVSKWKSIADCIQLKPDIIIIHEKGHQPTASTFHTEGNNLADKLATQGSYVVNAGKRTADGSEFEKRTADGSEFESPKKKAKVE

SEQ ID NO: 566 - protein, 2091 aa, synthetic construct
MPAAKRVKLDGGDKKYSIGLDIGTNSVGWAVITDEYKVPSKKFKVLGNTDRHSIKKNLIGALLFDSGETAEATRLKRTARRRYTRRKNRICYLQEIFSNEMAKVDDSFFHRLEESFLVEEDKKHERHPIFGNIVDEVAYHEKYPTIYHLRKKLVDSTDKADLRLIYLALAHMIKFRGHFLIEGDLNPDNSDVDKLFIQLVQTYNQLFEENPINASGVDAKAILSARLSKSRRLENLIAQLPGEKKNGLFGNLIALSLGLTPNFKSNFDLAEDAKLQLSKDTYDDDLDNLLAQIGDQYADLFLAAKNLSDAILLSDILRVNTEITKAPLSASMIKRYDEHHQDLTLLKALVRQQLPEKYKEIFFDQSKNGYAGYIDGGASQEEFYKFIKPILEKMDGTEELLVKLNREDLLRKQRTFDNGSIPHQIHLGELHAILRRQEDFYPFLKDNREKIEKILTFRIPYYVGPLARGNSRFAWMTRKSEETITPWNFEEVVDKGASAQSFIERMTNFDKNLPNEKVLPKHSLLYEYFTVYNELTKVKYVTEGMRKPAFLSGEQKKAIVDLLFKTNRKVTVKQLKEDYFKKIECFDSVEISGVEDRFNASLGTYHDLLKIIKDKDFLDNEENEDILEDIVLTLTLFEDREMIEERLKTYAHLFDDKVMKQLKRRRYTGWGRLSRKLINGIRDKQSGKTILDFLKSDGFANRNFMQLIHDDSLTFKEDIQKAQVSGQGDSLHEHIANLAGSPAIKKGILQTVKVVDELVKVMGRHKPENIVIEMARENQTTQKGQKNSRERMKRIEEGIKELGSQILKEHPVENTQLQNEKLYLYYLQNGRDMYVDQELDINRLSDYDVDHIVPQSFLKDDSIDNKVLTRSDKARGKSDNVPSEEVVKKMKNYWRQLLNAKLITQRKFDNLTKAERGGLSELDKAGFIKRQLVETRQITKHVAQILDSRMNTKYDENDKLIREVKVITLKSKLVSDFRKDFQFYKVREINNYHHAHDAYLNAVVGTALIKKYPKLESEFVYGDYKVYDVRKMIAKSEQEIGKATAKYFFYSNIMNFFKTEITLANGEIRKRPLIETNGETGEIVWDKGRDFATVRKVLSMPQVNIVKKTEVQTGGFSKESILPKRNSDKLIARKKDWDPKKYGGFDSPTVAYSVLVVAKVEKGKSKKLKSVKELLGITIMERSSFEKNPIDFLEAKGYKEVKKDLIIKLPKYSLFELENGRKRMLASAGELQKGNELALPSKYVNFLYLASHYEKLKGSPEDNEQKQLFVEQHKHYLDEIIEQISEFSKRVILADANLDKVLSAYNKHRDKPIREQAENIIHLFTLTNLGAPAAFKYFDTTIDRKRYTSTKEVLDATLIHQSITGLYETRIDLSQLGGDGGGGSGGSGGSGGSGGSGGIPWLMKKPLQLTTLVPLQEYEERLLKQTMLTGSYKEKLQSLFLKYDALWQHWENQVGHRRIKPHHIATGTVNPRPQKQYPINPKAKASIQTVINDLLKQGVLIQQNSIMNTPVYPVPKPDGKWRMVLDYREVNKTIPLIAAQNQHSAGILSSIFRGKYKTTLDLSNGFWAHSITPESYWLTAFTWLGQQYCWTRLPQGFLNSPALFNADVVDLLKEVPNVQVYVDDIYISHDDPREHLEQLEKVFSLLLNAGYVVSLKKSEIAQHEVEFLGFNITKEGRGLTETFKQKLLNITPPRDLKQLQSILGKLNFARNFIPNFSELVKPLYNIIATAPGKYITWTTDNSQQLQNIISMLNSAENLEERNPEVRLIMKVNTSPSAGYIRFYNEFAKRPIMYLNYVYTKAEVKFTNTEKLLTTIHKGLIKALDLGMGQEILVYSPIVSMTKIQKTPLPERKALPIRWITWMSYLEDPRIQFHYDKTLPELQQVPTVTDDIIAKIKHPSEFSMVFYTDGSAIKHPNVNKSHNAGMGIAQVQFKPEFTVINTWSIPLGDHTAQLAEVAAVEFACKKALKIDGPVLIVTDSFYVAESVNKELPYWQSNGFFNNKKKPLKHVSKWKSIADCIQLKPDIIIIHEKGHQPTASTFHTEGNNLADKLATQGSYVVNAGKRTADGSEFEKRTADGSEFESPKKKAKVE

SEQ ID NO: 567 - protein, 2087 aa, synthetic construct
MPAAKRVKLDGGDKKYSIGLDIGTNSVGWAVITDEYKVPSKKFKVLGNTDRHSIKKNLIGALLFDSGETAEATRLKRTARRRYTRRKNRICYLQEIFSNEMAKVDDSFFHRLEESFLVEEDKKHERHPIFGNIVDEVAYHEKYPTIYHLRKKLVDSTDKADLRLIYLALAHMIKFRGHFLIEGDLNPDNSDVDKLFIQLVQTYNQLFEENPINASGVDAKAILSARLSKSRRLENLIAQLPGEKKNGLFGNLIALSLGLTPNFKSNFDLAEDAKLQLSKDTYDDDLDNLLAQIGDQYADLFLAAKNLSDAILLSDILRVNTEITKAPLSASMIKRYDEHHQDLTLLKALVRQQLPEKYKEIFFDQSKNGYAGYIDGGASQEEFYKFIKPILEKMDGTEELLVKLNREDLLRKQRTFDNGSIPHQIHLGELHAILRRQEDFYPFLKDNREKIEKILTFRIPYYVGPLARGNSRFAWMTRKSEETITPWNFEEVVDKGASAQSFIERMTNFDKNLPNEKVLPKHSLLYEYFTVYNELTKVKYVTEGMRKPAFLSGEQKKAIVDLLFKTNRKVTVKQLKEDYFKKIECFDSVEISGVEDRFNASLGTYHDLLKIIKDKDFLDNEENEDILEDIVLTLTLFEDREMIEERLKTYAHLFDDKVMKQLKRRRYTGWGRLSRKLINGIRDKQSGKTILDFLKSDGFANRNFMQLIHDDSLTFKEDIQKAQVSGQGDSLHEHIANLAGSPAIKKGILQTVKVVDELVKVMGRHKPENIVIEMARENQTTQKGQKNSRERMKRIEEGIKELGSQILKEHPVENTQLQNEKLYLYYLQNGRDMYVDQELDINRLSDYDVDHIVPQSFLKDDSIDNKVLTRSDKARGKSDNVPSEEVVKKMKNYWRQLLNAKLITQRKFDNLTKAERGGLSELDKAGFIKRQLVETRQITKHVAQILDSRMNTKYDENDKLIREVKVITLKSKLVSDFRKDFQFYKVREINNYHHAHDAYLNAVVGTALIKKYPKLESEFVYGDYKVYDVRKMIAKSEQEIGKATAKYFFYSNIMNFFKTEITLANGEIRKRPLIETNGETGEIVWDKGRDFATVRKVLSMPQVNIVKKTEVQTGGFSKESILPKRNSDKLIARKKDWDPKKYGGFDSPTVAYSVLVVAKVEKGKSKKLKSVKELLGITIMERSSFEKNPIDFLEAKGYKEVKKDLIIKLPKYSLFELENGRKRMLASAGELQKGNELALPSKYVNFLYLASHYEKLKGSPEDNEQKQLFVEQHKHYLDEIIEQISEFSKRVILADANLDKVLSAYNKHRDKPIREQAENIIHLFTLTNLGAPAAFKYFDTTIDRKRYTSTKEVLDATLIHQSITGLYETRIDLSQLGGDGGGSSEAAAKGGGGGIPWLMKKPLQLTTLVPLQEYEERLLKQTMLTGSYKEKLQSLFLKYDALWQHWENQVGHRRIKPHHIATGTVNPRPQKQYPINPKAKASIQTVINDLLKQGVLIQQNSIMNTPVYPVPKPDGKWRMVLDYREVNKTIPLIAAQNQHSAGILSSIFRGKYKTTLDLSNGFWAHSITPESYWLTAFTWLGQQYCWTRLPQGFLNSPALFNADVVDLLKEVPNVQVYVDDIYISHDDPREHLEQLEKVFSLLLNAGYVVSLKKSEIAQHEVEFLGFNITKEGRGLTETFKQKLLNITPPRDLKQLQSILGKLNFARNFIPNFSELVKPLYNIIATAPGKYITWTTDNSQQLQNIISMLNSAENLEERNPEVRLIMKVNTSPSAGYIRFYNEFAKRPIMYLNYVYTKAEVKFTNTEKLLTTIHKGLIKALDLGMGQEILVYSPIVSMTKIQKTPLPERKALPIRWITWMSYLEDPRIQFHYDKTLPELQQVPTVTDDIIAKIKHPSEFSMVFYTDGSAIKHPNVNKSHNAGMGIAQVQFKPEFTVINTWSIPLGDHTAQLAEVAAVEFACKKALKIDGPVLIVTDSFYVAESVNKELPYWQSNGFFNNKKKPLKHVSKWKSIADCIQLKPDIIIIHEKGHQPTASTFHTEGNNLADKLATQGSYVVNAGKRTADGSEFEKRTADGSEFESPKKKAKVE

SEQ ID NO: 568 - protein, 2085 aa, synthetic construct
MPAAKRVKLDGGDKKYSIGLDIGTNSVGWAVITDEYKVPSKKFKVLGNTDRHSIKKNLIGALLFDSGETAEATRLKRTARRRYTRRKNRICYLQEIFSNEMAKVDDSFFHRLEESFLVEEDKKHERHPIFGNIVDEVAYHEKYPTIYHLRKKLVDSTDKADLRLIYLALAHMIKFRGHFLIEGDLNPDNSDVDKLFIQLVQTYNQLFEENPINASGVDAKAILSARLSKSRRLENLIAQLPGEKKNGLFGNLIALSLGLTPNFKSNFDLAEDAKLQLSKDTYDDDLDNLLAQIGDQYADLFLAAKNLSDAILLSDILRVNTEITKAPLSASMIKRYDEHHQDLTLLKALVRQQLPEKYKEIFFDQSKNGYAGYIDGGASQEEFYKFIKPILEKMDGTEELLVKLNREDLLRKQRTFDNGSIPHQIHLGELHAILRRQEDFYPFLKDNREKIEKILTFRIPYYVGPLARGNSRFAWMTRKSEETITPWNFEEVVDKGASAQSFIERMTNFDKNLPNEKVLPKHSLLYEYFTVYNELTKVKYVTEGMRKPAFLSGEQKKAIVDLLFKTNRKVTVKQLKEDYFKKIECFDSVEISGVEDRFNASLGTYHDLLKIIKDKDFLDNEENEDILEDIVLTLTLFEDREMIEERLKTYAHLFDDKVMKQLKRRRYTGWGRLSRKLINGIRDKQSGKTILDFLKSDGFANRNFMQLIHDDSLTFKEDIQKAQVSGQGDSLHEHIANLAGSPAIKKGILQTVKVVDELVKVMGRHKPENIVIEMARENQTTQKGQKNSRERMKRIEEGIKELGSQILKEHPVENTQLQNEKLYLYYLQNGRDMYVDQELDINRLSDYDVDHIVPQSFLKDDSIDNKVLTRSDKARGKSDNVPSEEVVKKMKNYWRQLLNAKLITQRKFDNLTKAERGGLSELDKAGFIKRQLVETRQITKHVAQILDSRMNTKYDENDKLIREVKVITLKSKLVSDFRKDFQFYKVREINNYHHAHDAYLNAVVGTALIKKYPKLESEFVYGDYKVYDVRKMIAKSEQEIGKATAKYFFYSNIMNFFKTEITLANGEIRKRPLIETNGETGEIVWDKGRDFATVRKVLSMPQVNIVKKTEVQTGGFSKESILPKRNSDKLIARKKDWDPKKYGGFDSPTVAYSVLVVAKVEKGKSKKLKSVKELLGITIMERSSFEKNPIDFLEAKGYKEVKKDLIIKLPKYSLFELENGRKRMLASAGELQKGNELALPSKYVNFLYLASHYEKLKGSPEDNEQKQLFVEQHKHYLDEIIEQISEFSKRVILADANLDKVLSAYNKHRDKPIREQAENIIHLFTLTNLGAPAAFKYFDTTIDRKRYTSTKEVLDATLIHQSITGLYETRIDLSQLGGDGGGGGPAPGSSGGIPWLMKKPLQLTTLVPLQEYEERLLKQTMLTGSYKEKLQSLFLKYDALWQHWENQVGHRRIKPHHIATGTVNPRPQKQYPINPKAKASIQTVINDLLKQGVLIQQNSIMNTPVYPVPKPDGKWRMVLDYREVNKTIPLIAAQNQHSAGILSSIFRGKYKTTLDLSNGFWAHSITPESYWLTAFTWLGQQYCWTRLPQGFLNSPALFNADVVDLLKEVPNVQVYVDDIYISHDDPREHLEQLEKVFSLLLNAGYVVSLKKSEIAQHEVEFLGFNITKEGRGLTETFKQKLLNITPPRDLKQLQSILGKLNFARNFIPNFSELVKPLYNIIATAPGKYITWTTDNSQQLQNIISMLNSAENLEERNPEVRLIMKVNTSPSAGYIRFYNEFAKRPIMYLNYVYTKAEVKFTNTEKLLTTIHKGLIKALDLGMGQEILVYSPIVSMTKIQKTPLPERKALPIRWITWMSYLEDPRIQFHYDKTLPELQQVPTVTDDIIAKIKHPSEFSMVFYTDGSAIKHPNVNKSHNAGMGIAQVQFKPEFTVINTWSIPLGDHTAQLAEVAAVEFACKKALKIDGPVLIVTDSFYVAESVNKELPYWQSNGFFNNKKKPLKHVSKWKSIADCIQLKPDIIIIHEKGHQPTASTFHTEGNNLADKLATQGSYVVNAGKRTADGSEFEKRTADGSEFESPKKKAKVE

SEQ ID NO: 569 - protein, 2087 aa, synthetic construct
MPAAKRVKLDGGDKKYSIGLDIGTNSVGWAVITDEYKVPSKKFKVLGNTDRHSIKKNLIGALLFDSGETAEATRLKRTARRRYTRRKNRICYLQEIFSNEMAKVDDSFFHRLEESFLVEEDKKHERHPIFGNIVDEVAYHEKYPTIYHLRKKLVDSTDKADLRLIYLALAHMIKFRGHFLIEGDLNPDNSDVDKLFIQLVQTYNQLFEENPINASGVDAKAILSARLSKSRRLENLIAQLPGEKKNGLFGNLIALSLGLTPNFKSNFDLAEDAKLQLSKDTYDDDLDNLLAQIGDQYADLFLAAKNLSDAILLSDILRVNTEITKAPLSASMIKRYDEHHQDLTLLKALVRQQLPEKYKEIFFDQSKNGYAGYIDGGASQEEFYKFIKPILEKMDGTEELLVKLNREDLLRKQRTFDNGSIPHQIHLGELHAILRRQEDFYPFLKDNREKIEKILTFRIPYYVGPLARGNSRFAWMTRKSEETITPWNFEEVVDKGASAQSFIERMTNFDKNLPNEKVLPKHSLLYEYFTVYNELTKVKYVTEGMRKPAFLSGEQKKAIVDLLFKTNRKVTVKQLKEDYFKKIECFDSVEISGVEDRFNASLGTYHDLLKIIKDKDFLDNEENEDILEDIVLTLTLFEDREMIEERLKTYAHLFDDKVMKQLKRRRYTGWGRLSRKLINGIRDKQSGKTILDFLKSDGFANRNFMQLIHDDSLTFKEDIQKAQVSGQGDSLHEHIANLAGSPAIKKGILQTVKVVDELVKVMGRHKPENIVIEMARENQTTQKGQKNSRERMKRIEEGIKELGSQILKEHPVENTQLQNEKLYLYYLQNGRDMYVDQELDINRLSDYDVDHIVPQSFLKDDSIDNKVLTRSDKARGKSDNVPSEEVVKKMKNYWRQLLNAKLITQRKFDNLTKAERGGLSELDKAGFIKRQLVETRQITKHVAQILDSRMNTKYDENDKLIREVKVITLKSKLVSDFRKDFQFYKVREINNYHHAHDAYLNAVVGTALIKKYPKLESEFVYGDYKVYDVRKMIAKSEQEIGKATAKYFFYSNIMNFFKTEITLANGEIRKRPLIETNGETGEIVWDKGRDFATVRKVLSMPQVNIVKKTEVQTGGFSKESILPKRNSDKLIARKKDWDPKKYGGFDSPTVAYSVLVVAKVEKGKSKKLKSVKELLGITIMERSSFEKNPIDFLEAKGYKEVKKDLIIKLPKYSLFELENGRKRMLASAGELQKGNELALPSKYVNFLYLASHYEKLKGSPEDNEQKQLFVEQHKHYLDEIIEQISEFSKRVILADANLDKVLSAYNKHRDKPIREQAENIIHLFTLTNLGAPAAFKYFDTTIDRKRYTSTKEVLDATLIHQSITGLYETRIDLSQLGGDGGPAPAPAPAPAPGGIPWLMKKPLQLTTLVPLQEYEERLLKQTMLTGSYKEKLQSLFLKYDALWQHWENQVGHRRIKPHHIATGTVNPRPQKQYPINPKAKASIQTVINDLLKQGVLIQQNSIMNTPVYPVPKPDGKWRMVLDYREVNKTIPLIAAQNQHSAGILSSIFRGKYKTTLDLSNGFWAHSITPESYWLTAFTWLGQQYCWTRLPQGFLNSPALFNADVVDLLKEVPNVQVYVDDIYISHDDPREHLEQLEKVFSLLLNAGYVVSLKKSEIAQHEVEFLGFNITKEGRGLTETFKQKLLNITPPRDLKQLQSILGKLNFARNFIPNFSELVKPLYNIIATAPGKYITWTTDNSQQLQNIISMLNSAENLEERNPEVRLIMKVNTSPSAGYIRFYNEFAKRPIMYLNYVYTKAEVKFTNTEKLLTTIHKGLIKALDLGMGQEILVYSPIVSMTKIQKTPLPERKALPIRWITWMSYLEDPRIQFHYDKTLPELQQVPTVTDDIIAKIKHPSEFSMVFYTDGSAIKHPNVNKSHNAGMGIAQVQFKPEFTVINTWSIPLGDHTAQLAEVAAVEFACKKALKIDGPVLIVTDSFYVAESVNKELPYWQSNGFFNNKKKPLKHVSKWKSIADCIQLKPDIIIIHEKGHQPTASTFHTEGNNLADKLATQGSYVVNAGKRTADGSEFEKRTADGSEFESPKKKAKVE

SEQ ID NO: 570 - protein, 2101 aa, synthetic construct
MPAAKRVKLDGGDKKYSIGLDIGTNSVGWAVITDEYKVPSKKFKVLGNTDRHSIKKNLIGALLFDSGETAEATRLKRTARRRYTRRKNRICYLQEIFSNEMAKVDDSFFHRLEESFLVEEDKKHERHPIFGNIVDEVAYHEKYPTIYHLRKKLVDSTDKADLRLIYLALAHMIKFRGHFLIEGDLNPDNSDVDKLFIQLVQTYNQLFEENPINASGVDAKAILSARLSKSRRLENLIAQLPGEKKNGLFGNLIALSLGLTPNFKSNFDLAEDAKLQLSKDTYDDDLDNLLAQIGDQYADLFLAAKNLSDAILLSDILRVNTEITKAPLSASMIKRYDEHHQDLTLLKALVRQQLPEKYKEIFFDQSKNGYAGYIDGGASQEEFYKFIKPILEKMDGTEELLVKLNREDLLRKQRTFDNGSIPHQIHLGELHAILRRQEDFYPFLKDNREKIEKILTFRIPYYVGPLARGNSRFAWMTRKSEETITPWNFEEVVDKGASAQSFIERMTNFDKNLPNEKVLPKHSLLYEYFTVYNELTKVKYVTEGMRKPAFLSGEQKKAIVDLLFKTNRKVTVKQLKEDYFKKIECFDSVEISGVEDRFNASLGTYHDLLKIIKDKDFLDNEENEDILEDIVLTLTLFEDREMIEERLKTYAHLFDDKVMKQLKRRRYTGWGRLSRKLINGIRDKQSGKTILDFLKSDGFANRNFMQLIHDDSLTFKEDIQKAQVSGQGDSLHEHIANLAGSPAIKKGILQTVKVVDELVKVMGRHKPENIVIEMARENQTTQKGQKNSRERMKRIEEGIKELGSQILKEHPVENTQLQNEKLYLYYLQNGRDMYVDQELDINRLSDYDVDHIVPQSFLKDDSIDNKVLTRSDKARGKSDNVPSEEVVKKMKNYWRQLLNAKLITQRKFDNLTKAERGGLSELDKAGFIKRQLVETRQITKHVAQILDSRMNTKYDENDKLIREVKVITLKSKLVSDFRKDFQFYKVREINNYHHAHDAYLNAVVGTALIKKYPKLESEFVYGDYKVYDVRKMIAKSEQEIGKATAKYFFYSNIMNFFKTEITLANGEIRKRPLIETNGETGEIVWDKGRDFATVRKVLSMPQVNIVKKTEVQTGGFSKESILPKRNSDKLIARKKDWDPKKYGGFDSPTVAYSVLVVAKVEKGKSKKLKSVKELLGITIMERSSFEKNPIDFLEAKGYKEVKKDLIIKLPKYSLFELENGRKRMLASAGELQKGNELALPSKYVNFLYLASHYEKLKGSPEDNEQKQLFVEQHKHYLDEIIEQISEFSKRVILADANLDKVLSAYNKHRDKPIREQAENIIHLFTLTNLGAPAAFKYFDTTIDRKRYTSTKEVLDATLIHQSITGLYETRIDLSQLGGDGGEAAAKEAAAKEAAAKEAAAKEAAAKGGIPWLMKKPLQLTTLVPLQEYEERLLKQTMLTGSYKEKLQSLFLKYDALWQHWENQVGHRRIKPHHIATGTVNPRPQKQYPINPKAKASIQTVINDLLKQGVLIQQNSIMNTPVYPVPKPDGKWRMVLDYREVNKTIPLIAAQNQHSAGILSSIFRGKYKTTLDLSNGFWAHSITPESYWLTAFTWLGQQYCWTRLPQGFLNSPALFNADVVDLLKEVPNVQVYVDDIYISHDDPREHLEQLEKVFSLLLNAGYVVSLKKSEIAQHEVEFLGFNITKEGRGLTETFKQKLLNITPPRDLKQLQSILGKLNFARNFIPNFSELVKPLYNIIATAPGKYITWTTDNSQQLQNIISMLNSAENLEERNPEVRLIMKVNTSPSAGYIRFYNEFAKRPIMYLNYVYTKAEVKFTNTEKLLTTIHKGLIKALDLGMGQEILVYSPIVSMTKIQKTPLPERKALPIRWITWMSYLEDPRIQFHYDKTLPELQQVPTVTDDIIAKIKHPSEFSMVFYTDGSAIKHPNVNKSHNAGMGIAQVQFKPEFTVINTWSIPLGDHTAQLAEVAAVEFACKKALKIDGPVLIVTDSFYVAESVNKELPYWQSNGFFNNKKKPLKHVSKWKSIADCIQLKPDIIIIHEKGHQPTASTFHTEGNNLADKLATQGSYVVNAGKRTADGSEFEKRTADGSEFESPKKKAKVE

SEQ ID NO: 571 - protein, 2087 aa, synthetic construct
MPAAKRVKLDGGDKKYSIGLDIGTNSVGWAVITDEYKVPSKKFKVLGNTDRHSIKKNLIGALLFDSGETAEATRLKRTARRRYTRRKNRICYLQEIFSNEMAKVDDSFFHRLEESFLVEEDKKHERHPIFGNIVDEVAYHEKYPTIYHLRKKLVDSTDKADLRLIYLALAHMIKFRGHFLIEGDLNPDNSDVDKLFIQLVQTYNQLFEENPINASGVDAKAILSARLSKSRRLENLIAQLPGEKKNGLFGNLIALSLGLTPNFKSNFDLAEDAKLQLSKDTYDDDLDNLLAQIGDQYADLFLAAKNLSDAILLSDILRVNTEITKAPLSASMIKRYDEHHQDLTLLKALVRQQLPEKYKEIFFDQSKNGYAGYIDGGASQEEFYKFIKPILEKMDGTEELLVKLNREDLLRKQRTFDNGSIPHQIHLGELHAILRRQEDFYPFLKDNREKIEKILTFRIPYYVGPLARGNSRFAWMTRKSEETITPWNFEEVVDKGASAQSFIERMTNFDKNLPNEKVLPKHSLLYEYFTVYNELTKVKYVTEGMRKPAFLSGEQKKAIVDLLFKTNRKVTVKQLKEDYFKKIECFDSVEISGVEDRFNASLGTYHDLLKIIKDKDFLDNEENEDILEDIVLTLTLFEDREMIEERLKTYAHLFDDKVMKQLKRRRYTGWGRLSRKLINGIRDKQSGKTILDFLKSDGFANRNFMQLIHDDSLTFKEDIQKAQVSGQGDSLHEHIANLAGSPAIKKGILQTVKVVDELVKVMGRHKPENIVIEMARENQTTQKGQKNSRERMKRIEEGIKELGSQILKEHPVENTQLQNEKLYLYYLQNGRDMYVDQELDINRLSDYDVDHIVPQSFLKDDSIDNKVLTRSDKARGKSDNVPSEEVVKKMKNYWRQLLNAKLITQRKFDNLTKAERGGLSELDKAGFIKRQLVETRQITKHVAQILDSRMNTKYDENDKLIREVKVITLKSKLVSDFRKDFQFYKVREINNYHHAHDAYLNAVVGTALIKKYPKLESEFVYGDYKVYDVRKMIAKSEQEIGKATAKYFFYSNIMNFFKTEITLANGEIRKRPLIETNGETGEIVWDKGRDFATVRKVLSMPQVNIVKKTEVQTGGFSKESILPKRNSDKLIARKKDWDPKKYGGFDSPTVAYSVLVVAKVEKGKSKKLKSVKELLGITIMERSSFEKNPIDFLEAKGYKEVKKDLIIKLPKYSLFELENGRKRMLASAGELQKGNELALPSKYVNFLYLASHYEKLKGSPEDNEQKQLFVEQHKHYLDEIIEQISEFSKRVILADANLDKVLSAYNKHRDKPIREQAENIIHLFTLTNLGAPAAFKYFDTTIDRKRYTSTKEVLDATLIHQSITGLYETRIDLSQLGGDGGGGSGSSEAAAKGGIPWLMKKPLQLTTLVPLQEYEERLLKQTMLTGSYKEKLQSLFLKYDALWQHWENQVGHRRIKPHHIATGTVNPRPQKQYPINPKAKASIQTVINDLLKQGVLIQQNSIMNTPVYPVPKPDGKWRMVLDYREVNKTIPLIAAQNQHSAGILSSIFRGKYKTTLDLSNGFWAHSITPESYWLTAFTWLGQQYCWTRLPQGFLNSPALFNADVVDLLKEVPNVQVYVDDIYISHDDPREHLEQLEKVFSLLLNAGYVVSLKKSEIAQHEVEFLGFNITKEGRGLTETFKQKLLNITPPRDLKQLQSILGKLNFARNFIPNFSELVKPLYNIIATAPGKYITWTTDNSQQLQNIISMLNSAENLEERNPEVRLIMKVNTSPSAGYIRFYNEFAKRPIMYLNYVYTKAEVKFTNTEKLLTTIHKGLIKALDLGMGQEILVYSPIVSMTKIQKTPLPERKALPIRWITWMSYLEDPRIQFHYDKTLPELQQVPTVTDDIIAKIKHPSEFSMVFYTDGSAIKHPNVNKSHNAGMGIAQVQFKPEFTVINTWSIPLGDHTAQLAEVAAVEFACKKALKIDGPVLIVTDSFYVAESVNKELPYWQSNGFFNNKKKPLKHVSKWKSIADCIQLKPDIIIIHEKGHQPTASTFHTEGNNLADKLATQGSYVVNAGKRTADGSEFEKRTADGSEFESPKKKAKVE

SEQ ID NO: 572 - protein, 2087 aa, synthetic construct
MPAAKRVKLDGGDKKYSIGLDIGTNSVGWAVITDEYKVPSKKFKVLGNTDRHSIKKNLIGALLFDSGETAEATRLKRTARRRYTRRKNRICYLQEIFSNEMAKVDDSFFHRLEESFLVEEDKKHERHPIFGNIVDEVAYHEKYPTIYHLRKKLVDSTDKADLRLIYLALAHMIKFRGHFLIEGDLNPDNSDVDKLFIQLVQTYNQLFEENPINASGVDAKAILSARLSKSRRLENLIAQLPGEKKNGLFGNLIALSLGLTPNFKSNFDLAEDAKLQLSKDTYDDDLDNLLAQIGDQYADLFLAAKNLSDAILLSDILRVNTEITKAPLSASMIKRYDEHHQDLTLLKALVRQQLPEKYKEIFFDQSKNGYAGYIDGGASQEEFYKFIKPILEKMDGTEELLVKLNREDLLRKQRTFDNGSIPHQIHLGELHAILRRQEDFYPFLKDNREKIEKILTFRIPYYVGPLARGNSRFAWMTRKSEETITPWNFEEVVDKGASAQSFIERMTNFDKNLPNEKVLPKHSLLYEYFTVYNELTKVKYVTEGMRKPAFLSGEQKKAIVDLLFKTNRKVTVKQLKEDYFKKIECFDSVEISGVEDRFNASLGTYHDLLKIIKDKDFLDNEENEDILEDIVLTLTLFEDREMIEERLKTYAHLFDDKVMKQLKRRRYTGWGRLSRKLINGIRDKQSGKTILDFLKSDGFANRNFMQLIHDDSLTFKEDIQKAQVSGQGDSLHEHIANLAGSPAIKKGILQTVKVVDELVKVMGRHKPENIVIEMARENQTTQKGQKNSRERMKRIEEGIKELGSQILKEHPVENTQLQNEKLYLYYLQNGRDMYVDQELDINRLSDYDVDHIVPQSFLKDDSIDNKVLTRSDKARGKSDNVPSEEVVKKMKNYWRQLLNAKLITQRKFDNLTKAERGGLSELDKAGFIKRQLVETRQITKHVAQILDSRMNTKYDENDKLIREVKVITLKSKLVSDFRKDFQFYKVREINNYHHAHDAYLNAVVGTALIKKYPKLESEFVYGDYKVYDVRKMIAKSEQEIGKATAKYFFYSNIMNFFKTEITLANGEIRKRPLIETNGETGEIVWDKGRDFATVRKVLSMPQVNIVKKTEVQTGGFSKESILPKRNSDKLIARKKDWDPKKYGGFDSPTVAYSVLVVAKVEKGKSKKLKSVKELLGITIMERSSFEKNPIDFLEAKGYKEVKKDLIIKLPKYSLFELENGRKRMLASAGELQKGNELALPSKYVNFLYLASHYEKLKGSPEDNEQKQLFVEQHKHYLDEIIEQISEFSKRVILADANLDKVLSAYNKHRDKPIREQAENIIHLFTLTNLGAPAAFKYFDTTIDRKRYTSTKEVLDATLIHQSITGLYETRIDLSQLGGDGGEAAAKGGSPAPGGIPWLMKKPLQLTTLVPLQEYEERLLKQTMLTGSYKEKLQSLFLKYDALWQHWENQVGHRRIKPHHIATGTVNPRPQKQYPINPKAKASIQTVINDLLKQGVLIQQNSIMNTPVYPVPKPDGKWRMVLDYREVNKTIPLIAAQNQHSAGILSSIFRGKYKTTLDLSNGFWAHSITPESYWLTAFTWLGQQYCWTRLPQGFLNSPALFNADVVDLLKEVPNVQVYVDDIYISHDDPREHLEQLEKVFSLLLNAGYVVSLKKSEIAQHEVEFLGFNITKEGRGLTETFKQKLLNITPPRDLKQLQSILGKLNFARNFIPNFSELVKPLYNIIATAPGKYITWTTDNSQQLQNIISMLNSAENLEERNPEVRLIMKVNTSPSAGYIRFYNEFAKRPIMYLNYVYTKAEVKFTNTEKLLTTIHKGLIKALDLGMGQEILVYSPIVSMTKIQKTPLPERKALPIRWITWMSYLEDPRIQFHYDKTLPELQQVPTVTDDIIAKIKHPSEFSMVFYTDGSAIKHPNVNKSHNAGMGIAQVQFKPEFTVINTWSIPLGDHTAQLAEVAAVEFACKKALKIDGPVLIVTDSFYVAESVNKELPYWQSNGFFNNKKKPLKHVSKWKSIADCIQLKPDIIIIHEKGHQPTASTFHTEGNNLADKLATQGSYVVNAGKRTADGSEFEKRTADGSEFESPKKKAKVE

SEQ ID NO: 573 - protein, 2085 aa, synthetic construct
MPAAKRVKLDGGDKKYSIGLDIGTNSVGWAVITDEYKVPSKKFKVLGNTDRHSIKKNLIGALLFDSGETAEATRLKRTARRRYTRRKNRICYLQEIFSNEMAKVDDSFFHRLEESFLVEEDKKHERHPIFGNIVDEVAYHEKYPTIYHLRKKLVDSTDKADLRLIYLALAHMIKFRGHFLIEGDLNPDNSDVDKLFIQLVQTYNQLFEENPINASGVDAKAILSARLSKSRRLENLIAQLPGEKKNGLFGNLIALSLGLTPNFKSNFDLAEDAKLQLSKDTYDDDLDNLLAQIGDQYADLFLAAKNLSDAILLSDILRVNTEITKAPLSASMIKRYDEHHQDLTLLKALVRQQLPEKYKEIFFDQSKNGYAGYIDGGASQEEFYKFIKPILEKMDGTEELLVKLNREDLLRKQRTFDNGSIPHQIHLGELHAILRRQEDFYPFLKDNREKIEKILTFRIPYYVGPLARGNSRFAWMTRKSEETITPWNFEEVVDKGASAQSFIERMTNFDKNLPNEKVLPKHSLLYEYFTVYNELTKVKYVTEGMRKPAFLSGEQKKAIVDLLFKTNRKVTVKQLKEDYFKKIECFDSVEISGVEDRFNASLGTYHDLLKIIKDKDFLDNEENEDILEDIVLTLTLFEDREMIEERLKTYAHLFDDKVMKQLKRRRYTGWGRLSRKLINGIRDKQSGKTILDFLKSDGFANRNFMQLIHDDSLTFKEDIQKAQVSGQGDSLHEHIANLAGSPAIKKGILQTVKVVDELVKVMGRHKPENIVIEMARENQTTQKGQKNSRERMKRIEEGIKELGSQILKEHPVENTQLQNEKLYLYYLQNGRDMYVDQELDINRLSDYDVDHIVPQSFLKDDSIDNKVLTRSDKARGKSDNVPSEEVVKKMKNYWRQLLNAKLITQRKFDNLTKAERGGLSELDKAGFIKRQLVETRQITKHVAQILDSRMNTKYDENDKLIREVKVITLKSKLVSDFRKDFQFYKVREINNYHHAHDAYLNAVVGTALIKKYPKLESEFVYGDYKVYDVRKMIAKSEQEIGKATAKYFFYSNIMNFFKTEITLANGEIRKRPLIETNGETGEIVWDKGRDFATVRKVLSMPQVNIVKKTEVQTGGFSKESILPKRNSDKLIARKKDWDPKKYGGFDSPTVAYSVLVVAKVEKGKSKKLKSVKELLGITIMERSSFEKNPIDFLEAKGYKEVKKDLIIKLPKYSLFELENGRKRMLASAGELQKGNELALPSKYVNFLYLASHYEKLKGSPEDNEQKQLFVEQHKHYLDEIIEQISEFSKRVILADANLDKVLSAYNKHRDKPIREQAENIIHLFTLTNLGAPAAFKYFDTTIDRKRYTSTKEVLDATLIHQSITGLYETRIDLSQLGGDGGGGSPAPGGGGGIPWLMKKPLQLTTLVPLQEYEERLLKQTMLTGSYKEKLQSLFLKYDALWQHWENQVGHRRIKPHHIATGTVNPRPQKQYPINPKAKASIQTVINDLLKQGVLIQQNSIMNTPVYPVPKPDGKWRMVLDYREVNKTIPLIAAQNQHSAGILSSIFRGKYKTTLDLSNGFWAHSITPESYWLTAFTWLGQQYCWTRLPQGFLNSPALFNADVVDLLKEVPNVQVYVDDIYISHDDPREHLEQLEKVFSLLLNAGYVVSLKKSEIAQHEVEFLGFNITKEGRGLTETFKQKLLNITPPRDLKQLQSILGKLNFARNFIPNFSELVKPLYNIIATAPGKYITWTTDNSQQLQNIISMLNSAENLEERNPEVRLIMKVNTSPSAGYIRFYNEFAKRPIMYLNYVYTKAEVKFTNTEKLLTTIHKGLIKALDLGMGQEILVYSPIVSMTKIQKTPLPERKALPIRWITWMSYLEDPRIQFHYDKTLPELQQVPTVTDDIIAKIKHPSEFSMVFYTDGSAIKHPNVNKSHNAGMGIAQVQFKPEFTVINTWSIPLGDHTAQLAEVAAVEFACKKALKIDGPVLIVTDSFYVAESVNKELPYWQSNGFFNNKKKPLKHVSKWKSIADCIQLKPDIIIIHEKGHQPTASTFHTEGNNLADKLATQGSYVVNAGKRTADGSEFEKRTADGSEFESPKKKAKVE

SEQ ID NO: 574 - protein, 2091 aa, synthetic construct
MPAAKRVKLDGGDKKYSIGLDIGTNSVGWAVITDEYKVPSKKFKVLGNTDRHSIKKNLIGALLFDSGETAEATRLKRTARRRYTRRKNRICYLQEIFSNEMAKVDDSFFHRLEESFLVEEDKKHERHPIFGNIVDEVAYHEKYPTIYHLRKKLVDSTDKADLRLIYLALAHMIKFRGHFLIEGDLNPDNSDVDKLFIQLVQTYNQLFEENPINASGVDAKAILSARLSKSRRLENLIAQLPGEKKNGLFGNLIALSLGLTPNFKSNFDLAEDAKLQLSKDTYDDDLDNLLAQIGDQYADLFLAAKNLSDAILLSDILRVNTEITKAPLSASMIKRYDEHHQDLTLLKALVRQQLPEKYKEIFFDQSKNGYAGYIDGGASQEEFYKFIKPILEKMDGTEELLVKLNREDLLRKQRTFDNGSIPHQIHLGELHAILRRQEDFYPFLKDNREKIEKILTFRIPYYVGPLARGNSRFAWMTRKSEETITPWNFEEVVDKGASAQSFIERMTNFDKNLPNEKVLPKHSLLYEYFTVYNELTKVKYVTEGMRKPAFLSGEQKKAIVDLLFKTNRKVTVKQLKEDYFKKIECFDSVEISGVEDRFNASLGTYHDLLKIIKDKDFLDNEENEDILEDIVLTLTLFEDREMIEERLKTYAHLFDDKVMKQLKRRRYTGWGRLSRKLINGIRDKQSGKTILDFLKSDGFANRNFMQLIHDDSLTFKEDIQKAQVSGQGDSLHEHIANLAGSPAIKKGILQTVKVVDELVKVMGRHKPENIVIEMARENQTTQKGQKNSRERMKRIEEGIKELGSQILKEHPVENTQLQNEKLYLYYLQNGRDMYVDQELDINRLSDYDVDHIVPQSFLKDDSIDNKVLTRSDKARGKSDNVPSEEVVKKMKNYWRQLLNAKLITQRKFDNLTKAERGGLSELDKAGFIKRQLVETRQITKHVAQILDSRMNTKYDENDKLIREVKVITLKSKLVSDFRKDFQFYKVREINNYHHAHDAYLNAVVGTALIKKYPKLESEFVYGDYKVYDVRKMIAKSEQEIGKATAKYFFYSNIMNFFKTEITLANGEIRKRPLIETNGETGEIVWDKGRDFATVRKVLSMPQVNIVKKTEVQTGGFSKESILPKRNSDKLIARKKDWDPKKYGGFDSPTVAYSVLVVAKVEKGKSKKLKSVKELLGITIMERSSFEKNPIDFLEAKGYKEVKKDLIIKLPKYSLFELENGRKRMLASAGELQKGNELALPSKYVNFLYLASHYEKLKGSPEDNEQKQLFVEQHKHYLDEIIEQISEFSKRVILADANLDKVLSAYNKHRDKPIREQAENIIHLFTLTNLGAPAAFKYFDTTIDRKRYTSTKEVLDATLIHQSITGLYETRIDLSQLGGDGGEAAAKGGGGSEAAAKGGIPWLMKKPLQLTTLVPLQEYEERLLKQTMLTGSYKEKLQSLFLKYDALWQHWENQVGHRRIKPHHIATGTVNPRPQKQYPINPKAKASIQTVINDLLKQGVLIQQNSIMNTPVYPVPKPDGKWRMVLDYREVNKTIPLIAAQNQHSAGILSSIFRGKYKTTLDLSNGFWAHSITPESYWLTAFTWLGQQYCWTRLPQGFLNSPALFNADVVDLLKEVPNVQVYVDDIYISHDDPREHLEQLEKVFSLLLNAGYVVSLKKSEIAQHEVEFLGFNITKEGRGLTETFKQKLLNITPPRDLKQLQSILGKLNFARNFIPNFSELVKPLYNIIATAPGKYITWTTDNSQQLQNIISMLNSAENLEERNPEVRLIMKVNTSPSAGYIRFYNEFAKRPIMYLNYVYTKAEVKFTNTEKLLTTIHKGLIKALDLGMGQEILVYSPIVSMTKIQKTPLPERKALPIRWITWMSYLEDPRIQFHYDKTLPELQQVPTVTDDIIAKIKHPSEFSMVFYTDGSAIKHPNVNKSHNAGMGIAQVQFKPEFTVINTWSIPLGDHTAQLAEVAAVEFACKKALKIDGPVLIVTDSFYVAESVNKELPYWQSNGFFNNKKKPLKHVSKWKSIADCIQLKPDIIIIHEKGHQPTASTFHTEGNNLADKLATQGSYVVNAGKRTADGSEFEKRTADGSEFESPKKKAKVE

SEQ ID NO: 575 - protein, 2082 aa, synthetic construct
MPAAKRVKLDGGDKKYSIGLDIGTNSVGWAVITDEYKVPSKKFKVLGNTDRHSIKKNLIGALLFDSGETAEATRLKRTARRRYTRRKNRICYLQEIFSNEMAKVDDSFFHRLEESFLVEEDKKHERHPIFGNIVDEVAYHEKYPTIYHLRKKLVDSTDKADLRLIYLALAHMIKFRGHFLIEGDLNPDNSDVDKLFIQLVQTYNQLFEENPINASGVDAKAILSARLSKSRRLENLIAQLPGEKKNGLFGNLIALSLGLTPNFKSNFDLAEDAKLQLSKDTYDDDLDNLLAQIGDQYADLFLAAKNLSDAILLSDILRVNTEITKAPLSASMIKRYDEHHQDLTLLKALVRQQLPEKYKEIFFDQSKNGYAGYIDGGASQEEFYKFIKPILEKMDGTEELLVKLNREDLLRKQRTFDNGSIPHQIHLGELHAILRRQEDFYPFLKDNREKIEKILTFRIPYYVGPLARGNSRFAWMTRKSEETITPWNFEEVVDKGASAQSFIERMTNFDKNLPNEKVLPKHSLLYEYFTVYNELTKVKYVTEGMRKPAFLSGEQKKAIVDLLFKTNRKVTVKQLKEDYFKKIECFDSVEISGVEDRFNASLGTYHDLLKIIKDKDFLDNEENEDILEDIVLTLTLFEDREMIEERLKTYAHLFDDKVMKQLKRRRYTGWGRLSRKLINGIRDKQSGKTILDFLKSDGFANRNFMQLIHDDSLTFKEDIQKAQVSGQGDSLHEHIANLAGSPAIKKGILQTVKVVDELVKVMGRHKPENIVIEMARENQTTQKGQKNSRERMKRIEEGIKELGSQILKEHPVENTQLQNEKLYLYYLQNGRDMYVDQELDINRLSDYDVDHIVPQSFLKDDSIDNKVLTRSDKARGKSDNVPSEEVVKKMKNYWRQLLNAKLITQRKFDNLTKAERGGLSELDKAGFIKRQLVETRQITKHVAQILDSRMNTKYDENDKLIREVKVITLKSKLVSDFRKDFQFYKVREINNYHHAHDAYLNAVVGTALIKKYPKLESEFVYGDYKVYDVRKMIAKSEQEIGKATAKYFFYSNIMNFFKTEITLANGEIRKRPLIETNGETGEIVWDKGRDFATVRKVLSMPQVNIVKKTEVQTGGFSKESILPKRNSDKLIARKKDWDPKKYGGFDSPTVAYSVLVVAKVEKGKSKKLKSVKELLGITIMERSSFEKNPIDFLEAKGYKEVKKDLIIKLPKYSLFELENGRKRMLASAGELQKGNELALPSKYVNFLYLASHYEKLKGSPEDNEQKQLFVEQHKHYLDEIIEQISEFSKRVILADANLDKVLSAYNKHRDKPIREQAENIIHLFTLTNLGAPAAFKYFDTTIDRKRYTSTKEVLDATLIHQSITGLYETRIDLSQLGGDGGGSSPAPGGIPWLMKKPLQLTTLVPLQEYEERLLKQTMLTGSYKEKLQSLFLKYDALWQHWENQVGHRRIKPHHIATGTVNPRPQKQYPINPKAKASIQTVINDLLKQGVLIQQNSIMNTPVYPVPKPDGKWRMVLDYREVNKTIPLIAAQNQHSAGILSSIFRGKYKTTLDLSNGFWAHSITPESYWLTAFTWLGQQYCWTRLPQGFLNSPALFNADVVDLLKEVPNVQVYVDDIYISHDDPREHLEQLEKVFSLLLNAGYVVSLKKSEIAQHEVEFLGFNITKEGRGLTETFKQKLLNITPPRDLKQLQSILGKLNFARNFIPNFSELVKPLYNIIATAPGKYITWTTDNSQQLQNIISMLNSAENLEERNPEVRLIMKVNTSPSAGYIRFYNEFAKRPIMYLNYVYTKAEVKFTNTEKLLTTIHKGLIKALDLGMGQEILVYSPIVSMTKIQKTPLPERKALPIRWITWMSYLEDPRIQFHYDKTLPELQQVPTVTDDIIAKIKHPSEFSMVFYTDGSAIKHPNVNKSHNAGMGIAQVQFKPEFTVINTWSIPLGDHTAQLAEVAAVEFACKKALKIDGPVLIVTDSFYVAESVNKELPYWQSNGFFNNKKKPLKHVSKWKSIADCIQLKPDIIIIHEKGHQPTASTFHTEGNNLADKLATQGSYVVNAGKRTADGSEFEKRTADGSEFESPKKKAKVE

SEQ ID NO: 576 - protein, 2087 aa, synthetic construct
MPAAKRVKLDGGDKKYSIGLDIGTNSVGWAVITDEYKVPSKKFKVLGNTDRHSIKKNLIGALLFDSGETAEATRLKRTARRRYTRRKNRICYLQEIFSNEMAKVDDSFFHRLEESFLVEEDKKHERHPIFGNIVDEVAYHEKYPTIYHLRKKLVDSTDKADLRLIYLALAHMIKFRGHFLIEGDLNPDNSDVDKLFIQLVQTYNQLFEENPINASGVDAKAILSARLSKSRRLENLIAQLPGEKKNGLFGNLIALSLGLTPNFKSNFDLAEDAKLQLSKDTYDDDLDNLLAQIGDQYADLFLAAKNLSDAILLSDILRVNTEITKAPLSASMIKRYDEHHQDLTLLKALVRQQLPEKYKEIFFDQSKNGYAGYIDGGASQEEFYKFIKPILEKMDGTEELLVKLNREDLLRKQRTFDNGSIPHQIHLGELHAILRRQEDFYPFLKDNREKIEKILTFRIPYYVGPLARGNSRFAWMTRKSEETITPWNFEEVVDKGASAQSFIERMTNFDKNLPNEKVLPKHSLLYEYFTVYNELTKVKYVTEGMRKPAFLSGEQKKAIVDLLFKTNRKVTVKQLKEDYFKKIECFDSVEISGVEDRFNASLGTYHDLLKIIKDKDFLDNEENEDILEDIVLTLTLFEDREMIEERLKTYAHLFDDKVMKQLKRRRYTGWGRLSRKLINGIRDKQSGKTILDFLKSDGFANRNFMQLIHDDSLTFKEDIQKAQVSGQGDSLHEHIANLAGSPAIKKGILQTVKVVDELVKVMGRHKPENIVIEMARENQTTQKGQKNSRERMKRIEEGIKELGSQILKEHPVENTQLQNEKLYLYYLQNGRDMYVDQELDINRLSDYDVDHIVPQSFLKDDSIDNKVLTRSDKARGKSDNVPSEEVVKKMKNYWRQLLNAKLITQRKFDNLTKAERGGLSELDKAGFIKRQLVETRQITKHVAQILDSRMNTKYDENDKLIREVKVITLKSKLVSDFRKDFQFYKVREINNYHHAHDAYLNAVVGTALIKKYPKLESEFVYGDYKVYDVRKMIAKSEQEIGKATAKYFFYSNIMNFFKTEITLANGEIRKRPLIETNGETGEIVWDKGRDFATVRKVLSMPQVNIVKKTEVQTGGFSKESILPKRNSDKLIARKKDWDPKKYGGFDSPTVAYSVLVVAKVEKGKSKKLKSVKELLGITIMERSSFEKNPIDFLEAKGYKEVKKDLIIKLPKYSLFELENGRKRMLASAGELQKGNELALPSKYVNFLYLASHYEKLKGSPEDNEQKQLFVEQHKHYLDEIIEQISEFSKRVILADANLDKVLSAYNKHRDKPIREQAENIIHLFTLTNLGAPAAFKYFDTTIDRKRYTSTKEVLDATLIHQSITGLYETRIDLSQLGGDGGPAPGGSEAAAKGGIPWLMKKPLQLTTLVPLQEYEERLLKQTMLTGSYKEKLQSLFLKYDALWQHWENQVGHRRIKPHHIATGTVNPRPQKQYPINPKAKASIQTVINDLLKQGVLIQQNSIMNTPVYPVPKPDGKWRMVLDYREVNKTIPLIAAQNQHSAGILSSIFRGKYKTTLDLSNGFWAHSITPESYWLTAFTWLGQQYCWTRLPQGFLNSPALFNADVVDLLKEVPNVQVYVDDIYISHDDPREHLEQLEKVFSLLLNAGYVVSLKKSEIAQHEVEFLGFNITKEGRGLTETFKQKLLNITPPRDLKQLQSILGKLNFARNFIPNFSELVKPLYNIIATAPGKYITWTTDNSQQLQNIISMLNSAENLEERNPEVRLIMKVNTSPSAGYIRFYNEFAKRPIMYLNYVYTKAEVKFTNTEKLLTTIHKGLIKALDLGMGQEILVYSPIVSMTKIQKTPLPERKALPIRWITWMSYLEDPRIQFHYDKTLPELQQVPTVTDDIIAKIKHPSEFSMVFYTDGSAIKHPNVNKSHNAGMGIAQVQFKPEFTVINTWSIPLGDHTAQLAEVAAVEFACKKALKIDGPVLIVTDSFYVAESVNKELPYWQSNGFFNNKKKPLKHVSKWKSIADCIQLKPDIIIIHEKGHQPTASTFHTEGNNLADKLATQGSYVVNAGKRTADGSEFEKRTADGSEFESPKKKAKVE

SEQ ID NO: 577 - protein, 2087 aa, synthetic construct
MPAAKRVKLDGGDKKYSIGLDIGTNSVGWAVITDEYKVPSKKFKVLGNTDRHSIKKNLIGALLFDSGETAEATRLKRTARRRYTRRKNRICYLQEIFSNEMAKVDDSFFHRLEESFLVEEDKKHERHPIFGNIVDEVAYHEKYPTIYHLRKKLVDSTDKADLRLIYLALAHMIKFRGHFLIEGDLNPDNSDVDKLFIQLVQTYNQLFEENPINASGVDAKAILSARLSKSRRLENLIAQLPGEKKNGLFGNLIALSLGLTPNFKSNFDLAEDAKLQLSKDTYDDDLDNLLAQIGDQYADLFLAAKNLSDAILLSDILRVNTEITKAPLSASMIKRYDEHHQDLTLLKALVRQQLPEKYKEIFFDQSKNGYAGYIDGGASQEEFYKFIKPILEKMDGTEELLVKLNREDLLRKQRTFDNGSIPHQIHLGELHAILRRQEDFYPFLKDNREKIEKILTFRIPYYVGPLARGNSRFAWMTRKSEETITPWNFEEVVDKGASAQSFIERMTNFDKNLPNEKVLPKHSLLYEYFTVYNELTKVKYVTEGMRKPAFLSGEQKKAIVDLLFKTNRKVTVKQLKEDYFKKIECFDSVEISGVEDRFNASLGTYHDLLKIIKDKDFLDNEENEDILEDIVLTLTLFEDREMIEERLKTYAHLFDDKVMKQLKRRRYTGWGRLSRKLINGIRDKQSGKTILDFLKSDGFANRNFMQLIHDDSLTFKEDIQKAQVSGQGDSLHEHIANLAGSPAIKKGILQTVKVVDELVKVMGRHKPENIVIEMARENQTTQKGQKNSRERMKRIEEGIKELGSQILKEHPVENTQLQNEKLYLYYLQNGRDMYVDQELDINRLSDYDVDHIVPQSFLKDDSIDNKVLTRSDKARGKSDNVPSEEVVKKMKNYWRQLLNAKLITQRKFDNLTKAERGGLSELDKAGFIKRQLVETRQITKHVAQILDSRMNTKYDENDKLIREVKVITLKSKLVSDFRKDFQFYKVREINNYHHAHDAYLNAVVGTALIKKYPKLESEFVYGDYKVYDVRKMIAKSEQEIGKATAKYFFYSNIMNFFKTEITLANGEIRKRPLIETNGETGEIVWDKGRDFATVRKVLSMPQVNIVKKTEVQTGGFSKESILPKRNSDKLIARKKDWDPKKYGGFDSPTVAYSVLVVAKVEKGKSKKLKSVKELLGITIMERSSFEKNPIDFLEAKGYKEVKKDLIIKLPKYSLFELENGRKRMLASAGELQKGNELALPSKYVNFLYLASHYEKLKGSPEDNEQKQLFVEQHKHYLDEIIEQISEFSKRVILADANLDKVLSAYNKHRDKPIREQAENIIHLFTLTNLGAPAAFKYFDTTIDRKRYTSTKEVLDATLIHQSITGLYETRIDLSQLGGDGGGGGEAAAKGGSGGIPWLMKKPLQLTTLVPLQEYEERLLKQTMLTGSYKEKLQSLFLKYDALWQHWENQVGHRRIKPHHIATGTVNPRPQKQYPINPKAKASIQTVINDLLKQGVLIQQNSIMNTPVYPVPKPDGKWRMVLDYREVNKTIPLIAAQNQHSAGILSSIFRGKYKTTLDLSNGFWAHSITPESYWLTAFTWLGQQYCWTRLPQGFLNSPALFNADVVDLLKEVPNVQVYVDDIYISHDDPREHLEQLEKVFSLLLNAGYVVSLKKSEIAQHEVEFLGFNITKEGRGLTETFKQKLLNITPPRDLKQLQSILGKLNFARNFIPNFSELVKPLYNIIATAPGKYITWTTDNSQQLQNIISMLNSAENLEERNPEVRLIMKVNTSPSAGYIRFYNEFAKRPIMYLNYVYTKAEVKFTNTEKLLTTIHKGLIKALDLGMGQEILVYSPIVSMTKIQKTPLPERKALPIRWITWMSYLEDPRIQFHYDKTLPELQQVPTVTDDIIAKIKHPSEFSMVFYTDGSAIKHPNVNKSHNAGMGIAQVQFKPEFTVINTWSIPLGDHTAQLAEVAAVEFACKKALKIDGPVLIVTDSFYVAESVNKELPYWQSNGFFNNKKKPLKHVSKWKSIADCIQLKPDIIIIHEKGHQPTASTFHTEGNNLADKLATQGSYVVNAGKRTADGSEFEKRTADGSEFESPKKKAKVE

SEQ ID NO: 578 - protein, 2084 aa, synthetic construct
MPAAKRVKLDGGDKKYSIGLDIGTNSVGWAVITDEYKVPSKKFKVLGNTDRHSIKKNLIGALLFDSGETAEATRLKRTARRRYTRRKNRICYLQEIFSNEMAKVDDSFFHRLEESFLVEEDKKHERHPIFGNIVDEVAYHEKYPTIYHLRKKLVDSTDKADLRLIYLALAHMIKFRGHFLIEGDLNPDNSDVDKLFIQLVQTYNQLFEENPINASGVDAKAILSARLSKSRRLENLIAQLPGEKKNGLFGNLIALSLGLTPNFKSNFDLAEDAKLQLSKDTYDDDLDNLLAQIGDQYADLFLAAKNLSDAILLSDILRVNTEITKAPLSASMIKRYDEHHQDLTLLKALVRQQLPEKYKEIFFDQSKNGYAGYIDGGASQEEFYKFIKPILEKMDGTEELLVKLNREDLLRKQRTFDNGSIPHQIHLGELHAILRRQEDFYPFLKDNREKIEKILTFRIPYYVGPLARGNSRFAWMTRKSEETITPWNFEEVVDKGASAQSFIERMTNFDKNLPNEKVLPKHSLLYEYFTVYNELTKVKYVTEGMRKPAFLSGEQKKAIVDLLFKTNRKVTVKQLKEDYFKKIECFDSVEISGVEDRFNASLGTYHDLLKIIKDKDFLDNEENEDILEDIVLTLTLFEDREMIEERLKTYAHLFDDKVMKQLKRRRYTGWGRLSRKLINGIRDKQSGKTILDFLKSDGFANRNFMQLIHDDSLTFKEDIQKAQVSGQGDSLHEHIANLAGSPAIKKGILQTVKVVDELVKVMGRHKPENIVIEMARENQTTQKGQKNSRERMKRIEEGIKELGSQILKEHPVENTQLQNEKLYLYYLQNGRDMYVDQELDINRLSDYDVDHIVPQSFLKDDSIDNKVLTRSDKARGKSDNVPSEEVVKKMKNYWRQLLNAKLITQRKFDNLTKAERGGLSELDKAGFIKRQLVETRQITKHVAQILDSRMNTKYDENDKLIREVKVITLKSKLVSDFRKDFQFYKVREINNYHHAHDAYLNAVVGTALIKKYPKLESEFVYGDYKVYDVRKMIAKSEQEIGKATAKYFFYSNIMNFFKTEITLANGEIRKRPLIETNGETGEIVWDKGRDFATVRKVLSMPQVNIVKKTEVQTGGFSKESILPKRNSDKLIARKKDWDPKKYGGFDSPTVAYSVLVVAKVEKGKSKKLKSVKELLGITIMERSSFEKNPIDFLEAKGYKEVKKDLIIKLPKYSLFELENGRKRMLASAGELQKGNELALPSKYVNFLYLASHYEKLKGSPEDNEQKQLFVEQHKHYLDEIIEQISEFSKRVILADANLDKVLSAYNKHRDKPIREQAENIIHLFTLTNLGAPAAFKYFDTTIDRKRYTSTKEVLDATLIHQSITGLYETRIDLSQLGGDGGGGGGGGGGGGIPWLMKKPLQLTTLVPLQEYEERLLKQTMLTGSYKEKLQSLFLKYDALWQHWENQVGHRRIKPHHIATGTVNPRPQKQYPINPKAKASIQTVINDLLKQGVLIQQNSIMNTPVYPVPKPDGKWRMVLDYREVNKTIPLIAAQNQHSAGILSSIFRGKYKTTLDLSNGFWAHSITPESYWLTAFTWLGQQYCWTRLPQGFLNSPALFNADVVDLLKEVPNVQVYVDDIYISHDDPREHLEQLEKVFSLLLNAGYVVSLKKSEIAQHEVEFLGFNITKEGRGLTETFKQKLLNITPPRDLKQLQSILGKLNFARNFIPNFSELVKPLYNIIATAPGKYITWTTDNSQQLQNIISMLNSAENLEERNPEVRLIMKVNTSPSAGYIRFYNEFAKRPIMYLNYVYTKAEVKFTNTEKLLTTIHKGLIKALDLGMGQEILVYSPIVSMTKIQKTPLPERKALPIRWITWMSYLEDPRIQFHYDKTLPELQQVPTVTDDIIAKIKHPSEFSMVFYTDGSAIKHPNVNKSHNAGMGIAQVQFKPEFTVINTWSIPLGDHTAQLAEVAAVEFACKKALKIDGPVLIVTDSFYVAESVNKELPYWQSNGFFNNKKKPLKHVSKWKSIADCIQLKPDIIIIHEKGHQPTASTFHTEGNNLADKLATQGSYVVNAGKRTADGSEFEKRTADGSEFESPKKKAKVE

SEQ ID NO: 579 - protein, 2087 aa, synthetic construct
MPAAKRVKLDGGDKKYSIGLDIGTNSVGWAVITDEYKVPSKKFKVLGNTDRHSIKKNLIGALLFDSGETAEATRLKRTARRRYTRRKNRICYLQEIFSNEMAKVDDSFFHRLEESFLVEEDKKHERHPIFGNIVDEVAYHEKYPTIYHLRKKLVDSTDKADLRLIYLALAHMIKFRGHFLIEGDLNPDNSDVDKLFIQLVQTYNQLFEENPINASGVDAKAILSARLSKSRRLENLIAQLPGEKKNGLFGNLIALSLGLTPNFKSNFDLAEDAKLQLSKDTYDDDLDNLLAQIGDQYADLFLAAKNLSDAILLSDILRVNTEITKAPLSASMIKRYDEHHQDLTLLKALVRQQLPEKYKEIFFDQSKNGYAGYIDGGASQEEFYKFIKPILEKMDGTEELLVKLNREDLLRKQRTFDNGSIPHQIHLGELHAILRRQEDFYPFLKDNREKIEKILTFRIPYYVGPLARGNSRFAWMTRKSEETITPWNFEEVVDKGASAQSFIERMTNFDKNLPNEKVLPKHSLLYEYFTVYNELTKVKYVTEGMRKPAFLSGEQKKAIVDLLFKTNRKVTVKQLKEDYFKKIECFDSVEISGVEDRFNASLGTYHDLLKIIKDKDFLDNEENEDILEDIVLTLTLFEDREMIEERLKTYAHLFDDKVMKQLKRRRYTGWGRLSRKLINGIRDKQSGKTILDFLKSDGFANRNFMQLIHDDSLTFKEDIQKAQVSGQGDSLHEHIANLAGSPAIKKGILQTVKVVDELVKVMGRHKPENIVIEMARENQTTQKGQKNSRERMKRIEEGIKELGSQILKEHPVENTQLQNEKLYLYYLQNGRDMYVDQELDINRLSDYDVDHIVPQSFLKDDSIDNKVLTRSDKARGKSDNVPSEEVVKKMKNYWRQLLNAKLITQRKFDNLTKAERGGLSELDKAGFIKRQLVETRQITKHVAQILDSRMNTKYDENDKLIREVKVITLKSKLVSDFRKDFQFYKVREINNYHHAHDAYLNAVVGTALIKKYPKLESEFVYGDYKVYDVRKMIAKSEQEIGKATAKYFFYSNIMNFFKTEITLANGEIRKRPLIETNGETGEIVWDKGRDFATVRKVLSMPQVNIVKKTEVQTGGFSKESILPKRNSDKLIARKKDWDPKKYGGFDSPTVAYSVLVVAKVEKGKSKKLKSVKELLGITIMERSSFEKNPIDFLEAKGYKEVKKDLIIKLPKYSLFELENGRKRMLASAGELQKGNELALPSKYVNFLYLASHYEKLKGSPEDNEQKQLFVEQHKHYLDEIIEQISEFSKRVILADANLDKVLSAYNKHRDKPIREQAENIIHLFTLTNLGAPAAFKYFDTTIDRKRYTSTKEVLDATLIHQSITGLYETRIDLSQLGGDGGPAPGSSEAAAKGGIPWLMKKPLQLTTLVPLQEYEERLLKQTMLTGSYKEKLQSLFLKYDALWQHWENQVGHRRIKPHHIATGTVNPRPQKQYPINPKAKASIQTVINDLLKQGVLIQQNSIMNTPVYPVPKPDGKWRMVLDYREVNKTIPLIAAQNQHSAGILSSIFRGKYKTTLDLSNGFWAHSITPESYWLTAFTWLGQQYCWTRLPQGFLNSPALFNADVVDLLKEVPNVQVYVDDIYISHDDPREHLEQLEKVFSLLLNAGYVVSLKKSEIAQHEVEFLGFNITKEGRGLTETFKQKLLNITPPRDLKQLQSILGKLNFARNFIPNFSELVKPLYNIIATAPGKYITWTTDNSQQLQNIISMLNSAENLEERNPEVRLIMKVNTSPSAGYIRFYNEFAKRPIMYLNYVYTKAEVKFTNTEKLLTTIHKGLIKALDLGMGQEILVYSPIVSMTKIQKTPLPERKALPIRWITWMSYLEDPRIQFHYDKTLPELQQVPTVTDDIIAKIKHPSEFSMVFYTDGSAIKHPNVNKSHNAGMGIAQVQFKPEFTVINTWSIPLGDHTAQLAEVAAVEFACKKALKIDGPVLIVTDSFYVAESVNKELPYWQSNGFFNNKKKPLKHVSKWKSIADCIQLKPDIIIIHEKGHQPTASTFHTEGNNLADKLATQGSYVVNAGKRTADGSEFEKRTADGSEFESPKKKAKVE

SEQ ID NO: 580 - protein, 2087 aa, synthetic construct
MPAAKRVKLDGGDKKYSIGLDIGTNSVGWAVITDEYKVPSKKFKVLGNTDRHSIKKNLIGALLFDSGETAEATRLKRTARRRYTRRKNRICYLQEIFSNEMAKVDDSFFHRLEESFLVEEDKKHERHPIFGNIVDEVAYHEKYPTIYHLRKKLVDSTDKADLRLIYLALAHMIKFRGHFLIEGDLNPDNSDVDKLFIQLVQTYNQLFEENPINASGVDAKAILSARLSKSRRLENLIAQLPGEKKNGLFGNLIALSLGLTPNFKSNFDLAEDAKLQLSKDTYDDDLDNLLAQIGDQYADLFLAAKNLSDAILLSDILRVNTEITKAPLSASMIKRYDEHHQDLTLLKALVRQQLPEKYKEIFFDQSKNGYAGYIDGGASQEEFYKFIKPILEKMDGTEELLVKLNREDLLRKQRTFDNGSIPHQIHLGELHAILRRQEDFYPFLKDNREKIEKILTFRIPYYVGPLARGNSRFAWMTRKSEETITPWNFEEVVDKGASAQSFIERMTNFDKNLPNEKVLPKHSLLYEYFTVYNELTKVKYVTEGMRKPAFLSGEQKKAIVDLLFKTNRKVTVKQLKEDYFKKIECFDSVEISGVEDRFNASLGTYHDLLKIIKDKDFLDNEENEDILEDIVLTLTLFEDREMIEERLKTYAHLFDDKVMKQLKRRRYTGWGRLSRKLINGIRDKQSGKTILDFLKSDGFANRNFMQLIHDDSLTFKEDIQKAQVSGQGDSLHEHIANLAGSPAIKKGILQTVKVVDELVKVMGRHKPENIVIEMARENQTTQKGQKNSRERMKRIEEGIKELGSQILKEHPVENTQLQNEKLYLYYLQNGRDMYVDQELDINRLSDYDVDHIVPQSFLKDDSIDNKVLTRSDKARGKSDNVPSEEVVKKMKNYWRQLLNAKLITQRKFDNLTKAERGGLSELDKAGFIKRQLVETRQITKHVAQILDSRMNTKYDENDKLIREVKVITLKSKLVSDFRKDFQFYKVREINNYHHAHDAYLNAVVGTALIKKYPKLESEFVYGDYKVYDVRKMIAKSEQEIGKATAKYFFYSNIMNFFKTEITLANGEIRKRPLIETNGETGEIVWDKGRDFATVRKVLSMPQVNIVKKTEVQTGGFSKESILPKRNSDKLIARKKDWDPKKYGGFDSPTVAYSVLVVAKVEKGKSKKLKSVKELLGITIMERSSFEKNPIDFLEAKGYKEVKKDLIIKLPKYSLFELENGRKRMLASAGELQKGNELALPSKYVNFLYLASHYEKLKGSPEDNEQKQLFVEQHKHYLDEIIEQISEFSKRVILADANLDKVLSAYNKHRDKPIREQAENIIHLFTLTNLGAPAAFKYFDTTIDRKRYTSTKEVLDATLIHQSITGLYETRIDLSQLGGDGGGGSEAAAKPAPGGIPWLMKKPLQLTTLVPLQEYEERLLKQTMLTGSYKEKLQSLFLKYDALWQHWENQVGHRRIKPHHIATGTVNPRPQKQYPINPKAKASIQTVINDLLKQGVLIQQNSIMNTPVYPVPKPDGKWRMVLDYREVNKTIPLIAAQNQHSAGILSSIFRGKYKTTLDLSNGFWAHSITPESYWLTAFTWLGQQYCWTRLPQGFLNSPALFNADVVDLLKEVPNVQVYVDDIYISHDDPREHLEQLEKVFSLLLNAGYVVSLKKSEIAQHEVEFLGFNITKEGRGLTETFKQKLLNITPPRDLKQLQSILGKLNFARNFIPNFSELVKPLYNIIATAPGKYITWTTDNSQQLQNIISMLNSAENLEERNPEVRLIMKVNTSPSAGYIRFYNEFAKRPIMYLNYVYTKAEVKFTNTEKLLTTIHKGLIKALDLGMGQEILVYSPIVSMTKIQKTPLPERKALPIRWITWMSYLEDPRIQFHYDKTLPELQQVPTVTDDIIAKIKHPSEFSMVFYTDGSAIKHPNVNKSHNAGMGIAQVQFKPEFTVINTWSIPLGDHTAQLAEVAAVEFACKKALKIDGPVLIVTDSFYVAESVNKELPYWQSNGFFNNKKKPLKHVSKWKSIADCIQLKPDIIIIHEKGHQPTASTFHTEGNNLADKLATQGSYVVNAGKRTADGSEFEKRTADGSEFESPKKKAKVE

SEQ ID NO: 581 - protein, 2085 aa, synthetic construct
MPAAKRVKLDGGDKKYSIGLDIGTNSVGWAVITDEYKVPSKKFKVLGNTDRHSIKKNLIGALLFDSGETAEATRLKRTARRRYTRRKNRICYLQEIFSNEMAKVDDSFFHRLEESFLVEEDKKHERHPIFGNIVDEVAYHEKYPTIYHLRKKLVDSTDKADLRLIYLALAHMIKFRGHFLIEGDLNPDNSDVDKLFIQLVQTYNQLFEENPINASGVDAKAILSARLSKSRRLENLIAQLPGEKKNGLFGNLIALSLGLTPNFKSNFDLAEDAKLQLSKDTYDDDLDNLLAQIGDQYADLFLAAKNLSDAILLSDILRVNTEITKAPLSASMIKRYDEHHQDLTLLKALVRQQLPEKYKEIFFDQSKNGYAGYIDGGASQEEFYKFIKPILEKMDGTEELLVKLNREDLLRKQRTFDNGSIPHQIHLGELHAILRRQEDFYPFLKDNREKIEKILTFRIPYYVGPLARGNSRFAWMTRKSEETITPWNFEEVVDKGASAQSFIERMTNFDKNLPNEKVLPKHSLLYEYFTVYNELTKVKYVTEGMRKPAFLSGEQKKAIVDLLFKTNRKVTVKQLKEDYFKKIECFDSVEISGVEDRFNASLGTYHDLLKIIKDKDFLDNEENEDILEDIVLTLTLFEDREMIEERLKTYAHLFDDKVMKQLKRRRYTGWGRLSRKLINGIRDKQSGKTILDFLKSDGFANRNFMQLIHDDSLTFKEDIQKAQVSGQGDSLHEHIANLAGSPAIKKGILQTVKVVDELVKVMGRHKPENIVIEMARENQTTQKGQKNSRERMKRIEEGIKELGSQILKEHPVENTQLQNEKLYLYYLQNGRDMYVDQELDINRLSDYDVDHIVPQSFLKDDSIDNKVLTRSDKARGKSDNVPSEEVVKKMKNYWRQLLNAKLITQRKFDNLTKAERGGLSELDKAGFIKRQLVETRQITKHVAQILDSRMNTKYDENDKLIREVKVITLKSKLVSDFRKDFQFYKVREINNYHHAHDAYLNAVVGTALIKKYPKLESEFVYGDYKVYDVRKMIAKSEQEIGKATAKYFFYSNIMNFFKTEITLANGEIRKRPLIETNGETGEIVWDKGRDFATVRKVLSMPQVNIVKKTEVQTGGFSKESILPKRNSDKLIARKKDWDPKKYGGFDSPTVAYSVLVVAKVEKGKSKKLKSVKELLGITIMERSSFEKNPIDFLEAKGYKEVKKDLIIKLPKYSLFELENGRKRMLASAGELQKGNELALPSKYVNFLYLASHYEKLKGSPEDNEQKQLFVEQHKHYLDEIIEQISEFSKRVILADANLDKVLSAYNKHRDKPIREQAENIIHLFTLTNLGAPAAFKYFDTTIDRKRYTSTKEVLDATLIHQSITGLYETRIDLSQLGGDGGPAPGSSGGGGGIPWLMKKPLQLTTLVPLQEYEERLLKQTMLTGSYKEKLQSLFLKYDALWQHWENQVGHRRIKPHHIATGTVNPRPQKQYPINPKAKASIQTVINDLLKQGVLIQQNSIMNTPVYPVPKPDGKWRMVLDYREVNKTIPLIAAQNQHSAGILSSIFRGKYKTTLDLSNGFWAHSITPESYWLTAFTWLGQQYCWTRLPQGFLNSPALFNADVVDLLKEVPNVQVYVDDIYISHDDPREHLEQLEKVFSLLLNAGYVVSLKKSEIAQHEVEFLGFNITKEGRGLTETFKQKLLNITPPRDLKQLQSILGKLNFARNFIPNFSELVKPLYNIIATAPGKYITWTTDNSQQLQNIISMLNSAENLEERNPEVRLIMKVNTSPSAGYIRFYNEFAKRPIMYLNYVYTKAEVKFTNTEKLLTTIHKGLIKALDLGMGQEILVYSPIVSMTKIQKTPLPERKALPIRWITWMSYLEDPRIQFHYDKTLPELQQVPTVTDDIIAKIKHPSEFSMVFYTDGSAIKHPNVNKSHNAGMGIAQVQFKPEFTVINTWSIPLGDHTAQLAEVAAVEFACKKALKIDGPVLIVTDSFYVAESVNKELPYWQSNGFFNNKKKPLKHVSKWKSIADCIQLKPDIIIIHEKGHQPTASTFHTEGNNLADKLATQGSYVVNAGKRTADGSEFEKRTADGSEFESPKKKAKVE

SEQ ID NO: 582 - protein, 2087 aa, synthetic construct
MPAAKRVKLDGGDKKYSIGLDIGTNSVGWAVITDEYKVPSKKFKVLGNTDRHSIKKNLIGALLFDSGETAEATRLKRTARRRYTRRKNRICYLQEIFSNEMAKVDDSFFHRLEESFLVEEDKKHERHPIFGNIVDEVAYHEKYPTIYHLRKKLVDSTDKADLRLIYLALAHMIKFRGHFLIEGDLNPDNSDVDKLFIQLVQTYNQLFEENPINASGVDAKAILSARLSKSRRLENLIAQLPGEKKNGLFGNLIALSLGLTPNFKSNFDLAEDAKLQLSKDTYDDDLDNLLAQIGDQYADLFLAAKNLSDAILLSDILRVNTEITKAPLSASMIKRYDEHHQDLTLLKALVRQQLPEKYKEIFFDQSKNGYAGYIDGGASQEEFYKFIKPILEKMDGTEELLVKLNREDLLRKQRTFDNGSIPHQIHLGELHAILRRQEDFYPFLKDNREKIEKILTFRIPYYVGPLARGNSRFAWMTRKSEETITPWNFEEVVDKGASAQSFIERMTNFDKNLPNEKVLPKHSLLYEYFTVYNELTKVKYVTEGMRKPAFLSGEQKKAIVDLLFKTNRKVTVKQLKEDYFKKIECFDSVEISGVEDRFNASLGTYHDLLKIIKDKDFLDNEENEDILEDIVLTLTLFEDREMIEERLKTYAHLFDDKVMKQLKRRRYTGWGRLSRKLINGIRDKQSGKTILDFLKSDGFANRNFMQLIHDDSLTFKEDIQKAQVSGQGDSLHEHIANLAGSPAIKKGILQTVKVVDELVKVMGRHKPENIVIEMARENQTTQKGQKNSRERMKRIEEGIKELGSQILKEHPVENTQLQNEKLYLYYLQNGRDMYVDQELDINRLSDYDVDHIVPQSFLKDDSIDNKVLTRSDKARGKSDNVPSEEVVKKMKNYWRQLLNAKLITQRKFDNLTKAERGGLSELDKAGFIKRQLVETRQITKHVAQILDSRMNTKYDENDKLIREVKVITLKSKLVSDFRKDFQFYKVREINNYHHAHDAYLNAVVGTALIKKYPKLESEFVYGDYKVYDVRKMIAKSEQEIGKATAKYFFYSNIMNFFKTEITLANGEIRKRPLIETNGETGEIVWDKGRDFATVRKVLSMPQVNIVKKTEVQTGGFSKESILPKRNSDKLIARKKDWDPKKYGGFDSPTVAYSVLVVAKVEKGKSKKLKSVKELLGITIMERSSFEKNPIDFLEAKGYKEVKKDLIIKLPKYSLFELENGRKRMLASAGELQKGNELALPSKYVNFLYLASHYEKLKGSPEDNEQKQLFVEQHKHYLDEIIEQISEFSKRVILADANLDKVLSAYNKHRDKPIREQAENIIHLFTLTNLGAPAAFKYFDTTIDRKRYTSTKEVLDATLIHQSITGLYETRIDLSQLGGDGGGGGGSSEAAAKGGIPWLMKKPLQLTTLVPLQEYEERLLKQTMLTGSYKEKLQSLFLKYDALWQHWENQVGHRRIKPHHIATGTVNPRPQKQYPINPKAKASIQTVINDLLKQGVLIQQNSIMNTPVYPVPKPDGKWRMVLDYREVNKTIPLIAAQNQHSAGILSSIFRGKYKTTLDLSNGFWAHSITPESYWLTAFTWLGQQYCWTRLPQGFLNSPALFNADVVDLLKEVPNVQVYVDDIYISHDDPREHLEQLEKVFSLLLNAGYVVSLKKSEIAQHEVEFLGFNITKEGRGLTETFKQKLLNITPPRDLKQLQSILGKLNFARNFIPNFSELVKPLYNIIATAPGKYITWTTDNSQQLQNIISMLNSAENLEERNPEVRLIMKVNTSPSAGYIRFYNEFAKRPIMYLNYVYTKAEVKFTNTEKLLTTIHKGLIKALDLGMGQEILVYSPIVSMTKIQKTPLPERKALPIRWITWMSYLEDPRIQFHYDKTLPELQQVPTVTDDIIAKIKHPSEFSMVFYTDGSAIKHPNVNKSHNAGMGIAQVQFKPEFTVINTWSIPLGDHTAQLAEVAAVEFACKKALKIDGPVLIVTDSFYVAESVNKELPYWQSNGFFNNKKKPLKHVSKWKSIADCIQLKPDIIIIHEKGHQPTASTFHTEGNNLADKLATQGSYVVNAGKRTADGSEFEKRTADGSEFESPKKKAKVE

SEQ ID NO: 583 - protein, 2087 aa, synthetic construct
MPAAKRVKLDGGDKKYSIGLDIGTNSVGWAVITDEYKVPSKKFKVLGNTDRHSIKKNLIGALLFDSGETAEATRLKRTARRRYTRRKNRICYLQEIFSNEMAKVDDSFFHRLEESFLVEEDKKHERHPIFGNIVDEVAYHEKYPTIYHLRKKLVDSTDKADLRLIYLALAHMIKFRGHFLIEGDLNPDNSDVDKLFIQLVQTYNQLFEENPINASGVDAKAILSARLSKSRRLENLIAQLPGEKKNGLFGNLIALSLGLTPNFKSNFDLAEDAKLQLSKDTYDDDLDNLLAQIGDQYADLFLAAKNLSDAILLSDILRVNTEITKAPLSASMIKRYDEHHQDLTLLKALVRQQLPEKYKEIFFDQSKNGYAGYIDGGASQEEFYKFIKPILEKMDGTEELLVKLNREDLLRKQRTFDNGSIPHQIHLGELHAILRRQEDFYPFLKDNREKIEKILTFRIPYYVGPLARGNSRFAWMTRKSEETITPWNFEEVVDKGASAQSFIERMTNFDKNLPNEKVLPKHSLLYEYFTVYNELTKVKYVTEGMRKPAFLSGEQKKAIVDLLFKTNRKVTVKQLKEDYFKKIECFDSVEISGVEDRFNASLGTYHDLLKIIKDKDFLDNEENEDILEDIVLTLTLFEDREMIEERLKTYAHLFDDKVMKQLKRRRYTGWGRLSRKLINGIRDKQSGKTILDFLKSDGFANRNFMQLIHDDSLTFKEDIQKAQVSGQGDSLHEHIANLAGSPAIKKGILQTVKVVDELVKVMGRHKPENIVIEMARENQTTQKGQKNSRERMKRIEEGIKELGSQILKEHPVENTQLQNEKLYLYYLQNGRDMYVDQELDINRLSDYDVDHIVPQSFLKDDSIDNKVLTRSDKARGKSDNVPSEEVVKKMKNYWRQLLNAKLITQRKFDNLTKAERGGLSELDKAGFIKRQLVETRQITKHVAQILDSRMNTKYDENDKLIREVKVITLKSKLVSDFRKDFQFYKVREINNYHHAHDAYLNAVVGTALIKKYPKLESEFVYGDYKVYDVRKMIAKSEQEIGKATAKYFFYSNIMNFFKTEITLANGEIRKRPLIETNGETGEIVWDKGRDFATVRKVLSMPQVNIVKKTEVQTGGFSKESILPKRNSDKLIARKKDWDPKKYGGFDSPTVAYSVLVVAKVEKGKSKKLKSVKELLGITIMERSSFEKNPIDFLEAKGYKEVKKDLIIKLPKYSLFELENGRKRMLASAGELQKGNELALPSKYVNFLYLASHYEKLKGSPEDNEQKQLFVEQHKHYLDEIIEQISEFSKRVILADANLDKVLSAYNKHRDKPIREQAENIIHLFTLTNLGAPAAFKYFDTTIDRKRYTSTKEVLDATLIHQSITGLYETRIDLSQLGGDGGGGSGGGEAAAKGGIPWLMKKPLQLTTLVPLQEYEERLLKQTMLTGSYKEKLQSLFLKYDALWQHWENQVGHRRIKPHHIATGTVNPRPQKQYPINPKAKASIQTVINDLLKQGVLIQQNSIMNTPVYPVPKPDGKWRMVLDYREVNKTIPLIAAQNQHSAGILSSIFRGKYKTTLDLSNGFWAHSITPESYWLTAFTWLGQQYCWTRLPQGFLNSPALFNADVVDLLKEVPNVQVYVDDIYISHDDPREHLEQLEKVFSLLLNAGYVVSLKKSEIAQHEVEFLGFNITKEGRGLTETFKQKLLNITPPRDLKQLQSILGKLNFARNFIPNFSELVKPLYNIIATAPGKYITWTTDNSQQLQNIISMLNSAENLEERNPEVRLIMKVNTSPSAGYIRFYNEFAKRPIMYLNYVYTKAEVKFTNTEKLLTTIHKGLIKALDLGMGQEILVYSPIVSMTKIQKTPLPERKALPIRWITWMSYLEDPRIQFHYDKTLPELQQVPTVTDDIIAKIKHPSEFSMVFYTDGSAIKHPNVNKSHNAGMGIAQVQFKPEFTVINTWSIPLGDHTAQLAEVAAVEFACKKALKIDGPVLIVTDSFYVAESVNKELPYWQSNGFFNNKKKPLKHVSKWKSIADCIQLKPDIIIIHEKGHQPTASTFHTEGNNLADKLATQGSYVVNAGKRTADGSEFEKRTADGSEFESPKKKAKVE

SEQ ID NO: 584 - protein, 2085 aa, synthetic construct
MPAAKRVKLDGGDKKYSIGLDIGTNSVGWAVITDEYKVPSKKFKVLGNTDRHSIKKNLIGALLFDSGETAEATRLKRTARRRYTRRKNRICYLQEIFSNEMAKVDDSFFHRLEESFLVEEDKKHERHPIFGNIVDEVAYHEKYPTIYHLRKKLVDSTDKADLRLIYLALAHMIKFRGHFLIEGDLNPDNSDVDKLFIQLVQTYNQLFEENPINASGVDAKAILSARLSKSRRLENLIAQLPGEKKNGLFGNLIALSLGLTPNFKSNFDLAEDAKLQLSKDTYDDDLDNLLAQIGDQYADLFLAAKNLSDAILLSDILRVNTEITKAPLSASMIKRYDEHHQDLTLLKALVRQQLPEKYKEIFFDQSKNGYAGYIDGGASQEEFYKFIKPILEKMDGTEELLVKLNREDLLRKQRTFDNGSIPHQIHLGELHAILRRQEDFYPFLKDNREKIEKILTFRIPYYVGPLARGNSRFAWMTRKSEETITPWNFEEVVDKGASAQSFIERMTNFDKNLPNEKVLPKHSLLYEYFTVYNELTKVKYVTEGMRKPAFLSGEQKKAIVDLLFKTNRKVTVKQLKEDYFKKIECFDSVEISGVEDRFNASLGTYHDLLKIIKDKDFLDNEENEDILEDIVLTLTLFEDREMIEERLKTYAHLFDDKVMKQLKRRRYTGWGRLSRKLINGIRDKQSGKTILDFLKSDGFANRNFMQLIHDDSLTFKEDIQKAQVSGQGDSLHEHIANLAGSPAIKKGILQTVKVVDELVKVMGRHKPENIVIEMARENQTTQKGQKNSRERMKRIEEGIKELGSQILKEHPVENTQLQNEKLYLYYLQNGRDMYVDQELDINRLSDYDVDHIVPQSFLKDDSIDNKVLTRSDKARGKSDNVPSEEVVKKMKNYWRQLLNAKLITQRKFDNLTKAERGGLSELDKAGFIKRQLVETRQITKHVAQILDSRMNTKYDENDKLIREVKVITLKSKLVSDFRKDFQFYKVREINNYHHAHDAYLNAVVGTALIKKYPKLESEFVYGDYKVYDVRKMIAKSEQEIGKATAKYFFYSNIMNFFKTEITLANGEIRKRPLIETNGETGEIVWDKGRDFATVRKVLSMPQVNIVKKTEVQTGGFSKESILPKRNSDKLIARKKDWDPKKYGGFDSPTVAYSVLVVAKVEKGKSKKLKSVKELLGITIMERSSFEKNPIDFLEAKGYKEVKKDLIIKLPKYSLFELENGRKRMLASAGELQKGNELALPSKYVNFLYLASHYEKLKGSPEDNEQKQLFVEQHKHYLDEIIEQISEFSKRVILADANLDKVLSAYNKHRDKPIREQAENIIHLFTLTNLGAPAAFKYFDTTIDRKRYTSTKEVLDATLIHQSITGLYETRIDLSQLGGDGGGSSGGSPAPGGIPWLMKKPLQLTTLVPLQEYEERLLKQTMLTGSYKEKLQSLFLKYDALWQHWENQVGHRRIKPHHIATGTVNPRPQKQYPINPKAKASIQTVINDLLKQGVLIQQNSIMNTPVYPVPKPDGKWRMVLDYREVNKTIPLIAAQNQHSAGILSSIFRGKYKTTLDLSNGFWAHSITPESYWLTAFTWLGQQYCWTRLPQGFLNSPALFNADVVDLLKEVPNVQVYVDDIYISHDDPREHLEQLEKVFSLLLNAGYVVSLKKSEIAQHEVEFLGFNITKEGRGLTETFKQKLLNITPPRDLKQLQSILGKLNFARNFIPNFSELVKPLYNIIATAPGKYITWTTDNSQQLQNIISMLNSAENLEERNPEVRLIMKVNTSPSAGYIRFYNEFAKRPIMYLNYVYTKAEVKFTNTEKLLTTIHKGLIKALDLGMGQEILVYSPIVSMTKIQKTPLPERKALPIRWITWMSYLEDPRIQFHYDKTLPELQQVPTVTDDIIAKIKHPSEFSMVFYTDGSAIKHPNVNKSHNAGMGIAQVQFKPEFTVINTWSIPLGDHTAQLAEVAAVEFACKKALKIDGPVLIVTDSFYVAESVNKELPYWQSNGFFNNKKKPLKHVSKWKSIADCIQLKPDIIIIHEKGHQPTASTFHTEGNNLADKLATQGSYVVNAGKRTADGSEFEKRTADGSEFESPKKKAKVE

SEQ ID NO: 585 - protein, 2109 aa, synthetic construct
MPAAKRVKLDGGDKKYSIGLDIGTNSVGWAVITDEYKVPSKKFKVLGNTDRHSIKKNLIGALLFDSGETAEATRLKRTARRRYTRRKNRICYLQEIFSNEMAKVDDSFFHRLEESFLVEEDKKHERHPIFGNIVDEVAYHEKYPTIYHLRKKLVDSTDKADLRLIYLALAHMIKFRGHFLIEGDLNPDNSDVDKLFIQLVQTYNQLFEENPINASGVDAKAILSARLSKSRRLENLIAQLPGEKKNGLFGNLIALSLGLTPNFKSNFDLAEDAKLQLSKDTYDDDLDNLLAQIGDQYADLFLAAKNLSDAILLSDILRVNTEITKAPLSASMIKRYDEHHQDLTLLKALVRQQLPEKYKEIFFDQSKNGYAGYIDGGASQEEFYKFIKPILEKMDGTEELLVKLNREDLLRKQRTFDNGSIPHQIHLGELHAILRRQEDFYPFLKDNREKIEKILTFRIPYYVGPLARGNSRFAWMTRKSEETITPWNFEEVVDKGASAQSFIERMTNFDKNLPNEKVLPKHSLLYEYFTVYNELTKVKYVTEGMRKPAFLSGEQKKAIVDLLFKTNRKVTVKQLKEDYFKKIECFDSVEISGVEDRFNASLGTYHDLLKIIKDKDFLDNEENEDILEDIVLTLTLFEDREMIEERLKTYAHLFDDKVMKQLKRRRYTGWGRLSRKLINGIRDKQSGKTILDFLKSDGFANRNFMQLIHDDSLTFKEDIQKAQVSGQGDSLHEHIANLAGSPAIKKGILQTVKVVDELVKVMGRHKPENIVIEMARENQTTQKGQKNSRERMKRIEEGIKELGSQILKEHPVENTQLQNEKLYLYYLQNGRDMYVDQELDINRLSDYDVDHIVPQSFLKDDSIDNKVLTRSDKARGKSDNVPSEEVVKKMKNYWRQLLNAKLITQRKFDNLTKAERGGLSELDKAGFIKRQLVETRQITKHVAQILDSRMNTKYDENDKLIREVKVITLKSKLVSDFRKDFQFYKVREINNYHHAHDAYLNAVVGTALIKKYPKLESEFVYGDYKVYDVRKMIAKSEQEIGKATAKYFFYSNIMNFFKTEITLANGEIRKRPLIETNGETGEIVWDKGRDFATVRKVLSMPQVNIVKKTEVQTGGFSKESILPKRNSDKLIARKKDWDPKKYGGFDSPTVAYSVLVVAKVEKGKSKKLKSVKELLGITIMERSSFEKNPIDFLEAKGYKEVKKDLIIKLPKYSLFELENGRKRMLASAGELQKGNELALPSKYVNFLYLASHYEKLKGSPEDNEQKQLFVEQHKHYLDEIIEQISEFSKRVILADANLDKVLSAYNKHRDKPIREQAENIIHLFTLTNLGAPAAFKYFDTTIDRKRYTSTKEVLDATLIHQSITGLYETRIDLSQLGGDGGSGGSSGGSSGSETPGTSESATPESSGGSSGGSSGGIPWLMKKPLQLTTLVPLQEYEERLLKQTMLTGSYKEKLQSLFLKYDALWQHWENQVGHRRIKPHHIATGTVNPRPQKQYPINPKAKASIQTVINDLLKQGVLIQQNSIMNTPVYPVPKPDGKWRMVLDYREVNKTIPLIAAQNQHSAGILSSIFRGKYKTTLDLSNGFWAHSITPESYWLTAFTWLGQQYCWTRLPQGFLNSPALFNADVVDLLKEVPNVQVYVDDIYISHDDPREHLEQLEKVFSLLLNAGYVVSLKKSEIAQHEVEFLGFNITKEGRGLTETFKQKLLNITPPRDLKQLQSILGKLNFARNFIPNFSELVKPLYNIIATAPGKYITWTTDNSQQLQNIISMLNSAENLEERNPEVRLIMKVNTSPSAGYIRFYNEFAKRPIMYLNYVYTKAEVKFTNTEKLLTTIHKGLIKALDLGMGQEILVYSPIVSMTKIQKTPLPERKALPIRWITWMSYLEDPRIQFHYDKTLPELQQVPTVTDDIIAKIKHPSEFSMVFYTDGSAIKHPNVNKSHNAGMGIAQVQFKPEFTVINTWSIPLGDHTAQLAEVAAVEFACKKALKIDGPVLIVTDSFYVAESVNKELPYWQSNGFFNNKKKPLKHVSKWKSIADCIQLKPDIIIIHEKGHQPTASTFHTEGNNLADKLATQGSYVVNAGKRTADGSEFEKRTADGSEFESPKKKAKVE

SEQ ID NO: 586 - protein, 2088 aa, synthetic construct
MPAAKRVKLDGGDKKYSIGLDIGTNSVGWAVITDEYKVPSKKFKVLGNTDRHSIKKNLIGALLFDSGETAEATRLKRTARRRYTRRKNRICYLQEIFSNEMAKVDDSFFHRLEESFLVEEDKKHERHPIFGNIVDEVAYHEKYPTIYHLRKKLVDSTDKADLRLIYLALAHMIKFRGHFLIEGDLNPDNSDVDKLFIQLVQTYNQLFEENPINASGVDAKAILSARLSKSRRLENLIAQLPGEKKNGLFGNLIALSLGLTPNFKSNFDLAEDAKLQLSKDTYDDDLDNLLAQIGDQYADLFLAAKNLSDAILLSDILRVNTEITKAPLSASMIKRYDEHHQDLTLLKALVRQQLPEKYKEIFFDQSKNGYAGYIDGGASQEEFYKFIKPILEKMDGTEELLVKLNREDLLRKQRTFDNGSIPHQIHLGELHAILRRQEDFYPFLKDNREKIEKILTFRIPYYVGPLARGNSRFAWMTRKSEETITPWNFEEVVDKGASAQSFIERMTNFDKNLPNEKVLPKHSLLYEYFTVYNELTKVKYVTEGMRKPAFLSGEQKKAIVDLLFKTNRKVTVKQLKEDYFKKIECFDSVEISGVEDRFNASLGTYHDLLKIIKDKDFLDNEENEDILEDIVLTLTLFEDREMIEERLKTYAHLFDDKVMKQLKRRRYTGWGRLSRKLINGIRDKQSGKTILDFLKSDGFANRNFMQLIHDDSLTFKEDIQKAQVSGQGDSLHEHIANLAGSPAIKKGILQTVKVVDELVKVMGRHKPENIVIEMARENQTTQKGQKNSRERMKRIEEGIKELGSQILKEHPVENTQLQNEKLYLYYLQNGRDMYVDQELDINRLSDYDVDHIVPQSFLKDDSIDNKVLTRSDKARGKSDNVPSEEVVKKMKNYWRQLLNAKLITQRKFDNLTKAERGGLSELDKAGFIKRQLVETRQITKHVAQILDSRMNTKYDENDKLIREVKVITLKSKLVSDFRKDFQFYKVREINNYHHAHDAYLNAVVGTALIKKYPKLESEFVYGDYKVYDVRKMIAKSEQEIGKATAKYFFYSNIMNFFKTEITLANGEIRKRPLIETNGETGEIVWDKGRDFATVRKVLSMPQVNIVKKTEVQTGGFSKESILPKRNSDKLIARKKDWDPKKYGGFDSPTVAYSVLVVAKVEKGKSKKLKSVKELLGITIMERSSFEKNPIDFLEAKGYKEVKKDLIIKLPKYSLFELENGRKRMLASAGELQKGNELALPSKYVNFLYLASHYEKLKGSPEDNEQKQLFVEQHKHYLDEIIEQISEFSKRVILADANLDKVLSAYNKHRDKPIREQAENIIHLFTLTNLGAPAAFKYFDTTIDRKRYTSTKEVLDATLIHQSITGLYETRIDLSQLGGDGGGSSGSSGSSGSSGGIPWLMKKPLQLTTLVPLQEYEERLLKQTMLTGSYKEKLQSLFLKYDALWQHWENQVGHRRIKPHHIATGTVNPRPQKQYPINPKAKASIQTVINDLLKQGVLIQQNSIMNTPVYPVPKPDGKWRMVLDYREVNKTIPLIAAQNQHSAGILSSIFRGKYKTTLDLSNGFWAHSITPESYWLTAFTWLGQQYCWTRLPQGFLNSPALFNADVVDLLKEVPNVQVYVDDIYISHDDPREHLEQLEKVFSLLLNAGYVVSLKKSEIAQHEVEFLGFNITKEGRGLTETFKQKLLNITPPRDLKQLQSILGKLNFARNFIPNFSELVKPLYNIIATAPGKYITWTTDNSQQLQNIISMLNSAENLEERNPEVRLIMKVNTSPSAGYIRFYNEFAKRPIMYLNYVYTKAEVKFTNTEKLLTTIHKGLIKALDLGMGQEILVYSPIVSMTKIQKTPLPERKALPIRWITWMSYLEDPRIQFHYDKTLPELQQVPTVTDDIIAKIKHPSEFSMVFYTDGSAIKHPNVNKSHNAGMGIAQVQFKPEFTVINTWSIPLGDHTAQLAEVAAVEFACKKALKIDGPVLIVTDSFYVAESVNKELPYWQSNGFFNNKKKPLKHVSKWKSIADCIQLKPDIIIIHEKGHQPTASTFHTEGNNLADKLATQGSYVVNAGKRTADGSEFEKRTADGSEFESPKKKAKVE

SEQ ID NO: 587 - protein, 2085 aa, synthetic construct
MPAAKRVKLDGGDKKYSIGLDIGTNSVGWAVITDEYKVPSKKFKVLGNTDRHSIKKNLIGALLFDSGETAEATRLKRTARRRYTRRKNRICYLQEIFSNEMAKVDDSFFHRLEESFLVEEDKKHERHPIFGNIVDEVAYHEKYPTIYHLRKKLVDSTDKADLRLIYLALAHMIKFRGHFLIEGDLNPDNSDVDKLFIQLVQTYNQLFEENPINASGVDAKAILSARLSKSRRLENLIAQLPGEKKNGLFGNLIALSLGLTPNFKSNFDLAEDAKLQLSKDTYDDDLDNLLAQIGDQYADLFLAAKNLSDAILLSDILRVNTEITKAPLSASMIKRYDEHHQDLTLLKALVRQQLPEKYKEIFFDQSKNGYAGYIDGGASQEEFYKFIKPILEKMDGTEELLVKLNREDLLRKQRTFDNGSIPHQIHLGELHAILRRQEDFYPFLKDNREKIEKILTFRIPYYVGPLARGNSRFAWMTRKSEETITPWNFEEVVDKGASAQSFIERMTNFDKNLPNEKVLPKHSLLYEYFTVYNELTKVKYVTEGMRKPAFLSGEQKKAIVDLLFKTNRKVTVKQLKEDYFKKIECFDSVEISGVEDRFNASLGTYHDLLKIIKDKDFLDNEENEDILEDIVLTLTLFEDREMIEERLKTYAHLFDDKVMKQLKRRRYTGWGRLSRKLINGIRDKQSGKTILDFLKSDGFANRNFMQLIHDDSLTFKEDIQKAQVSGQGDSLHEHIANLAGSPAIKKGILQTVKVVDELVKVMGRHKPENIVIEMARENQTTQKGQKNSRERMKRIEEGIKELGSQILKEHPVENTQLQNEKLYLYYLQNGRDMYVDQELDINRLSDYDVDHIVPQSFLKDDSIDNKVLTRSDKARGKSDNVPSEEVVKKMKNYWRQLLNAKLITQRKFDNLTKAERGGLSELDKAGFIKRQLVETRQITKHVAQILDSRMNTKYDENDKLIREVKVITLKSKLVSDFRKDFQFYKVREINNYHHAHDAYLNAVVGTALIKKYPKLESEFVYGDYKVYDVRKMIAKSEQEIGKATAKYFFYSNIMNFFKTEITLANGEIRKRPLIETNGETGEIVWDKGRDFATVRKVLSMPQVNIVKKTEVQTGGFSKESILPKRNSDKLIARKKDWDPKKYGGFDSPTVAYSVLVVAKVEKGKSKKLKSVKELLGITIMERSSFEKNPIDFLEAKGYKEVKKDLIIKLPKYSLFELENGRKRMLASAGELQKGNELALPSKYVNFLYLASHYEKLKGSPEDNEQKQLFVEQHKHYLDEIIEQISEFSKRVILADANLDKVLSAYNKHRDKPIREQAENIIHLFTLTNLGAPAAFKYFDTTIDRKRYTSTKEVLDATLIHQSITGLYETRIDLSQLGGDGGGSSGGSGGGGGIPWLMKKPLQLTTLVPLQEYEERLLKQTMLTGSYKEKLQSLFLKYDALWQHWENQVGHRRIKPHHIATGTVNPRPQKQYPINPKAKASIQTVINDLLKQGVLIQQNSIMNTPVYPVPKPDGKWRMVLDYREVNKTIPLIAAQNQHSAGILSSIFRGKYKTTLDLSNGFWAHSITPESYWLTAFTWLGQQYCWTRLPQGFLNSPALFNADVVDLLKEVPNVQVYVDDIYISHDDPREHLEQLEKVFSLLLNAGYVVSLKKSEIAQHEVEFLGFNITKEGRGLTETFKQKLLNITPPRDLKQLQSILGKLNFARNFIPNFSELVKPLYNIIATAPGKYITWTTDNSQQLQNIISMLNSAENLEERNPEVRLIMKVNTSPSAGYIRFYNEFAKRPIMYLNYVYTKAEVKFTNTEKLLTTIHKGLIKALDLGMGQEILVYSPIVSMTKIQKTPLPERKALPIRWITWMSYLEDPRIQFHYDKTLPELQQVPTVTDDIIAKIKHPSEFSMVFYTDGSAIKHPNVNKSHNAGMGIAQVQFKPEFTVINTWSIPLGDHTAQLAEVAAVEFACKKALKIDGPVLIVTDSFYVAESVNKELPYWQSNGFFNNKKKPLKHVSKWKSIADCIQLKPDIIIIHEKGHQPTASTFHTEGNNLADKLATQGSYVVNAGKRTADGSEFEKRTADGSEFESPKKKAKVE

SEQ ID NO: 588 - protein, 2084 aa, synthetic construct
MPAAKRVKLDGGDKKYSIGLDIGTNSVGWAVITDEYKVPSKKFKVLGNTDRHSIKKNLIGALLFDSGETAEATRLKRTARRRYTRRKNRICYLQEIFSNEMAKVDDSFFHRLEESFLVEEDKKHERHPIFGNIVDEVAYHEKYPTIYHLRKKLVDSTDKADLRLIYLALAHMIKFRGHFLIEGDLNPDNSDVDKLFIQLVQTYNQLFEENPINASGVDAKAILSARLSKSRRLENLIAQLPGEKKNGLFGNLIALSLGLTPNFKSNFDLAEDAKLQLSKDTYDDDLDNLLAQIGDQYADLFLAAKNLSDAILLSDILRVNTEITKAPLSASMIKRYDEHHQDLTLLKALVRQQLPEKYKEIFFDQSKNGYAGYIDGGASQEEFYKFIKPILEKMDGTEELLVKLNREDLLRKQRTFDNGSIPHQIHLGELHAILRRQEDFYPFLKDNREKIEKILTFRIPYYVGPLARGNSRFAWMTRKSEETITPWNFEEVVDKGASAQSFIERMTNFDKNLPNEKVLPKHSLLYEYFTVYNELTKVKYVTEGMRKPAFLSGEQKKAIVDLLFKTNRKVTVKQLKEDYFKKIECFDSVEISGVEDRFNASLGTYHDLLKIIKDKDFLDNEENEDILEDIVLTLTLFEDREMIEERLKTYAHLFDDKVMKQLKRRRYTGWGRLSRKLINGIRDKQSGKTILDFLKSDGFANRNFMQLIHDDSLTFKEDIQKAQVSGQGDSLHEHIANLAGSPAIKKGILQTVKVVDELVKVMGRHKPENIVIEMARENQTTQKGQKNSRERMKRIEEGIKELGSQILKEHPVENTQLQNEKLYLYYLQNGRDMYVDQELDINRLSDYDVDHIVPQSFLKDDSIDNKVLTRSDKARGKSDNVPSEEVVKKMKNYWRQLLNAKLITQRKFDNLTKAERGGLSELDKAGFIKRQLVETRQITKHVAQILDSRMNTKYDENDKLIREVKVITLKSKLVSDFRKDFQFYKVREINNYHHAHDAYLNAVVGTALIKKYPKLESEFVYGDYKVYDVRKMIAKSEQEIGKATAKYFFYSNIMNFFKTEITLANGEIRKRPLIETNGETGEIVWDKGRDFATVRKVLSMPQVNIVKKTEVQTGGFSKESILPKRNSDKLIARKKDWDPKKYGGFDSPTVAYSVLVVAKVEKGKSKKLKSVKELLGITIMERSSFEKNPIDFLEAKGYKEVKKDLIIKLPKYSLFELENGRKRMLASAGELQKGNELALPSKYVNFLYLASHYEKLKGSPEDNEQKQLFVEQHKHYLDEIIEQISEFSKRVILADANLDKVLSAYNKHRDKPIREQAENIIHLFTLTNLGAPAAFKYFDTTIDRKRYTSTKEVLDATLIHQSITGLYETRIDLSQLGGDGGGGGEAAAKGGIPWLMKKPLQLTTLVPLQEYEERLLKQTMLTGSYKEKLQSLFLKYDALWQHWENQVGHRRIKPHHIATGTVNPRPQKQYPINPKAKASIQTVINDLLKQGVLIQQNSIMNTPVYPVPKPDGKWRMVLDYREVNKTIPLIAAQNQHSAGILSSIFRGKYKTTLDLSNGFWAHSITPESYWLTAFTWLGQQYCWTRLPQGFLNSPALFNADVVDLLKEVPNVQVYVDDIYISHDDPREHLEQLEKVFSLLLNAGYVVSLKKSEIAQHEVEFLGFNITKEGRGLTETFKQKLLNITPPRDLKQLQSILGKLNFARNFIPNFSELVKPLYNIIATAPGKYITWTTDNSQQLQNIISMLNSAENLEERNPEVRLIMKVNTSPSAGYIRFYNEFAKRPIMYLNYVYTKAEVKFTNTEKLLTTIHKGLIKALDLGMGQEILVYSPIVSMTKIQKTPLPERKALPIRWITWMSYLEDPRIQFHYDKTLPELQQVPTVTDDIIAKIKHPSEFSMVFYTDGSAIKHPNVNKSHNAGMGIAQVQFKPEFTVINTWSIPLGDHTAQLAEVAAVEFACKKALKIDGPVLIVTDSFYVAESVNKELPYWQSNGFFNNKKKPLKHVSKWKSIADCIQLKPDIIIIHEKGHQPTASTFHTEGNNLADKLATQGSYVVNAGKRTADGSEFEKRTADGSEFESPKKKAKVE

SEQ ID NO: 589 - protein, 2085 aa, synthetic construct
MPAAKRVKLDGGDKKYSIGLDIGTNSVGWAVITDEYKVPSKKFKVLGNTDRHSIKKNLIGALLFDSGETAEATRLKRTARRRYTRRKNRICYLQEIFSNEMAKVDDSFFHRLEESFLVEEDKKHERHPIFGNIVDEVAYHEKYPTIYHLRKKLVDSTDKADLRLIYLALAHMIKFRGHFLIEGDLNPDNSDVDKLFIQLVQTYNQLFEENPINASGVDAKAILSARLSKSRRLENLIAQLPGEKKNGLFGNLIALSLGLTPNFKSNFDLAEDAKLQLSKDTYDDDLDNLLAQIGDQYADLFLAAKNLSDAILLSDILRVNTEITKAPLSASMIKRYDEHHQDLTLLKALVRQQLPEKYKEIFFDQSKNGYAGYIDGGASQEEFYKFIKPILEKMDGTEELLVKLNREDLLRKQRTFDNGSIPHQIHLGELHAILRRQEDFYPFLKDNREKIEKILTFRIPYYVGPLARGNSRFAWMTRKSEETITPWNFEEVVDKGASAQSFIERMTNFDKNLPNEKVLPKHSLLYEYFTVYNELTKVKYVTEGMRKPAFLSGEQKKAIVDLLFKTNRKVTVKQLKEDYFKKIECFDSVEISGVEDRFNASLGTYHDLLKIIKDKDFLDNEENEDILEDIVLTLTLFEDREMIEERLKTYAHLFDDKVMKQLKRRRYTGWGRLSRKLINGIRDKQSGKTILDFLKSDGFANRNFMQLIHDDSLTFKEDIQKAQVSGQGDSLHEHIANLAGSPAIKKGILQTVKVVDELVKVMGRHKPENIVIEMARENQTTQKGQKNSRERMKRIEEGIKELGSQILKEHPVENTQLQNEKLYLYYLQNGRDMYVDQELDINRLSDYDVDHIVPQSFLKDDSIDNKVLTRSDKARGKSDNVPSEEVVKKMKNYWRQLLNAKLITQRKFDNLTKAERGGLSELDKAGFIKRQLVETRQITKHVAQILDSRMNTKYDENDKLIREVKVITLKSKLVSDFRKDFQFYKVREINNYHHAHDAYLNAVVGTALIKKYPKLESEFVYGDYKVYDVRKMIAKSEQEIGKATAKYFFYSNIMNFFKTEITLANGEIRKRPLIETNGETGEIVWDKGRDFATVRKVLSMPQVNIVKKTEVQTGGFSKESILPKRNSDKLIARKKDWDPKKYGGFDSPTVAYSVLVVAKVEKGKSKKLKSVKELLGITIMERSSFEKNPIDFLEAKGYKEVKKDLIIKLPKYSLFELENGRKRMLASAGELQKGNELALPSKYVNFLYLASHYEKLKGSPEDNEQKQLFVEQHKHYLDEIIEQISEFSKRVILADANLDKVLSAYNKHRDKPIREQAENIIHLFTLTNLGAPAAFKYFDTTIDRKRYTSTKEVLDATLIHQSITGLYETRIDLSQLGGDGGGGSGSSPAPGGIPWLMKKPLQLTTLVPLQEYEERLLKQTMLTGSYKEKLQSLFLKYDALWQHWENQVGHRRIKPHHIATGTVNPRPQKQYPINPKAKASIQTVINDLLKQGVLIQQNSIMNTPVYPVPKPDGKWRMVLDYREVNKTIPLIAAQNQHSAGILSSIFRGKYKTTLDLSNGFWAHSITPESYWLTAFTWLGQQYCWTRLPQGFLNSPALFNADVVDLLKEVPNVQVYVDDIYISHDDPREHLEQLEKVFSLLLNAGYVVSLKKSEIAQHEVEFLGFNITKEGRGLTETFKQKLLNITPPRDLKQLQSILGKLNFARNFIPNFSELVKPLYNIIATAPGKYITWTTDNSQQLQNIISMLNSAENLEERNPEVRLIMKVNTSPSAGYIRFYNEFAKRPIMYLNYVYTKAEVKFTNTEKLLTTIHKGLIKALDLGMGQEILVYSPIVSMTKIQKTPLPERKALPIRWITWMSYLEDPRIQFHYDKTLPELQQVPTVTDDIIAKIKHPSEFSMVFYTDGSAIKHPNVNKSHNAGMGIAQVQFKPEFTVINTWSIPLGDHTAQLAEVAAVEFACKKALKIDGPVLIVTDSFYVAESVNKELPYWQSNGFFNNKKKPLKHVSKWKSIADCIQLKPDIIIIHEKGHQPTASTFHTEGNNLADKLATQGSYVVNAGKRTADGSEFEKRTADGSEFESPKKKAKVE

SEQ ID NO: 590 - protein, 2195 aa, synthetic construct
MPAAKRVKLDGGDKKYSIGLDIGTNSVGWAVITDEYKVPSKKFKVLGNTDRHSIKKNLIGALLFDSGETAEATRLKRTARRRYTRRKNRICYLQEIFSNEMAKVDDSFFHRLEESFLVEEDKKHERHPIFGNIVDEVAYHEKYPTIYHLRKKLVDSTDKADLRLIYLALAHMIKFRGHFLIEGDLNPDNSDVDKLFIQLVQTYNQLFEENPINASGVDAKAILSARLSKSRRLENLIAQLPGEKKNGLFGNLIALSLGLTPNFKSNFDLAEDAKLQLSKDTYDDDLDNLLAQIGDQYADLFLAAKNLSDAILLSDILRVNTEITKAPLSASMIKRYDEHHQDLTLLKALVRQQLPEKYKEIFFDQSKNGYAGYIDGGASQEEFYKFIKPILEKMDGTEELLVKLNREDLLRKQRTFDNGSIPHQIHLGELHAILRRQEDFYPFLKDNREKIEKILTFRIPYYVGPLARGNSRFAWMTRKSEETITPWNFEEVVDKGASAQSFIERMTNFDKNLPNEKVLPKHSLLYEYFTVYNELTKVKYVTEGMRKPAFLSGEQKKAIVDLLFKTNRKVTVKQLKEDYFKKIECFDSVEISGVEDRFNASLGTYHDLLKIIKDKDFLDNEENEDILEDIVLTLTLFEDREMIEERLKTYAHLFDDKVMKQLKRRRYTGWGRLSRKLINGIRDKQSGKTILDFLKSDGFANRNFMQLIHDDSLTFKEDIQKAQVSGQGDSLHEHIANLAGSPAIKKGILQTVKVVDELVKVMGRHKPENIVIEMARENQTTQKGQKNSRERMKRIEEGIKELGSQILKEHPVENTQLQNEKLYLYYLQNGRDMYVDQELDINRLSDYDVDHIVPQSFLKDDSIDNKVLTRSDKARGKSDNVPSEEVVKKMKNYWRQLLNAKLITQRKFDNLTKAERGGLSELDKAGFIKRQLVETRQITKHVAQILDSRMNTKYDENDKLIREVKVITLKSKLVSDFRKDFQFYKVREINNYHHAHDAYLNAVVGTALIKKYPKLESEFVYGDYKVYDVRKMIAKSEQEIGKATAKYFFYSNIMNFFKTEITLANGEIRKRPLIETNGETGEIVWDKGRDFATVRKVLSMPQVNIVKKTEVQTGGFSKESILPKRNSDKLIARKKDWDPKKYGGFDSPTVAYSVLVVAKVEKGKSKKLKSVKELLGITIMERSSFEKNPIDFLEAKGYKEVKKDLIIKLPKYSLFELENGRKRMLASAGELQKGNELALPSKYVNFLYLASHYEKLKGSPEDNEQKQLFVEQHKHYLDEIIEQISEFSKRVILADANLDKVLSAYNKHRDKPIREQAENIIHLFTLTNLGAPAAFKYFDTTIDRKRYTSTKEVLDATLIHQSITGLYETRIDLSQLGGDGGEAAAKEAAAKEAAAKEAAAKEAAAKEAAAKGGMDPLQLLQPLEAEIKGTKLKAHWNSGATITCVPQAFLEEEVPIKNIWIKTIHGEKEQPVYYLTFKIQGRKVEAEVISSPYDYILVSPSDIPWLMKKPLQLTTLVPLQEYEERLLKQTMLTGSYKEKLQSLFLKYDALWQHWENQVGHRRIKPHHIATGTVNPRPQKQYPINPKAKASIQTVINDLLKQGVLIQQNSIMNTPVYPVPKPDGKWRMVLDYREVNKTIPLIAAQNQHSAGILSSIFRGKYKTTLDLSNGFWAHSITPESYWLTAFTWLGQQYCWTRLPQGFLNSPALFNADVVDLLKEVPNVQVYVDDIYISHDDPREHLEQLEKVFSLLLNAGYVVSLKKSEIAQHEVEFLGFNITKEGRGLTETFKQKLLNITPPRDLKQLQSILGLLNFARNFIPNFSELVKPLYNIIATAPGKYITWTTDNSQQLQNIISMLNSAENLEERNPEVRLIMKVNTSPSAGYIRFYNEFAKRPIMYLNYVYTKAEVKFTNTEKLLTTIHKGLIKALDLGMGQEILVYSPIVSMTKIQKTPLPERKALPIRWITWMSYLEDPRIQFHYDKTLPELQQVPTVTDDIIAKIKHPSEFSMVFYTDGSAIKHPNVNKSHNAGMGIAQVQFKPEFTVINTWSIPLGDHTAQLAEVAAVEFACKKALKIDGPVLIVTDSFYVAESVNKELPYWQSNGFFNNKKKPLKHVSKWKSIADCIQLKPDIIIIHEKGHQPTASTFHTEGNNLADKLATQGSYVVNAGKRTADGSEFEKRTADGSEFESPKKKAKVE

SEQ ID NO: 591 - protein, 2211 aa, synthetic construct
MPAAKRVKLDGGDKKYSIGLDIGTNSVGWAVITDEYKVPSKKFKVLGNTDRHSIKKNLIGALLFDSGETAEATRLKRTARRRYTRRKNRICYLQEIFSNEMAKVDDSFFHRLEESFLVEEDKKHERHPIFGNIVDEVAYHEKYPTIYHLRKKLVDSTDKADLRLIYLALAHMIKFRGHFLIEGDLNPDNSDVDKLFIQLVQTYNQLFEENPINASGVDAKAILSARLSKSRRLENLIAQLPGEKKNGLFGNLIALSLGLTPNFKSNFDLAEDAKLQLSKDTYDDDLDNLLAQIGDQYADLFLAAKNLSDAILLSDILRVNTEITKAPLSASMIKRYDEHHQDLTLLKALVRQQLPEKYKEIFFDQSKNGYAGYIDGGASQEEFYKFIKPILEKMDGTEELLVKLNREDLLRKQRTFDNGSIPHQIHLGELHAILRRQEDFYPFLKDNREKIEKILTFRIPYYVGPLARGNSRFAWMTRKSEETITPWNFEEVVDKGASAQSFIERMTNFDKNLPNEKVLPKHSLLYEYFTVYNELTKVKYVTEGMRKPAFLSGEQKKAIVDLLFKTNRKVTVKQLKEDYFKKIECFDSVEISGVEDRFNASLGTYHDLLKIIKDKDFLDNEENEDILEDIVLTLTLFEDREMIEERLKTYAHLFDDKVMKQLKRRRYTGWGRLSRKLINGIRDKQSGKTILDFLKSDGFANRNFMQLIHDDSLTFKEDIQKAQVSGQGDSLHEHIANLAGSPAIKKGILQTVKVVDELVKVMGRHKPENIVIEMARENQTTQKGQKNSRERMKRIEEGIKELGSQILKEHPVENTQLQNEKLYLYYLQNGRDMYVDQELDINRLSDYDVDHIVPQSFLKDDSIDNKVLTRSDKARGKSDNVPSEEVVKKMKNYWRQLLNAKLITQRKFDNLTKAERGGLSELDKAGFIKRQLVETRQITKHVAQILDSRMNTKYDENDKLIREVKVITLKSKLVSDFRKDFQFYKVREINNYHHAHDAYLNAVVGTALIKKYPKLESEFVYGDYKVYDVRKMIAKSEQEIGKATAKYFFYSNIMNFFKTEITLANGEIRKRPLIETNGETGEIVWDKGRDFATVRKVLSMPQVNIVKKTEVQTGGFSKESILPKRNSDKLIARKKDWDPKKYGGFDSPTVAYSVLVVAKVEKGKSKKLKSVKELLGITIMERSSFEKNPIDFLEAKGYKEVKKDLIIKLPKYSLFELENGRKRMLASAGELQKGNELALPSKYVNFLYLASHYEKLKGSPEDNEQKQLFVEQHKHYLDEIIEQISEFSKRVILADANLDKVLSAYNKHRDKPIREQAENIIHLFTLTNLGAPAAFKYFDTTIDRKRYTSTKEVLDATLIHQSITGLYETRIDLSQLGGDGGAEAAAKEAAAKEAAAKEAAAKALEAEAAAKEAAAKEAAAKEAAAKAGGMDPLQLLQPLEAEIKGTKLKAHWNSGATITCVPQAFLEEEVPIKNIWIKTIHGEKEQPVYYLTFKIQGRKVEAEVISSPYDYILVSPSDIPWLMKKPLQLTTLVPLQEYEERLLKQTMLTGSYKEKLQSLFLKYDALWQHWENQVGHRRIKPHHIATGTVNPRPQKQYPINPKAKASIQTVINDLLKQGVLIQQNSIMNTPVYPVPKPDGKWRMVLDYREVNKTIPLIAAQNQHSAGILSSIFRGKYKTTLDLSNGFWAHSITPESYWLTAFTWLGQQYCWTRLPQGFLNSPALFNADVVDLLKEVPNVQVYVDDIYISHDDPREHLEQLEKVFSLLLNAGYVVSLKKSEIAQHEVEFLGFNITKEGRGLTETFKQKLLNITPPRDLKQLQSILGLLNFARNFIPNFSELVKPLYNIIATAPGKYITWTTDNSQQLQNIISMLNSAENLEERNPEVRLIMKVNTSPSAGYIRFYNEFAKRPIMYLNYVYTKAEVKFTNTEKLLTTIHKGLIKALDLGMGQEILVYSPIVSMTKIQKTPLPERKALPIRWITWMSYLEDPRIQFHYDKTLPELQQVPTVTDDIIAKIKHPSEFSMVFYTDGSAIKHPNVNKSHNAGMGIAQVQFKPEFTVINTWSIPLGDHTAQLAEVAAVEFACKKALKIDGPVLIVTDSFYVAESVNKELPYWQSNGFFNNKKKPLKHVSKWKSIADCIQLKPDIIIIHEKGHQPTASTFHTEGNNLADKLATQGSYVVNAGKRTADGSEFEKRTADGSEFESPKKKAKVE

SEQ ID NO: 592 - protein, 2195 aa, synthetic construct
MPAAKRVKLDGGDKKYSIGLDIGTNSVGWAVITDEYKVPSKKFKVLGNTDRHSIKKNLIGALLFDSGETAEATRLKRTARRRYTRRKNRICYLQEIFSNEMAKVDDSFFHRLEESFLVEEDKKHERHPIFGNIVDEVAYHEKYPTIYHLRKKLVDSTDKADLRLIYLALAHMIKFRGHFLIEGDLNPDNSDVDKLFIQLVQTYNQLFEENPINASGVDAKAILSARLSKSRRLENLIAQLPGEKKNGLFGNLIALSLGLTPNFKSNFDLAEDAKLQLSKDTYDDDLDNLLAQIGDQYADLFLAAKNLSDAILLSDILRVNTEITKAPLSASMIKRYDEHHQDLTLLKALVRQQLPEKYKEIFFDQSKNGYAGYIDGGASQEEFYKFIKPILEKMDGTEELLVKLNREDLLRKQRTFDNGSIPHQIHLGELHAILRRQEDFYPFLKDNREKIEKILTFRIPYYVGPLARGNSRFAWMTRKSEETITPWNFEEVVDKGASAQSFIERMTNFDKNLPNEKVLPKHSLLYEYFTVYNELTKVKYVTEGMRKPAFLSGEQKKAIVDLLFKTNRKVTVKQLKEDYFKKIECFDSVEISGVEDRFNASLGTYHDLLKIIKDKDFLDNEENEDILEDIVLTLTLFEDREMIEERLKTYAHLFDDKVMKQLKRRRYTGWGRLSRKLINGIRDKQSGKTILDFLKSDGFANRNFMQLIHDDSLTFKEDIQKAQVSGQGDSLHEHIANLAGSPAIKKGILQTVKVVDELVKVMGRHKPENIVIEMARENQTTQKGQKNSRERMKRIEEGIKELGSQILKEHPVENTQLQNEKLYLYYLQNGRDMYVDQELDINRLSDYDVDHIVPQSFLKDDSIDNKVLTRSDKARGKSDNVPSEEVVKKMKNYWRQLLNAKLITQRKFDNLTKAERGGLSELDKAGFIKRQLVETRQITKHVAQILDSRMNTKYDENDKLIREVKVITLKSKLVSDFRKDFQFYKVREINNYHHAHDAYLNAVVGTALIKKYPKLESEFVYGDYKVYDVRKMIAKSEQEIGKATAKYFFYSNIMNFFKTEITLANGEIRKRPLIETNGETGEIVWDKGRDFATVRKVLSMPQVNIVKKTEVQTGGFSKESILPKRNSDKLIARKKDWDPKKYGGFDSPTVAYSVLVVAKVEKGKSKKLKSVKELLGITIMERSSFEKNPIDFLEAKGYKEVKKDLIIKLPKYSLFELENGRKRMLASAGELQKGNELALPSKYVNFLYLASHYEKLKGSPEDNEQKQLFVEQHKHYLDEIIEQISEFSKRVILADANLDKVLSAYNKHRDKPIREQAENIIHLFTLTNLGAPAAFKYFDTTIDRKRYTSTKEVLDATLIHQSITGLYETRIDLSQLGGDGGGGGGSGGGGSGGGGSGGGGSGGGGSGGGGSGGMDPLQLLQPLEAEIKGTKLKAHWNSGATITCVPQAFLEEEVPIKNIWIKTIHGEKEQPVYYLTFKIQGRKVEAEVISSPYDYILVSPSDIPWLMKKPLQLTTLVPLQEYEERLLKQTMLTGSYKEKLQSLFLKYDALWQHWENQVGHRRIKPHHIATGTVNPRPQKQYPINPKAKASIQTVINDLLKQGVLIQQNSIMNTPVYPVPKPDGKWRMVLDYREVNKTIPLIAAQNQHSAGILSSIFRGKYKTTLDLSNGFWAHSITPESYWLTAFTWLGQQYCWTRLPQGFLNSPALFNADVVDLLKEVPNVQVYVDDIYISHDDPREHLEQLEKVFSLLLNAGYVVSLKKSEIAQHEVEFLGFNITKEGRGLTETFKQKLLNITPPRDLKQLQSILGLLNFARNFIPNFSELVKPLYNIIATAPGKYITWTTDNSQQLQNIISMLNSAENLEERNPEVRLIMKVNTSPSAGYIRFYNEFAKRPIMYLNYVYTKAEVKFTNTEKLLTTIHKGLIKALDLGMGQEILVYSPIVSMTKIQKTPLPERKALPIRWITWMSYLEDPRIQFHYDKTLPELQQVPTVTDDIIAKIKHPSEFSMVFYTDGSAIKHPNVNKSHNAGMGIAQVQFKPEFTVINTWSIPLGDHTAQLAEVAAVEFACKKALKIDGPVLIVTDSFYVAESVNKELPYWQSNGFFNNKKKPLKHVSKWKSIADCIQLKPDIIIIHEKGHQPTASTFHTEGNNLADKLATQGSYVVNAGKRTADGSEFEKRTADGSEFESPKKKAKVE

SEQ ID NO: 593 - protein, 2190 aa, synthetic construct
MPAAKRVKLDGGDKKYSIGLDIGTNSVGWAVITDEYKVPSKKFKVLGNTDRHSIKKNLIGALLFDSGETAEATRLKRTARRRYTRRKNRICYLQEIFSNEMAKVDDSFFHRLEESFLVEEDKKHERHPIFGNIVDEVAYHEKYPTIYHLRKKLVDSTDKADLRLIYLALAHMIKFRGHFLIEGDLNPDNSDVDKLFIQLVQTYNQLFEENPINASGVDAKAILSARLSKSRRLENLIAQLPGEKKNGLFGNLIALSLGLTPNFKSNFDLAEDAKLQLSKDTYDDDLDNLLAQIGDQYADLFLAAKNLSDAILLSDILRVNTEITKAPLSASMIKRYDEHHQDLTLLKALVRQQLPEKYKEIFFDQSKNGYAGYIDGGASQEEFYKFIKPILEKMDGTEELLVKLNREDLLRKQRTFDNGSIPHQIHLGELHAILRRQEDFYPFLKDNREKIEKILTFRIPYYVGPLARGNSRFAWMTRKSEETITPWNFEEVVDKGASAQSFIERMTNFDKNLPNEKVLPKHSLLYEYFTVYNELTKVKYVTEGMRKPAFLSGEQKKAIVDLLFKTNRKVTVKQLKEDYFKKIECFDSVEISGVEDRFNASLGTYHDLLKIIKDKDFLDNEENEDILEDIVLTLTLFEDREMIEERLKTYAHLFDDKVMKQLKRRRYTGWGRLSRKLINGIRDKQSGKTILDFLKSDGFANRNFMQLIHDDSLTFKEDIQKAQVSGQGDSLHEHIANLAGSPAIKKGILQTVKVVDELVKVMGRHKPENIVIEMARENQTTQKGQKNSRERMKRIEEGIKELGSQILKEHPVENTQLQNEKLYLYYLQNGRDMYVDQELDINRLSDYDVDHIVPQSFLKDDSIDNKVLTRSDKARGKSDNVPSEEVVKKMKNYWRQLLNAKLITQRKFDNLTKAERGGLSELDKAGFIKRQLVETRQITKHVAQILDSRMNTKYDENDKLIREVKVITLKSKLVSDFRKDFQFYKVREINNYHHAHDAYLNAVVGTALIKKYPKLESEFVYGDYKVYDVRKMIAKSEQEIGKATAKYFFYSNIMNFFKTEITLANGEIRKRPLIETNGETGEIVWDKGRDFATVRKVLSMPQVNIVKKTEVQTGGFSKESILPKRNSDKLIARKKDWDPKKYGGFDSPTVAYSVLVVAKVEKGKSKKLKSVKELLGITIMERSSFEKNPIDFLEAKGYKEVKKDLIIKLPKYSLFELENGRKRMLASAGELQKGNELALPSKYVNFLYLASHYEKLKGSPEDNEQKQLFVEQHKHYLDEIIEQISEFSKRVILADANLDKVLSAYNKHRDKPIREQAENIIHLFTLTNLGAPAAFKYFDTTIDRKRYTSTKEVLDATLIHQSITGLYETRIDLSQLGGDGGEAAAKEAAAKEAAAKEAAAKEAAAKGGMDPLQLLQPLEAEIKGTKLKAHWNSGATITCVPQAFLEEEVPIKNIWIKTIHGEKEQPVYYLTFKIQGRKVEAEVISSPYDYILVSPSDIPWLMKKPLQLTTLVPLQEYEERLLKQTMLTGSYKEKLQSLFLKYDALWQHWENQVGHRRIKPHHIATGTVNPRPQKQYPINPKAKASIQTVINDLLKQGVLIQQNSIMNTPVYPVPKPDGKWRMVLDYREVNKTIPLIAAQNQHSAGILSSIFRGKYKTTLDLSNGFWAHSITPESYWLTAFTWLGQQYCWTRLPQGFLNSPALFNADVVDLLKEVPNVQVYVDDIYISHDDPREHLEQLEKVFSLLLNAGYVVSLKKSEIAQHEVEFLGFNITKEGRGLTETFKQKLLNITPPRDLKQLQSILGLLNFARNFIPNFSELVKPLYNIIATAPGKYITWTTDNSQQLQNIISMLNSAENLEERNPEVRLIMKVNTSPSAGYIRFYNEFAKRPIMYLNYVYTKAEVKFTNTEKLLTTIHKGLIKALDLGMGQEILVYSPIVSMTKIQKTPLPERKALPIRWITWMSYLEDPRIQFHYDKTLPELQQVPTVTDDIIAKIKHPSEFSMVFYTDGSAIKHPNVNKSHNAGMGIAQVQFKPEFTVINTWSIPLGDHTAQLAEVAAVEFACKKALKIDGPVLIVTDSFYVAESVNKELPYWQSNGFFNNKKKPLKHVSKWKSIADCIQLKPDIIIIHEKGHQPTASTFHTEGNNLADKLATQGSYVVNAGKRTADGSEFEKRTADGSEFESPKKKAKVE

SEQ ID NO: 594 - protein, 2174 aa, synthetic construct
MPAAKRVKLDGGDKKYSIGLDIGTNSVGWAVITDEYKVPSKKFKVLGNTDRHSIKKNLIGALLFDSGETAEATRLKRTARRRYTRRKNRICYLQEIFSNEMAKVDDSFFHRLEESFLVEEDKKHERHPIFGNIVDEVAYHEKYPTIYHLRKKLVDSTDKADLRLIYLALAHMIKFRGHFLIEGDLNPDNSDVDKLFIQLVQTYNQLFEENPINASGVDAKAILSARLSKSRRLENLIAQLPGEKKNGLFGNLIALSLGLTPNFKSNFDLAEDAKLQLSKDTYDDDLDNLLAQIGDQYADLFLAAKNLSDAILLSDILRVNTEITKAPLSASMIKRYDEHHQDLTLLKALVRQQLPEKYKEIFFDQSKNGYAGYIDGGASQEEFYKFIKPILEKMDGTEELLVKLNREDLLRKQRTFDNGSIPHQIHLGELHAILRRQEDFYPFLKDNREKIEKILTFRIPYYVGPLARGNSRFAWMTRKSEETITPWNFEEVVDKGASAQSFIERMTNFDKNLPNEKVLPKHSLLYEYFTVYNELTKVKYVTEGMRKPAFLSGEQKKAIVDLLFKTNRKVTVKQLKEDYFKKIECFDSVEISGVEDRFNASLGTYHDLLKIIKDKDFLDNEENEDILEDIVLTLTLFEDREMIEERLKTYAHLFDDKVMKQLKRRRYTGWGRLSRKLINGIRDKQSGKTILDFLKSDGFANRNFMQLIHDDSLTFKEDIQKAQVSGQGDSLHEHIANLAGSPAIKKGILQTVKVVDELVKVMGRHKPENIVIEMARENQTTQKGQKNSRERMKRIEEGIKELGSQILKEHPVENTQLQNEKLYLYYLQNGRDMYVDQELDINRLSDYDVDHIVPQSFLKDDSIDNKVLTRSDKARGKSDNVPSEEVVKKMKNYWRQLLNAKLITQRKFDNLTKAERGGLSELDKAGFIKRQLVETRQITKHVAQILDSRMNTKYDENDKLIREVKVITLKSKLVSDFRKDFQFYKVREINNYHHAHDAYLNAVVGTALIKKYPKLESEFVYGDYKVYDVRKMIAKSEQEIGKATAKYFFYSNIMNFFKTEITLANGEIRKRPLIETNGETGEIVWDKGRDFATVRKVLSMPQVNIVKKTEVQTGGFSKESILPKRNSDKLIARKKDWDPKKYGGFDSPTVAYSVLVVAKVEKGKSKKLKSVKELLGITIMERSSFEKNPIDFLEAKGYKEVKKDLIIKLPKYSLFELENGRKRMLASAGELQKGNELALPSKYVNFLYLASHYEKLKGSPEDNEQKQLFVEQHKHYLDEIIEQISEFSKRVILADANLDKVLSAYNKHRDKPIREQAENIIHLFTLTNLGAPAAFKYFDTTIDRKRYTSTKEVLDATLIHQSITGLYETRIDLSQLGGDGGGGGPAPGGSGGMDPLQLLQPLEAEIKGTKLKAHWNSGATITCVPQAFLEEEVPIKNIWIKTIHGEKEQPVYYLTFKIQGRKVEAEVISSPYDYILVSPSDIPWLMKKPLQLTTLVPLQEYEERLLKQTMLTGSYKEKLQSLFLKYDALWQHWENQVGHRRIKPHHIATGTVNPRPQKQYPINPKAKASIQTVINDLLKQGVLIQQNSIMNTPVYPVPKPDGKWRMVLDYREVNKTIPLIAAQNQHSAGILSSIFRGKYKTTLDLSNGFWAHSITPESYWLTAFTWLGQQYCWTRLPQGFLNSPALFNADVVDLLKEVPNVQVYVDDIYISHDDPREHLEQLEKVFSLLLNAGYVVSLKKSEIAQHEVEFLGFNITKEGRGLTETFKQKLLNITPPRDLKQLQSILGLLNFARNFIPNFSELVKPLYNIIATAPGKYITWTTDNSQQLQNIISMLNSAENLEERNPEVRLIMKVNTSPSAGYIRFYNEFAKRPIMYLNYVYTKAEVKFTNTEKLLTTIHKGLIKALDLGMGQEILVYSPIVSMTKIQKTPLPERKALPIRWITWMSYLEDPRIQFHYDKTLPELQQVPTVTDDIIAKIKHPSEFSMVFYTDGSAIKHPNVNKSHNAGMGIAQVQFKPEFTVINTWSIPLGDHTAQLAEVAAVEFACKKALKIDGPVLIVTDSFYVAESVNKELPYWQSNGFFNNKKKPLKHVSKWKSIADCIQLKPDIIIIHEKGHQPTASTFHTEGNNLADKLATQGSYVVNAGKRTADGSEFEKRTADGSEFESPKKKAKVE

SEQ ID NO: 595 - protein, 2176 aa, synthetic construct
MPAAKRVKLDGGDKKYSIGLDIGTNSVGWAVITDEYKVPSKKFKVLGNTDRHSIKKNLIGALLFDSGETAEATRLKRTARRRYTRRKNRICYLQEIFSNEMAKVDDSFFHRLEESFLVEEDKKHERHPIFGNIVDEVAYHEKYPTIYHLRKKLVDSTDKADLRLIYLALAHMIKFRGHFLIEGDLNPDNSDVDKLFIQLVQTYNQLFEENPINASGVDAKAILSARLSKSRRLENLIAQLPGEKKNGLFGNLIALSLGLTPNFKSNFDLAEDAKLQLSKDTYDDDLDNLLAQIGDQYADLFLAAKNLSDAILLSDILRVNTEITKAPLSASMIKRYDEHHQDLTLLKALVRQQLPEKYKEIFFDQSKNGYAGYIDGGASQEEFYKFIKPILEKMDGTEELLVKLNREDLLRKQRTFDNGSIPHQIHLGELHAILRRQEDFYPFLKDNREKIEKILTFRIPYYVGPLARGNSRFAWMTRKSEETITPWNFEEVVDKGASAQSFIERMTNFDKNLPNEKVLPKHSLLYEYFTVYNELTKVKYVTEGMRKPAFLSGEQKKAIVDLLFKTNRKVTVKQLKEDYFKKIECFDSVEISGVEDRFNASLGTYHDLLKIIKDKDFLDNEENEDILEDIVLTLTLFEDREMIEERLKTYAHLFDDKVMKQLKRRRYTGWGRLSRKLINGIRDKQSGKTILDFLKSDGFANRNFMQLIHDDSLTFKEDIQKAQVSGQGDSLHEHIANLAGSPAIKKGILQTVKVVDELVKVMGRHKPENIVIEMARENQTTQKGQKNSRERMKRIEEGIKELGSQILKEHPVENTQLQNEKLYLYYLQNGRDMYVDQELDINRLSDYDVDHIVPQSFLKDDSIDNKVLTRSDKARGKSDNVPSEEVVKKMKNYWRQLLNAKLITQRKFDNLTKAERGGLSELDKAGFIKRQLVETRQITKHVAQILDSRMNTKYDENDKLIREVKVITLKSKLVSDFRKDFQFYKVREINNYHHAHDAYLNAVVGTALIKKYPKLESEFVYGDYKVYDVRKMIAKSEQEIGKATAKYFFYSNIMNFFKTEITLANGEIRKRPLIETNGETGEIVWDKGRDFATVRKVLSMPQVNIVKKTEVQTGGFSKESILPKRNSDKLIARKKDWDPKKYGGFDSPTVAYSVLVVAKVEKGKSKKLKSVKELLGITIMERSSFEKNPIDFLEAKGYKEVKKDLIIKLPKYSLFELENGRKRMLASAGELQKGNELALPSKYVNFLYLASHYEKLKGSPEDNEQKQLFVEQHKHYLDEIIEQISEFSKRVILADANLDKVLSAYNKHRDKPIREQAENIIHLFTLTNLGAPAAFKYFDTTIDRKRYTSTKEVLDATLIHQSITGLYETRIDLSQLGGDGGGGSEAAAKPAPGGMDPLQLLQPLEAEIKGTKLKAHWNSGATITCVPQAFLEEEVPIKNIWIKTIHGEKEQPVYYLTFKIQGRKVEAEVISSPYDYILVSPSDIPWLMKKPLQLTTLVPLQEYEERLLKQTMLTGSYKEKLQSLFLKYDALWQHWENQVGHRRIKPHHIATGTVNPRPQKQYPINPKAKASIQTVINDLLKQGVLIQQNSIMNTPVYPVPKPDGKWRMVLDYREVNKTIPLIAAQNQHSAGILSSIFRGKYKTTLDLSNGFWAHSITPESYWLTAFTWLGQQYCWTRLPQGFLNSPALFNADVVDLLKEVPNVQVYVDDIYISHDDPREHLEQLEKVFSLLLNAGYVVSLKKSEIAQHEVEFLGFNITKEGRGLTETFKQKLLNITPPRDLKQLQSILGLLNFARNFIPNFSELVKPLYNIIATAPGKYITWTTDNSQQLQNIISMLNSAENLEERNPEVRLIMKVNTSPSAGYIRFYNEFAKRPIMYLNYVYTKAEVKFTNTEKLLTTIHKGLIKALDLGMGQEILVYSPIVSMTKIQKTPLPERKALPIRWITWMSYLEDPRIQFHYDKTLPELQQVPTVTDDIIAKIKHPSEFSMVFYTDGSAIKHPNVNKSHNAGMGIAQVQFKPEFTVINTWSIPLGDHTAQLAEVAAVEFACKKALKIDGPVLIVTDSFYVAESVNKELPYWQSNGFFNNKKKPLKHVSKWKSIADCIQLKPDIIIIHEKGHQPTASTFHTEGNNLADKLATQGSYVVNAGKRTADGSEFEKRTADGSEFESPKKKAKVE

SEQ ID NO: 596 - protein, 2180 aa, synthetic construct
MPAAKRVKLDGGDKKYSIGLDIGTNSVGWAVITDEYKVPSKKFKVLGNTDRHSIKKNLIGALLFDSGETAEATRLKRTARRRYTRRKNRICYLQEIFSNEMAKVDDSFFHRLEESFLVEEDKKHERHPIFGNIVDEVAYHEKYPTIYHLRKKLVDSTDKADLRLIYLALAHMIKFRGHFLIEGDLNPDNSDVDKLFIQLVQTYNQLFEENPINASGVDAKAILSARLSKSRRLENLIAQLPGEKKNGLFGNLIALSLGLTPNFKSNFDLAEDAKLQLSKDTYDDDLDNLLAQIGDQYADLFLAAKNLSDAILLSDILRVNTEITKAPLSASMIKRYDEHHQDLTLLKALVRQQLPEKYKEIFFDQSKNGYAGYIDGGASQEEFYKFIKPILEKMDGTEELLVKLNREDLLRKQRTFDNGSIPHQIHLGELHAILRRQEDFYPFLKDNREKIEKILTFRIPYYVGPLARGNSRFAWMTRKSEETITPWNFEEVVDKGASAQSFIERMTNFDKNLPNEKVLPKHSLLYEYFTVYNELTKVKYVTEGMRKPAFLSGEQKKAIVDLLFKTNRKVTVKQLKEDYFKKIECFDSVEISGVEDRFNASLGTYHDLLKIIKDKDFLDNEENEDILEDIVLTLTLFEDREMIEERLKTYAHLFDDKVMKQLKRRRYTGWGRLSRKLINGIRDKQSGKTILDFLKSDGFANRNFMQLIHDDSLTFKEDIQKAQVSGQGDSLHEHIANLAGSPAIKKGILQTVKVVDELVKVMGRHKPENIVIEMARENQTTQKGQKNSRERMKRIEEGIKELGSQILKEHPVENTQLQNEKLYLYYLQNGRDMYVDQELDINRLSDYDVDHIVPQSFLKDDSIDNKVLTRSDKARGKSDNVPSEEVVKKMKNYWRQLLNAKLITQRKFDNLTKAERGGLSELDKAGFIKRQLVETRQITKHVAQILDSRMNTKYDENDKLIREVKVITLKSKLVSDFRKDFQFYKVREINNYHHAHDAYLNAVVGTALIKKYPKLESEFVYGDYKVYDVRKMIAKSEQEIGKATAKYFFYSNIMNFFKTEITLANGEIRKRPLIETNGETGEIVWDKGRDFATVRKVLSMPQVNIVKKTEVQTGGFSKESILPKRNSDKLIARKKDWDPKKYGGFDSPTVAYSVLVVAKVEKGKSKKLKSVKELLGITIMERSSFEKNPIDFLEAKGYKEVKKDLIIKLPKYSLFELENGRKRMLASAGELQKGNELALPSKYVNFLYLASHYEKLKGSPEDNEQKQLFVEQHKHYLDEIIEQISEFSKRVILADANLDKVLSAYNKHRDKPIREQAENIIHLFTLTNLGAPAAFKYFDTTIDRKRYTSTKEVLDATLIHQSITGLYETRIDLSQLGGDGGEAAAKGGGGSEAAAKGGMDPLQLLQPLEAEIKGTKLKAHWNSGATITCVPQAFLEEEVPIKNIWIKTIHGEKEQPVYYLTFKIQGRKVEAEVISSPYDYILVSPSDIPWLMKKPLQLTTLVPLQEYEERLLKQTMLTGSYKEKLQSLFLKYDALWQHWENQVGHRRIKPHHIATGTVNPRPQKQYPINPKAKASIQTVINDLLKQGVLIQQNSIMNTPVYPVPKPDGKWRMVLDYREVNKTIPLIAAQNQHSAGILSSIFRGKYKTTLDLSNGFWAHSITPESYWLTAFTWLGQQYCWTRLPQGFLNSPALFNADVVDLLKEVPNVQVYVDDIYISHDDPREHLEQLEKVFSLLLNAGYVVSLKKSEIAQHEVEFLGFNITKEGRGLTETFKQKLLNITPPRDLKQLQSILGLLNFARNFIPNFSELVKPLYNIIATAPGKYITWTTDNSQQLQNIISMLNSAENLEERNPEVRLIMKVNTSPSAGYIRFYNEFAKRPIMYLNYVYTKAEVKFTNTEKLLTTIHKGLIKALDLGMGQEILVYSPIVSMTKIQKTPLPERKALPIRWITWMSYLEDPRIQFHYDKTLPELQQVPTVTDDIIAKIKHPSEFSMVFYTDGSAIKHPNVNKSHNAGMGIAQVQFKPEFTVINTWSIPLGDHTAQLAEVAAVEFACKKALKIDGPVLIVTDSFYVAESVNKELPYWQSNGFFNNKKKPLKHVSKWKSIADCIQLKPDIIIIHEKGHQPTASTFHTEGNNLADKLATQGSYVVNAGKRTADGSEFEKRTADGSEFESPKKKAKVE

SEQ ID NO: 597 - protein, 2175 aa, synthetic construct
MPAAKRVKLDGGDKKYSIGLDIGTNSVGWAVITDEYKVPSKKFKVLGNTDRHSIKKNLIGALLFDSGETAEATRLKRTARRRYTRRKNRICYLQEIFSNEMAKVDDSFFHRLEESFLVEEDKKHERHPIFGNIVDEVAYHEKYPTIYHLRKKLVDSTDKADLRLIYLALAHMIKFRGHFLIEGDLNPDNSDVDKLFIQLVQTYNQLFEENPINASGVDAKAILSARLSKSRRLENLIAQLPGEKKNGLFGNLIALSLGLTPNFKSNFDLAEDAKLQLSKDTYDDDLDNLLAQIGDQYADLFLAAKNLSDAILLSDILRVNTEITKAPLSASMIKRYDEHHQDLTLLKALVRQQLPEKYKEIFFDQSKNGYAGYIDGGASQEEFYKFIKPILEKMDGTEELLVKLNREDLLRKQRTFDNGSIPHQIHLGELHAILRRQEDFYPFLKDNREKIEKILTFRIPYYVGPLARGNSRFAWMTRKSEETITPWNFEEVVDKGASAQSFIERMTNFDKNLPNEKVLPKHSLLYEYFTVYNELTKVKYVTEGMRKPAFLSGEQKKAIVDLLFKTNRKVTVKQLKEDYFKKIECFDSVEISGVEDRFNASLGTYHDLLKIIKDKDFLDNEENEDILEDIVLTLTLFEDREMIEERLKTYAHLFDDKVMKQLKRRRYTGWGRLSRKLINGIRDKQSGKTILDFLKSDGFANRNFMQLIHDDSLTFKEDIQKAQVSGQGDSLHEHIANLAGSPAIKKGILQTVKVVDELVKVMGRHKPENIVIEMARENQTTQKGQKNSRERMKRIEEGIKELGSQILKEHPVENTQLQNEKLYLYYLQNGRDMYVDQELDINRLSDYDVDHIVPQSFLKDDSIDNKVLTRSDKARGKSDNVPSEEVVKKMKNYWRQLLNAKLITQRKFDNLTKAERGGLSELDKAGFIKRQLVETRQITKHVAQILDSRMNTKYDENDKLIREVKVITLKSKLVSDFRKDFQFYKVREINNYHHAHDAYLNAVVGTALIKKYPKLESEFVYGDYKVYDVRKMIAKSEQEIGKATAKYFFYSNIMNFFKTEITLANGEIRKRPLIETNGETGEIVWDKGRDFATVRKVLSMPQVNIVKKTEVQTGGFSKESILPKRNSDKLIARKKDWDPKKYGGFDSPTVAYSVLVVAKVEKGKSKKLKSVKELLGITIMERSSFEKNPIDFLEAKGYKEVKKDLIIKLPKYSLFELENGRKRMLASAGELQKGNELALPSKYVNFLYLASHYEKLKGSPEDNEQKQLFVEQHKHYLDEIIEQISEFSKRVILADANLDKVLSAYNKHRDKPIREQAENIIHLFTLTNLGAPAAFKYFDTTIDRKRYTSTKEVLDATLIHQSITGLYETRIDLSQLGGDGGGGGGSGGGGSGGMDPLQLLQPLEAEIKGTKLKAHWNSGATITCVPQAFLEEEVPIKNIWIKTIHGEKEQPVYYLTFKIQGRKVEAEVISSPYDYILVSPSDIPWLMKKPLQLTTLVPLQEYEERLLKQTMLTGSYKEKLQSLFLKYDALWQHWENQVGHRRIKPHHIATGTVNPRPQKQYPINPKAKASIQTVINDLLKQGVLIQQNSIMNTPVYPVPKPDGKWRMVLDYREVNKTIPLIAAQNQHSAGILSSIFRGKYKTTLDLSNGFWAHSITPESYWLTAFTWLGQQYCWTRLPQGFLNSPALFNADVVDLLKEVPNVQVYVDDIYISHDDPREHLEQLEKVFSLLLNAGYVVSLKKSEIAQHEVEFLGFNITKEGRGLTETFKQKLLNITPPRDLKQLQSILGLLNFARNFIPNFSELVKPLYNIIATAPGKYITWTTDNSQQLQNIISMLNSAENLEERNPEVRLIMKVNTSPSAGYIRFYNEFAKRPIMYLNYVYTKAEVKFTNTEKLLTTIHKGLIKALDLGMGQEILVYSPIVSMTKIQKTPLPERKALPIRWITWMSYLEDPRIQFHYDKTLPELQQVPTVTDDIIAKIKHPSEFSMVFYTDGSAIKHPNVNKSHNAGMGIAQVQFKPEFTVINTWSIPLGDHTAQLAEVAAVEFACKKALKIDGPVLIVTDSFYVAESVNKELPYWQSNGFFNNKKKPLKHVSKWKSIADCIQLKPDIIIIHEKGHQPTASTFHTEGNNLADKLATQGSYVVNAGKRTADGSEFEKRTADGSEFESPKKKAKVE

SEQ ID NO: 598 - protein, 2175 aa, synthetic construct
MPAAKRVKLDGGDKKYSIGLDIGTNSVGWAVITDEYKVPSKKFKVLGNTDRHSIKKNLIGALLFDSGETAEATRLKRTARRRYTRRKNRICYLQEIFSNEMAKVDDSFFHRLEESFLVEEDKKHERHPIFGNIVDEVAYHEKYPTIYHLRKKLVDSTDKADLRLIYLALAHMIKFRGHFLIEGDLNPDNSDVDKLFIQLVQTYNQLFEENPINASGVDAKAILSARLSKSRRLENLIAQLPGEKKNGLFGNLIALSLGLTPNFKSNFDLAEDAKLQLSKDTYDDDLDNLLAQIGDQYADLFLAAKNLSDAILLSDILRVNTEITKAPLSASMIKRYDEHHQDLTLLKALVRQQLPEKYKEIFFDQSKNGYAGYIDGGASQEEFYKFIKPILEKMDGTEELLVKLNREDLLRKQRTFDNGSIPHQIHLGELHAILRRQEDFYPFLKDNREKIEKILTFRIPYYVGPLARGNSRFAWMTRKSEETITPWNFEEVVDKGASAQSFIERMTNFDKNLPNEKVLPKHSLLYEYFTVYNELTKVKYVTEGMRKPAFLSGEQKKAIVDLLFKTNRKVTVKQLKEDYFKKIECFDSVEISGVEDRFNASLGTYHDLLKIIKDKDFLDNEENEDILEDIVLTLTLFEDREMIEERLKTYAHLFDDKVMKQLKRRRYTGWGRLSRKLINGIRDKQSGKTILDFLKSDGFANRNFMQLIHDDSLTFKEDIQKAQVSGQGDSLHEHIANLAGSPAIKKGILQTVKVVDELVKVMGRHKPENIVIEMARENQTTQKGQKNSRERMKRIEEGIKELGSQILKEHPVENTQLQNEKLYLYYLQNGRDMYVDQELDINRLSDYDVDHIVPQSFLKDDSIDNKVLTRSDKARGKSDNVPSEEVVKKMKNYWRQLLNAKLITQRKFDNLTKAERGGLSELDKAGFIKRQLVETRQITKHVAQILDSRMNTKYDENDKLIREVKVITLKSKLVSDFRKDFQFYKVREINNYHHAHDAYLNAVVGTALIKKYPKLESEFVYGDYKVYDVRKMIAKSEQEIGKATAKYFFYSNIMNFFKTEITLANGEIRKRPLIETNGETGEIVWDKGRDFATVRKVLSMPQVNIVKKTEVQTGGFSKESILPKRNSDKLIARKKDWDPKKYGGFDSPTVAYSVLVVAKVEKGKSKKLKSVKELLGITIMERSSFEKNPIDFLEAKGYKEVKKDLIIKLPKYSLFELENGRKRMLASAGELQKGNELALPSKYVNFLYLASHYEKLKGSPEDNEQKQLFVEQHKHYLDEIIEQISEFSKRVILADANLDKVLSAYNKHRDKPIREQAENIIHLFTLTNLGAPAAFKYFDTTIDRKRYTSTKEVLDATLIHQSITGLYETRIDLSQLGGDGGEAAAKEAAAKGGMDPLQLLQPLEAEIKGTKLKAHWNSGATITCVPQAFLEEEVPIKNIWIKTIHGEKEQPVYYLTFKIQGRKVEAEVISSPYDYILVSPSDIPWLMKKPLQLTTLVPLQEYEERLLKQTMLTGSYKEKLQSLFLKYDALWQHWENQVGHRRIKPHHIATGTVNPRPQKQYPINPKAKASIQTVINDLLKQGVLIQQNSIMNTPVYPVPKPDGKWRMVLDYREVNKTIPLIAAQNQHSAGILSSIFRGKYKTTLDLSNGFWAHSITPESYWLTAFTWLGQQYCWTRLPQGFLNSPALFNADVVDLLKEVPNVQVYVDDIYISHDDPREHLEQLEKVFSLLLNAGYVVSLKKSEIAQHEVEFLGFNITKEGRGLTETFKQKLLNITPPRDLKQLQSILGLLNFARNFIPNFSELVKPLYNIIATAPGKYITWTTDNSQQLQNIISMLNSAENLEERNPEVRLIMKVNTSPSAGYIRFYNEFAKRPIMYLNYVYTKAEVKFTNTEKLLTTIHKGLIKALDLGMGQEILVYSPIVSMTKIQKTPLPERKALPIRWITWMSYLEDPRIQFHYDKTLPELQQVPTVTDDIIAKIKHPSEFSMVFYTDGSAIKHPNVNKSHNAGMGIAQVQFKPEFTVINTWSIPLGDHTAQLAEVAAVEFACKKALKIDGPVLIVTDSFYVAESVNKELPYWQSNGFFNNKKKPLKHVSKWKSIADCIQLKPDIIIIHEKGHQPTASTFHTEGNNLADKLATQGSYVVNAGKRTADGSEFEKRTADGSEFESPKKKAKVE

SEQ ID NO: 599 - protein, 2176 aa, synthetic construct
MPAAKRVKLDGGDKKYSIGLDIGTNSVGWAVITDEYKVPSKKFKVLGNTDRHSIKKNLIGALLFDSGETAEATRLKRTARRRYTRRKNRICYLQEIFSNEMAKVDDSFFHRLEESFLVEEDKKHERHPIFGNIVDEVAYHEKYPTIYHLRKKLVDSTDKADLRLIYLALAHMIKFRGHFLIEGDLNPDNSDVDKLFIQLVQTYNQLFEENPINASGVDAKAILSARLSKSRRLENLIAQLPGEKKNGLFGNLIALSLGLTPNFKSNFDLAEDAKLQLSKDTYDDDLDNLLAQIGDQYADLFLAAKNLSDAILLSDILRVNTEITKAPLSASMIKRYDEHHQDLTLLKALVRQQLPEKYKEIFFDQSKNGYAGYIDGGASQEEFYKFIKPILEKMDGTEELLVKLNREDLLRKQRTFDNGSIPHQIHLGELHAILRRQEDFYPFLKDNREKIEKILTFRIPYYVGPLARGNSRFAWMTRKSEETITPWNFEEVVDKGASAQSFIERMTNFDKNLPNEKVLPKHSLLYEYFTVYNELTKVKYVTEGMRKPAFLSGEQKKAIVDLLFKTNRKVTVKQLKEDYFKKIECFDSVEISGVEDRFNASLGTYHDLLKIIKDKDFLDNEENEDILEDIVLTLTLFEDREMIEERLKTYAHLFDDKVMKQLKRRRYTGWGRLSRKLINGIRDKQSGKTILDFLKSDGFANRNFMQLIHDDSLTFKEDIQKAQVSGQGDSLHEHIANLAGSPAIKKGILQTVKVVDELVKVMGRHKPENIVIEMARENQTTQKGQKNSRERMKRIEEGIKELGSQILKEHPVENTQLQNEKLYLYYLQNGRDMYVDQELDINRLSDYDVDHIVPQSFLKDDSIDNKVLTRSDKARGKSDNVPSEEVVKKMKNYWRQLLNAKLITQRKFDNLTKAERGGLSELDKAGFIKRQLVETRQITKHVAQILDSRMNTKYDENDKLIREVKVITLKSKLVSDFRKDFQFYKVREINNYHHAHDAYLNAVVGTALIKKYPKLESEFVYGDYKVYDVRKMIAKSEQEIGKATAKYFFYSNIMNFFKTEITLANGEIRKRPLIETNGETGEIVWDKGRDFATVRKVLSMPQVNIVKKTEVQTGGFSKESILPKRNSDKLIARKKDWDPKKYGGFDSPTVAYSVLVVAKVEKGKSKKLKSVKELLGITIMERSSFEKNPIDFLEAKGYKEVKKDLIIKLPKYSLFELENGRKRMLASAGELQKGNELALPSKYVNFLYLASHYEKLKGSPEDNEQKQLFVEQHKHYLDEIIEQISEFSKRVILADANLDKVLSAYNKHRDKPIREQAENIIHLFTLTNLGAPAAFKYFDTTIDRKRYTSTKEVLDATLIHQSITGLYETRIDLSQLGGDGGGSSEAAAKGGGGGMDPLQLLQPLEAEIKGTKLKAHWNSGATITCVPQAFLEEEVPIKNIWIKTIHGEKEQPVYYLTFKIQGRKVEAEVISSPYDYILVSPSDIPWLMKKPLQLTTLVPLQEYEERLLKQTMLTGSYKEKLQSLFLKYDALWQHWENQVGHRRIKPHHIATGTVNPRPQKQYPINPKAKASIQTVINDLLKQGVLIQQNSIMNTPVYPVPKPDGKWRMVLDYREVNKTIPLIAAQNQHSAGILSSIFRGKYKTTLDLSNGFWAHSITPESYWLTAFTWLGQQYCWTRLPQGFLNSPALFNADVVDLLKEVPNVQVYVDDIYISHDDPREHLEQLEKVFSLLLNAGYVVSLKKSEIAQHEVEFLGFNITKEGRGLTETFKQKLLNITPPRDLKQLQSILGLLNFARNFIPNFSELVKPLYNIIATAPGKYITWTTDNSQQLQNIISMLNSAENLEERNPEVRLIMKVNTSPSAGYIRFYNEFAKRPIMYLNYVYTKAEVKFTNTEKLLTTIHKGLIKALDLGMGQEILVYSPIVSMTKIQKTPLPERKALPIRWITWMSYLEDPRIQFHYDKTLPELQQVPTVTDDIIAKIKHPSEFSMVFYTDGSAIKHPNVNKSHNAGMGIAQVQFKPEFTVINTWSIPLGDHTAQLAEVAAVEFACKKALKIDGPVLIVTDSFYVAESVNKELPYWQSNGFFNNKKKPLKHVSKWKSIADCIQLKPDIIIIHEKGHQPTASTFHTEGNNLADKLATQGSYVVNAGKRTADGSEFEKRTADGSEFESPKKKAKVE

SEQ ID NO: 600 - protein, 2174 aa, synthetic construct
MPAAKRVKLDGGDKKYSIGLDIGTNSVGWAVITDEYKVPSKKFKVLGNTDRHSIKKNLIGALLFDSGETAEATRLKRTARRRYTRRKNRICYLQEIFSNEMAKVDDSFFHRLEESFLVEEDKKHERHPIFGNIVDEVAYHEKYPTIYHLRKKLVDSTDKADLRLIYLALAHMIKFRGHFLIEGDLNPDNSDVDKLFIQLVQTYNQLFEENPINASGVDAKAILSARLSKSRRLENLIAQLPGEKKNGLFGNLIALSLGLTPNFKSNFDLAEDAKLQLSKDTYDDDLDNLLAQIGDQYADLFLAAKNLSDAILLSDILRVNTEITKAPLSASMIKRYDEHHQDLTLLKALVRQQLPEKYKEIFFDQSKNGYAGYIDGGASQEEFYKFIKPILEKMDGTEELLVKLNREDLLRKQRTFDNGSIPHQIHLGELHAILRRQEDFYPFLKDNREKIEKILTFRIPYYVGPLARGNSRFAWMTRKSEETITPWNFEEVVDKGASAQSFIERMTNFDKNLPNEKVLPKHSLLYEYFTVYNELTKVKYVTEGMRKPAFLSGEQKKAIVDLLFKTNRKVTVKQLKEDYFKKIECFDSVEISGVEDRFNASLGTYHDLLKIIKDKDFLDNEENEDILEDIVLTLTLFEDREMIEERLKTYAHLFDDKVMKQLKRRRYTGWGRLSRKLINGIRDKQSGKTILDFLKSDGFANRNFMQLIHDDSLTFKEDIQKAQVSGQGDSLHEHIANLAGSPAIKKGILQTVKVVDELVKVMGRHKPENIVIEMARENQTTQKGQKNSRERMKRIEEGIKELGSQILKEHPVENTQLQNEKLYLYYLQNGRDMYVDQELDINRLSDYDVDHIVPQSFLKDDSIDNKVLTRSDKARGKSDNVPSEEVVKKMKNYWRQLLNAKLITQRKFDNLTKAERGGLSELDKAGFIKRQLVETRQITKHVAQILDSRMNTKYDENDKLIREVKVITLKSKLVSDFRKDFQFYKVREINNYHHAHDAYLNAVVGTALIKKYPKLESEFVYGDYKVYDVRKMIAKSEQEIGKATAKYFFYSNIMNFFKTEITLANGEIRKRPLIETNGETGEIVWDKGRDFATVRKVLSMPQVNIVKKTEVQTGGFSKESILPKRNSDKLIARKKDWDPKKYGGFDSPTVAYSVLVVAKVEKGKSKKLKSVKELLGITIMERSSFEKNPIDFLEAKGYKEVKKDLIIKLPKYSLFELENGRKRMLASAGELQKGNELALPSKYVNFLYLASHYEKLKGSPEDNEQKQLFVEQHKHYLDEIIEQISEFSKRVILADANLDKVLSAYNKHRDKPIREQAENIIHLFTLTNLGAPAAFKYFDTTIDRKRYTSTKEVLDATLIHQSITGLYETRIDLSQLGGDGGPAPAPAPAPGGMDPLQLLQPLEAEIKGTKLKAHWNSGATITCVPQAFLEEEVPIKNIWIKTIHGEKEQPVYYLTFKIQGRKVEAEVISSPYDYILVSPSDIPWLMKKPLQLTTLVPLQEYEERLLKQTMLTGSYKEKLQSLFLKYDALWQHWENQVGHRRIKPHHIATGTVNPRPQKQYPINPKAKASIQTVINDLLKQGVLIQQNSIMNTPVYPVPKPDGKWRMVLDYREVNKTIPLIAAQNQHSAGILSSIFRGKYKTTLDLSNGFWAHSITPESYWLTAFTWLGQQYCWTRLPQGFLNSPALFNADVVDLLKEVPNVQVYVDDIYISHDDPREHLEQLEKVFSLLLNAGYVVSLKKSEIAQHEVEFLGFNITKEGRGLTETFKQKLLNITPPRDLKQLQSILGLLNFARNFIPNFSELVKPLYNIIATAPGKYITWTTDNSQQLQNIISMLNSAENLEERNPEVRLIMKVNTSPSAGYIRFYNEFAKRPIMYLNYVYTKAEVKFTNTEKLLTTIHKGLIKALDLGMGQEILVYSPIVSMTKIQKTPLPERKALPIRWITWMSYLEDPRIQFHYDKTLPELQQVPTVTDDIIAKIKHPSEFSMVFYTDGSAIKHPNVNKSHNAGMGIAQVQFKPEFTVINTWSIPLGDHTAQLAEVAAVEFACKKALKIDGPVLIVTDSFYVAESVNKELPYWQSNGFFNNKKKPLKHVSKWKSIADCIQLKPDIIIIHEKGHQPTASTFHTEGNNLADKLATQGSYVVNAGKRTADGSEFEKRTADGSEFESPKKKAKVE

SEQ ID NO: 601 - protein, 2180 aa, synthetic construct
MPAAKRVKLDGGDKKYSIGLDIGTNSVGWAVITDEYKVPSKKFKVLGNTDRHSIKKNLIGALLFDSGETAEATRLKRTARRRYTRRKNRICYLQEIFSNEMAKVDDSFFHRLEESFLVEEDKKHERHPIFGNIVDEVAYHEKYPTIYHLRKKLVDSTDKADLRLIYLALAHMIKFRGHFLIEGDLNPDNSDVDKLFIQLVQTYNQLFEENPINASGVDAKAILSARLSKSRRLENLIAQLPGEKKNGLFGNLIALSLGLTPNFKSNFDLAEDAKLQLSKDTYDDDLDNLLAQIGDQYADLFLAAKNLSDAILLSDILRVNTEITKAPLSASMIKRYDEHHQDLTLLKALVRQQLPEKYKEIFFDQSKNGYAGYIDGGASQEEFYKFIKPILEKMDGTEELLVKLNREDLLRKQRTFDNGSIPHQIHLGELHAILRRQEDFYPFLKDNREKIEKILTFRIPYYVGPLARGNSRFAWMTRKSEETITPWNFEEVVDKGASAQSFIERMTNFDKNLPNEKVLPKHSLLYEYFTVYNELTKVKYVTEGMRKPAFLSGEQKKAIVDLLFKTNRKVTVKQLKEDYFKKIECFDSVEISGVEDRFNASLGTYHDLLKIIKDKDFLDNEENEDILEDIVLTLTLFEDREMIEERLKTYAHLFDDKVMKQLKRRRYTGWGRLSRKLINGIRDKQSGKTILDFLKSDGFANRNFMQLIHDDSLTFKEDIQKAQVSGQGDSLHEHIANLAGSPAIKKGILQTVKVVDELVKVMGRHKPENIVIEMARENQTTQKGQKNSRERMKRIEEGIKELGSQILKEHPVENTQLQNEKLYLYYLQNGRDMYVDQELDINRLSDYDVDHIVPQSFLKDDSIDNKVLTRSDKARGKSDNVPSEEVVKKMKNYWRQLLNAKLITQRKFDNLTKAERGGLSELDKAGFIKRQLVETRQITKHVAQILDSRMNTKYDENDKLIREVKVITLKSKLVSDFRKDFQFYKVREINNYHHAHDAYLNAVVGTALIKKYPKLESEFVYGDYKVYDVRKMIAKSEQEIGKATAKYFFYSNIMNFFKTEITLANGEIRKRPLIETNGETGEIVWDKGRDFATVRKVLSMPQVNIVKKTEVQTGGFSKESILPKRNSDKLIARKKDWDPKKYGGFDSPTVAYSVLVVAKVEKGKSKKLKSVKELLGITIMERSSFEKNPIDFLEAKGYKEVKKDLIIKLPKYSLFELENGRKRMLASAGELQKGNELALPSKYVNFLYLASHYEKLKGSPEDNEQKQLFVEQHKHYLDEIIEQISEFSKRVILADANLDKVLSAYNKHRDKPIREQAENIIHLFTLTNLGAPAAFKYFDTTIDRKRYTSTKEVLDATLIHQSITGLYETRIDLSQLGGDGGGGGGSGGGGSGGGGSGGMDPLQLLQPLEAEIKGTKLKAHWNSGATITCVPQAFLEEEVPIKNIWIKTIHGEKEQPVYYLTFKIQGRKVEAEVISSPYDYILVSPSDIPWLMKKPLQLTTLVPLQEYEERLLKQTMLTGSYKEKLQSLFLKYDALWQHWENQVGHRRIKPHHIATGTVNPRPQKQYPINPKAKASIQTVINDLLKQGVLIQQNSIMNTPVYPVPKPDGKWRMVLDYREVNKTIPLIAAQNQHSAGILSSIFRGKYKTTLDLSNGFWAHSITPESYWLTAFTWLGQQYCWTRLPQGFLNSPALFNADVVDLLKEVPNVQVYVDDIYISHDDPREHLEQLEKVFSLLLNAGYVVSLKKSEIAQHEVEFLGFNITKEGRGLTETFKQKLLNITPPRDLKQLQSILGLLNFARNFIPNFSELVKPLYNIIATAPGKYITWTTDNSQQLQNIISMLNSAENLEERNPEVRLIMKVNTSPSAGYIRFYNEFAKRPIMYLNYVYTKAEVKFTNTEKLLTTIHKGLIKALDLGMGQEILVYSPIVSMTKIQKTPLPERKALPIRWITWMSYLEDPRIQFHYDKTLPELQQVPTVTDDIIAKIKHPSEFSMVFYTDGSAIKHPNVNKSHNAGMGIAQVQFKPEFTVINTWSIPLGDHTAQLAEVAAVEFACKKALKIDGPVLIVTDSFYVAESVNKELPYWQSNGFFNNKKKPLKHVSKWKSIADCIQLKPDIIIIHEKGHQPTASTFHTEGNNLADKLATQGSYVVNAGKRTADGSEFEKRTADGSEFESPKKKAKVE

SEQ ID NO: 602 - protein, 2176 aa, synthetic construct
MPAAKRVKLDGGDKKYSIGLDIGTNSVGWAVITDEYKVPSKKFKVLGNTDRHSIKKNLIGALLFDSGETAEATRLKRTARRRYTRRKNRICYLQEIFSNEMAKVDDSFFHRLEESFLVEEDKKHERHPIFGNIVDEVAYHEKYPTIYHLRKKLVDSTDKADLRLIYLALAHMIKFRGHFLIEGDLNPDNSDVDKLFIQLVQTYNQLFEENPINASGVDAKAILSARLSKSRRLENLIAQLPGEKKNGLFGNLIALSLGLTPNFKSNFDLAEDAKLQLSKDTYDDDLDNLLAQIGDQYADLFLAAKNLSDAILLSDILRVNTEITKAPLSASMIKRYDEHHQDLTLLKALVRQQLPEKYKEIFFDQSKNGYAGYIDGGASQEEFYKFIKPILEKMDGTEELLVKLNREDLLRKQRTFDNGSIPHQIHLGELHAILRRQEDFYPFLKDNREKIEKILTFRIPYYVGPLARGNSRFAWMTRKSEETITPWNFEEVVDKGASAQSFIERMTNFDKNLPNEKVLPKHSLLYEYFTVYNELTKVKYVTEGMRKPAFLSGEQKKAIVDLLFKTNRKVTVKQLKEDYFKKIECFDSVEISGVEDRFNASLGTYHDLLKIIKDKDFLDNEENEDILEDIVLTLTLFEDREMIEERLKTYAHLFDDKVMKQLKRRRYTGWGRLSRKLINGIRDKQSGKTILDFLKSDGFANRNFMQLIHDDSLTFKEDIQKAQVSGQGDSLHEHIANLAGSPAIKKGILQTVKVVDELVKVMGRHKPENIVIEMARENQTTQKGQKNSRERMKRIEEGIKELGSQILKEHPVENTQLQNEKLYLYYLQNGRDMYVDQELDINRLSDYDVDHIVPQSFLKDDSIDNKVLTRSDKARGKSDNVPSEEVVKKMKNYWRQLLNAKLITQRKFDNLTKAERGGLSELDKAGFIKRQLVETRQITKHVAQILDSRMNTKYDENDKLIREVKVITLKSKLVSDFRKDFQFYKVREINNYHHAHDAYLNAVVGTALIKKYPKLESEFVYGDYKVYDVRKMIAKSEQEIGKATAKYFFYSNIMNFFKTEITLANGEIRKRPLIETNGETGEIVWDKGRDFATVRKVLSMPQVNIVKKTEVQTGGFSKESILPKRNSDKLIARKKDWDPKKYGGFDSPTVAYSVLVVAKVEKGKSKKLKSVKELLGITIMERSSFEKNPIDFLEAKGYKEVKKDLIIKLPKYSLFELENGRKRMLASAGELQKGNELALPSKYVNFLYLASHYEKLKGSPEDNEQKQLFVEQHKHYLDEIIEQISEFSKRVILADANLDKVLSAYNKHRDKPIREQAENIIHLFTLTNLGAPAAFKYFDTTIDRKRYTSTKEVLDATLIHQSITGLYETRIDLSQLGGDGGPAPEAAAKGSSGGMDPLQLLQPLEAEIKGTKLKAHWNSGATITCVPQAFLEEEVPIKNIWIKTIHGEKEQPVYYLTFKIQGRKVEAEVISSPYDYILVSPSDIPWLMKKPLQLTTLVPLQEYEERLLKQTMLTGSYKEKLQSLFLKYDALWQHWENQVGHRRIKPHHIATGTVNPRPQKQYPINPKAKASIQTVINDLLKQGVLIQQNSIMNTPVYPVPKPDGKWRMVLDYREVNKTIPLIAAQNQHSAGILSSIFRGKYKTTLDLSNGFWAHSITPESYWLTAFTWLGQQYCWTRLPQGFLNSPALFNADVVDLLKEVPNVQVYVDDIYISHDDPREHLEQLEKVFSLLLNAGYVVSLKKSEIAQHEVEFLGFNITKEGRGLTETFKQKLLNITPPRDLKQLQSILGLLNFARNFIPNFSELVKPLYNIIATAPGKYITWTTDNSQQLQNIISMLNSAENLEERNPEVRLIMKVNTSPSAGYIRFYNEFAKRPIMYLNYVYTKAEVKFTNTEKLLTTIHKGLIKALDLGMGQEILVYSPIVSMTKIQKTPLPERKALPIRWITWMSYLEDPRIQFHYDKTLPELQQVPTVTDDIIAKIKHPSEFSMVFYTDGSAIKHPNVNKSHNAGMGIAQVQFKPEFTVINTWSIPLGDHTAQLAEVAAVEFACKKALKIDGPVLIVTDSFYVAESVNKELPYWQSNGFFNNKKKPLKHVSKWKSIADCIQLKPDIIIIHEKGHQPTASTFHTEGNNLADKLATQGSYVVNAGKRTADGSEFEKRTADGSEFESPKKKAKVE

SEQ ID NO: 603 - protein, 2173 aa, synthetic construct
MPAAKRVKLDGGDKKYSIGLDIGTNSVGWAVITDEYKVPSKKFKVLGNTDRHSIKKNLIGALLFDSGETAEATRLKRTARRRYTRRKNRICYLQEIFSNEMAKVDDSFFHRLEESFLVEEDKKHERHPIFGNIVDEVAYHEKYPTIYHLRKKLVDSTDKADLRLIYLALAHMIKFRGHFLIEGDLNPDNSDVDKLFIQLVQTYNQLFEENPINASGVDAKAILSARLSKSRRLENLIAQLPGEKKNGLFGNLIALSLGLTPNFKSNFDLAEDAKLQLSKDTYDDDLDNLLAQIGDQYADLFLAAKNLSDAILLSDILRVNTEITKAPLSASMIKRYDEHHQDLTLLKALVRQQLPEKYKEIFFDQSKNGYAGYIDGGASQEEFYKFIKPILEKMDGTEELLVKLNREDLLRKQRTFDNGSIPHQIHLGELHAILRRQEDFYPFLKDNREKIEKILTFRIPYYVGPLARGNSRFAWMTRKSEETITPWNFEEVVDKGASAQSFIERMTNFDKNLPNEKVLPKHSLLYEYFTVYNELTKVKYVTEGMRKPAFLSGEQKKAIVDLLFKTNRKVTVKQLKEDYFKKIECFDSVEISGVEDRFNASLGTYHDLLKIIKDKDFLDNEENEDILEDIVLTLTLFEDREMIEERLKTYAHLFDDKVMKQLKRRRYTGWGRLSRKLINGIRDKQSGKTILDFLKSDGFANRNFMQLIHDDSLTFKEDIQKAQVSGQGDSLHEHIANLAGSPAIKKGILQTVKVVDELVKVMGRHKPENIVIEMARENQTTQKGQKNSRERMKRIEEGIKELGSQILKEHPVENTQLQNEKLYLYYLQNGRDMYVDQELDINRLSDYDVDHIVPQSFLKDDSIDNKVLTRSDKARGKSDNVPSEEVVKKMKNYWRQLLNAKLITQRKFDNLTKAERGGLSELDKAGFIKRQLVETRQITKHVAQILDSRMNTKYDENDKLIREVKVITLKSKLVSDFRKDFQFYKVREINNYHHAHDAYLNAVVGTALIKKYPKLESEFVYGDYKVYDVRKMIAKSEQEIGKATAKYFFYSNIMNFFKTEITLANGEIRKRPLIETNGETGEIVWDKGRDFATVRKVLSMPQVNIVKKTEVQTGGFSKESILPKRNSDKLIARKKDWDPKKYGGFDSPTVAYSVLVVAKVEKGKSKKLKSVKELLGITIMERSSFEKNPIDFLEAKGYKEVKKDLIIKLPKYSLFELENGRKRMLASAGELQKGNELALPSKYVNFLYLASHYEKLKGSPEDNEQKQLFVEQHKHYLDEIIEQISEFSKRVILADANLDKVLSAYNKHRDKPIREQAENIIHLFTLTNLGAPAAFKYFDTTIDRKRYTSTKEVLDATLIHQSITGLYETRIDLSQLGGDGGGSSEAAAKGGMDPLQLLQPLEAEIKGTKLKAHWNSGATITCVPQAFLEEEVPIKNIWIKTIHGEKEQPVYYLTFKIQGRKVEAEVISSPYDYILVSPSDIPWLMKKPLQLTTLVPLQEYEERLLKQTMLTGSYKEKLQSLFLKYDALWQHWENQVGHRRIKPHHIATGTVNPRPQKQYPINPKAKASIQTVINDLLKQGVLIQQNSIMNTPVYPVPKPDGKWRMVLDYREVNKTIPLIAAQNQHSAGILSSIFRGKYKTTLDLSNGFWAHSITPESYWLTAFTWLGQQYCWTRLPQGFLNSPALFNADVVDLLKEVPNVQVYVDDIYISHDDPREHLEQLEKVFSLLLNAGYVVSLKKSEIAQHEVEFLGFNITKEGRGLTETFKQKLLNITPPRDLKQLQSILGLLNFARNFIPNFSELVKPLYNIIATAPGKYITWTTDNSQQLQNIISMLNSAENLEERNPEVRLIMKVNTSPSAGYIRFYNEFAKRPIMYLNYVYTKAEVKFTNTEKLLTTIHKGLIKALDLGMGQEILVYSPIVSMTKIQKTPLPERKALPIRWITWMSYLEDPRIQFHYDKTLPELQQVPTVTDDIIAKIKHPSEFSMVFYTDGSAIKHPNVNKSHNAGMGIAQVQFKPEFTVINTWSIPLGDHTAQLAEVAAVEFACKKALKIDGPVLIVTDSFYVAESVNKELPYWQSNGFFNNKKKPLKHVSKWKSIADCIQLKPDIIIIHEKGHQPTASTFHTEGNNLADKLATQGSYVVNAGKRTADGSEFEKRTADGSEFESPKKKAKVE

SEQ ID NO: 604 - protein, 2183 aa, synthetic construct
MPAAKRVKLDGGDKKYSIGLDIGTNSVGWAVITDEYKVPSKKFKVLGNTDRHSIKKNLIGALLFDSGETAEATRLKRTARRRYTRRKNRICYLQEIFSNEMAKVDDSFFHRLEESFLVEEDKKHERHPIFGNIVDEVAYHEKYPTIYHLRKKLVDSTDKADLRLIYLALAHMIKFRGHFLIEGDLNPDNSDVDKLFIQLVQTYNQLFEENPINASGVDAKAILSARLSKSRRLENLIAQLPGEKKNGLFGNLIALSLGLTPNFKSNFDLAEDAKLQLSKDTYDDDLDNLLAQIGDQYADLFLAAKNLSDAILLSDILRVNTEITKAPLSASMIKRYDEHHQDLTLLKALVRQQLPEKYKEIFFDQSKNGYAGYIDGGASQEEFYKFIKPILEKMDGTEELLVKLNREDLLRKQRTFDNGSIPHQIHLGELHAILRRQEDFYPFLKDNREKIEKILTFRIPYYVGPLARGNSRFAWMTRKSEETITPWNFEEVVDKGASAQSFIERMTNFDKNLPNEKVLPKHSLLYEYFTVYNELTKVKYVTEGMRKPAFLSGEQKKAIVDLLFKTNRKVTVKQLKEDYFKKIECFDSVEISGVEDRFNASLGTYHDLLKIIKDKDFLDNEENEDILEDIVLTLTLFEDREMIEERLKTYAHLFDDKVMKQLKRRRYTGWGRLSRKLINGIRDKQSGKTILDFLKSDGFANRNFMQLIHDDSLTFKEDIQKAQVSGQGDSLHEHIANLAGSPAIKKGILQTVKVVDELVKVMGRHKPENIVIEMARENQTTQKGQKNSRERMKRIEEGIKELGSQILKEHPVENTQLQNEKLYLYYLQNGRDMYVDQELDINRLSDYDVDHIVPQSFLKDDSIDNKVLTRSDKARGKSDNVPSEEVVKKMKNYWRQLLNAKLITQRKFDNLTKAERGGLSELDKAGFIKRQLVETRQITKHVAQILDSRMNTKYDENDKLIREVKVITLKSKLVSDFRKDFQFYKVREINNYHHAHDAYLNAVVGTALIKKYPKLESEFVYGDYKVYDVRKMIAKSEQEIGKATAKYFFYSNIMNFFKTEITLANGEIRKRPLIETNGETGEIVWDKGRDFATVRKVLSMPQVNIVKKTEVQTGGFSKESILPKRNSDKLIARKKDWDPKKYGGFDSPTVAYSVLVVAKVEKGKSKKLKSVKELLGITIMERSSFEKNPIDFLEAKGYKEVKKDLIIKLPKYSLFELENGRKRMLASAGELQKGNELALPSKYVNFLYLASHYEKLKGSPEDNEQKQLFVEQHKHYLDEIIEQISEFSKRVILADANLDKVLSAYNKHRDKPIREQAENIIHLFTLTNLGAPAAFKYFDTTIDRKRYTSTKEVLDATLIHQSITGLYETRIDLSQLGGDGGGGSGGSGGSGGSGGSGGSGGMDPLQLLQPLEAEIKGTKLKAHWNSGATITCVPQAFLEEEVPIKNIWIKTIHGEKEQPVYYLTFKIQGRKVEAEVISSPYDYILVSPSDIPWLMKKPLQLTTLVPLQEYEERLLKQTMLTGSYKEKLQSLFLKYDALWQHWENQVGHRRIKPHHIATGTVNPRPQKQYPINPKAKASIQTVINDLLKQGVLIQQNSIMNTPVYPVPKPDGKWRMVLDYREVNKTIPLIAAQNQHSAGILSSIFRGKYKTTLDLSNGFWAHSITPESYWLTAFTWLGQQYCWTRLPQGFLNSPALFNADVVDLLKEVPNVQVYVDDIYISHDDPREHLEQLEKVFSLLLNAGYVVSLKKSEIAQHEVEFLGFNITKEGRGLTETFKQKLLNITPPRDLKQLQSILGLLNFARNFIPNFSELVKPLYNIIATAPGKYITWTTDNSQQLQNIISMLNSAENLEERNPEVRLIMKVNTSPSAGYIRFYNEFAKRPIMYLNYVYTKAEVKFTNTEKLLTTIHKGLIKALDLGMGQEILVYSPIVSMTKIQKTPLPERKALPIRWITWMSYLEDPRIQFHYDKTLPELQQVPTVTDDIIAKIKHPSEFSMVFYTDGSAIKHPNVNKSHNAGMGIAQVQFKPEFTVINTWSIPLGDHTAQLAEVAAVEFACKKALKIDGPVLIVTDSFYVAESVNKELPYWQSNGFFNNKKKPLKHVSKWKSIADCIQLKPDIIIIHEKGHQPTASTFHTEGNNLADKLATQGSYVVNAGKRTADGSEFEKRTADGSEFESPKKKAKVE

SEQ ID NO: 605 - protein, 2171 aa, synthetic construct
MPAAKRVKLDGGDKKYSIGLDIGTNSVGWAVITDEYKVPSKKFKVLGNTDRHSIKKNLIGALLFDSGETAEATRLKRTARRRYTRRKNRICYLQEIFSNEMAKVDDSFFHRLEESFLVEEDKKHERHPIFGNIVDEVAYHEKYPTIYHLRKKLVDSTDKADLRLIYLALAHMIKFRGHFLIEGDLNPDNSDVDKLFIQLVQTYNQLFEENPINASGVDAKAILSARLSKSRRLENLIAQLPGEKKNGLFGNLIALSLGLTPNFKSNFDLAEDAKLQLSKDTYDDDLDNLLAQIGDQYADLFLAAKNLSDAILLSDILRVNTEITKAPLSASMIKRYDEHHQDLTLLKALVRQQLPEKYKEIFFDQSKNGYAGYIDGGASQEEFYKFIKPILEKMDGTEELLVKLNREDLLRKQRTFDNGSIPHQIHLGELHAILRRQEDFYPFLKDNREKIEKILTFRIPYYVGPLARGNSRFAWMTRKSEETITPWNFEEVVDKGASAQSFIERMTNFDKNLPNEKVLPKHSLLYEYFTVYNELTKVKYVTEGMRKPAFLSGEQKKAIVDLLFKTNRKVTVKQLKEDYFKKIECFDSVEISGVEDRFNASLGTYHDLLKIIKDKDFLDNEENEDILEDIVLTLTLFEDREMIEERLKTYAHLFDDKVMKQLKRRRYTGWGRLSRKLINGIRDKQSGKTILDFLKSDGFANRNFMQLIHDDSLTFKEDIQKAQVSGQGDSLHEHIANLAGSPAIKKGILQTVKVVDELVKVMGRHKPENIVIEMARENQTTQKGQKNSRERMKRIEEGIKELGSQILKEHPVENTQLQNEKLYLYYLQNGRDMYVDQELDINRLSDYDVDHIVPQSFLKDDSIDNKVLTRSDKARGKSDNVPSEEVVKKMKNYWRQLLNAKLITQRKFDNLTKAERGGLSELDKAGFIKRQLVETRQITKHVAQILDSRMNTKYDENDKLIREVKVITLKSKLVSDFRKDFQFYKVREINNYHHAHDAYLNAVVGTALIKKYPKLESEFVYGDYKVYDVRKMIAKSEQEIGKATAKYFFYSNIMNFFKTEITLANGEIRKRPLIETNGETGEIVWDKGRDFATVRKVLSMPQVNIVKKTEVQTGGFSKESILPKRNSDKLIARKKDWDPKKYGGFDSPTVAYSVLVVAKVEKGKSKKLKSVKELLGITIMERSSFEKNPIDFLEAKGYKEVKKDLIIKLPKYSLFELENGRKRMLASAGELQKGNELALPSKYVNFLYLASHYEKLKGSPEDNEQKQLFVEQHKHYLDEIIEQISEFSKRVILADANLDKVLSAYNKHRDKPIREQAENIIHLFTLTNLGAPAAFKYFDTTIDRKRYTSTKEVLDATLIHQSITGLYETRIDLSQLGGDGGGGGGSSGGMDPLQLLQPLEAEIKGTKLKAHWNSGATITCVPQAFLEEEVPIKNIWIKTIHGEKEQPVYYLTFKIQGRKVEAEVISSPYDYILVSPSDIPWLMKKPLQLTTLVPLQEYEERLLKQTMLTGSYKEKLQSLFLKYDALWQHWENQVGHRRIKPHHIATGTVNPRPQKQYPINPKAKASIQTVINDLLKQGVLIQQNSIMNTPVYPVPKPDGKWRMVLDYREVNKTIPLIAAQNQHSAGILSSIFRGKYKTTLDLSNGFWAHSITPESYWLTAFTWLGQQYCWTRLPQGFLNSPALFNADVVDLLKEVPNVQVYVDDIYISHDDPREHLEQLEKVFSLLLNAGYVVSLKKSEIAQHEVEFLGFNITKEGRGLTETFKQKLLNITPPRDLKQLQSILGLLNFARNFIPNFSELVKPLYNIIATAPGKYITWTTDNSQQLQNIISMLNSAENLEERNPEVRLIMKVNTSPSAGYIRFYNEFAKRPIMYLNYVYTKAEVKFTNTEKLLTTIHKGLIKALDLGMGQEILVYSPIVSMTKIQKTPLPERKALPIRWITWMSYLEDPRIQFHYDKTLPELQQVPTVTDDIIAKIKHPSEFSMVFYTDGSAIKHPNVNKSHNAGMGIAQVQFKPEFTVINTWSIPLGDHTAQLAEVAAVEFACKKALKIDGPVLIVTDSFYVAESVNKELPYWQSNGFFNNKKKPLKHVSKWKSIADCIQLKPDIIIIHEKGHQPTASTFHTEGNNLADKLATQGSYVVNAGKRTADGSEFEKRTADGSEFESPKKKAKVE

SEQ ID NO: 606 - protein, 2174 aa, synthetic construct
MPAAKRVKLDGGDKKYSIGLDIGTNSVGWAVITDEYKVPSKKFKVLGNTDRHSIKKNLIGALLFDSGETAEATRLKRTARRRYTRRKNRICYLQEIFSNEMAKVDDSFFHRLEESFLVEEDKKHERHPIFGNIVDEVAYHEKYPTIYHLRKKLVDSTDKADLRLIYLALAHMIKFRGHFLIEGDLNPDNSDVDKLFIQLVQTYNQLFEENPINASGVDAKAILSARLSKSRRLENLIAQLPGEKKNGLFGNLIALSLGLTPNFKSNFDLAEDAKLQLSKDTYDDDLDNLLAQIGDQYADLFLAAKNLSDAILLSDILRVNTEITKAPLSASMIKRYDEHHQDLTLLKALVRQQLPEKYKEIFFDQSKNGYAGYIDGGASQEEFYKFIKPILEKMDGTEELLVKLNREDLLRKQRTFDNGSIPHQIHLGELHAILRRQEDFYPFLKDNREKIEKILTFRIPYYVGPLARGNSRFAWMTRKSEETITPWNFEEVVDKGASAQSFIERMTNFDKNLPNEKVLPKHSLLYEYFTVYNELTKVKYVTEGMRKPAFLSGEQKKAIVDLLFKTNRKVTVKQLKEDYFKKIECFDSVEISGVEDRFNASLGTYHDLLKIIKDKDFLDNEENEDILEDIVLTLTLFEDREMIEERLKTYAHLFDDKVMKQLKRRRYTGWGRLSRKLINGIRDKQSGKTILDFLKSDGFANRNFMQLIHDDSLTFKEDIQKAQVSGQGDSLHEHIANLAGSPAIKKGILQTVKVVDELVKVMGRHKPENIVIEMARENQTTQKGQKNSRERMKRIEEGIKELGSQILKEHPVENTQLQNEKLYLYYLQNGRDMYVDQELDINRLSDYDVDHIVPQSFLKDDSIDNKVLTRSDKARGKSDNVPSEEVVKKMKNYWRQLLNAKLITQRKFDNLTKAERGGLSELDKAGFIKRQLVETRQITKHVAQILDSRMNTKYDENDKLIREVKVITLKSKLVSDFRKDFQFYKVREINNYHHAHDAYLNAVVGTALIKKYPKLESEFVYGDYKVYDVRKMIAKSEQEIGKATAKYFFYSNIMNFFKTEITLANGEIRKRPLIETNGETGEIVWDKGRDFATVRKVLSMPQVNIVKKTEVQTGGFSKESILPKRNSDKLIARKKDWDPKKYGGFDSPTVAYSVLVVAKVEKGKSKKLKSVKELLGITIMERSSFEKNPIDFLEAKGYKEVKKDLIIKLPKYSLFELENGRKRMLASAGELQKGNELALPSKYVNFLYLASHYEKLKGSPEDNEQKQLFVEQHKHYLDEIIEQISEFSKRVILADANLDKVLSAYNKHRDKPIREQAENIIHLFTLTNLGAPAAFKYFDTTIDRKRYTSTKEVLDATLIHQSITGLYETRIDLSQLGGDGGGGSGGSGGSGGMDPLQLLQPLEAEIKGTKLKAHWNSGATITCVPQAFLEEEVPIKNIWIKTIHGEKEQPVYYLTFKIQGRKVEAEVISSPYDYILVSPSDIPWLMKKPLQLTTLVPLQEYEERLLKQTMLTGSYKEKLQSLFLKYDALWQHWENQVGHRRIKPHHIATGTVNPRPQKQYPINPKAKASIQTVINDLLKQGVLIQQNSIMNTPVYPVPKPDGKWRMVLDYREVNKTIPLIAAQNQHSAGILSSIFRGKYKTTLDLSNGFWAHSITPESYWLTAFTWLGQQYCWTRLPQGFLNSPALFNADVVDLLKEVPNVQVYVDDIYISHDDPREHLEQLEKVFSLLLNAGYVVSLKKSEIAQHEVEFLGFNITKEGRGLTETFKQKLLNITPPRDLKQLQSILGLLNFARNFIPNFSELVKPLYNIIATAPGKYITWTTDNSQQLQNIISMLNSAENLEERNPEVRLIMKVNTSPSAGYIRFYNEFAKRPIMYLNYVYTKAEVKFTNTEKLLTTIHKGLIKALDLGMGQEILVYSPIVSMTKIQKTPLPERKALPIRWITWMSYLEDPRIQFHYDKTLPELQQVPTVTDDIIAKIKHPSEFSMVFYTDGSAIKHPNVNKSHNAGMGIAQVQFKPEFTVINTWSIPLGDHTAQLAEVAAVEFACKKALKIDGPVLIVTDSFYVAESVNKELPYWQSNGFFNNKKKPLKHVSKWKSIADCIQLKPDIIIIHEKGHQPTASTFHTEGNNLADKLATQGSYVVNAGKRTADGSEFEKRTADGSEFESPKKKAKVE

SEQ ID NO: 607 - protein, 2173 aa, synthetic construct
MPAAKRVKLDGGDKKYSIGLDIGTNSVGWAVITDEYKVPSKKFKVLGNTDRHSIKKNLIGALLFDSGETAEATRLKRTARRRYTRRKNRICYLQEIFSNEMAKVDDSFFHRLEESFLVEEDKKHERHPIFGNIVDEVAYHEKYPTIYHLRKKLVDSTDKADLRLIYLALAHMIKFRGHFLIEGDLNPDNSDVDKLFIQLVQTYNQLFEENPINASGVDAKAILSARLSKSRRLENLIAQLPGEKKNGLFGNLIALSLGLTPNFKSNFDLAEDAKLQLSKDTYDDDLDNLLAQIGDQYADLFLAAKNLSDAILLSDILRVNTEITKAPLSASMIKRYDEHHQDLTLLKALVRQQLPEKYKEIFFDQSKNGYAGYIDGGASQEEFYKFIKPILEKMDGTEELLVKLNREDLLRKQRTFDNGSIPHQIHLGELHAILRRQEDFYPFLKDNREKIEKILTFRIPYYVGPLARGNSRFAWMTRKSEETITPWNFEEVVDKGASAQSFIERMTNFDKNLPNEKVLPKHSLLYEYFTVYNELTKVKYVTEGMRKPAFLSGEQKKAIVDLLFKTNRKVTVKQLKEDYFKKIECFDSVEISGVEDRFNASLGTYHDLLKIIKDKDFLDNEENEDILEDIVLTLTLFEDREMIEERLKTYAHLFDDKVMKQLKRRRYTGWGRLSRKLINGIRDKQSGKTILDFLKSDGFANRNFMQLIHDDSLTFKEDIQKAQVSGQGDSLHEHIANLAGSPAIKKGILQTVKVVDELVKVMGRHKPENIVIEMARENQTTQKGQKNSRERMKRIEEGIKELGSQILKEHPVENTQLQNEKLYLYYLQNGRDMYVDQELDINRLSDYDVDHIVPQSFLKDDSIDNKVLTRSDKARGKSDNVPSEEVVKKMKNYWRQLLNAKLITQRKFDNLTKAERGGLSELDKAGFIKRQLVETRQITKHVAQILDSRMNTKYDENDKLIREVKVITLKSKLVSDFRKDFQFYKVREINNYHHAHDAYLNAVVGTALIKKYPKLESEFVYGDYKVYDVRKMIAKSEQEIGKATAKYFFYSNIMNFFKTEITLANGEIRKRPLIETNGETGEIVWDKGRDFATVRKVLSMPQVNIVKKTEVQTGGFSKESILPKRNSDKLIARKKDWDPKKYGGFDSPTVAYSVLVVAKVEKGKSKKLKSVKELLGITIMERSSFEKNPIDFLEAKGYKEVKKDLIIKLPKYSLFELENGRKRMLASAGELQKGNELALPSKYVNFLYLASHYEKLKGSPEDNEQKQLFVEQHKHYLDEIIEQISEFSKRVILADANLDKVLSAYNKHRDKPIREQAENIIHLFTLTNLGAPAAFKYFDTTIDRKRYTSTKEVLDATLIHQSITGLYETRIDLSQLGGDGGGGSEAAAKGGMDPLQLLQPLEAEIKGTKLKAHWNSGATITCVPQAFLEEEVPIKNIWIKTIHGEKEQPVYYLTFKIQGRKVEAEVISSPYDYILVSPSDIPWLMKKPLQLTTLVPLQEYEERLLKQTMLTGSYKEKLQSLFLKYDALWQHWENQVGHRRIKPHHIATGTVNPRPQKQYPINPKAKASIQTVINDLLKQGVLIQQNSIMNTPVYPVPKPDGKWRMVLDYREVNKTIPLIAAQNQHSAGILSSIFRGKYKTTLDLSNGFWAHSITPESYWLTAFTWLGQQYCWTRLPQGFLNSPALFNADVVDLLKEVPNVQVYVDDIYISHDDPREHLEQLEKVFSLLLNAGYVVSLKKSEIAQHEVEFLGFNITKEGRGLTETFKQKLLNITPPRDLKQLQSILGLLNFARNFIPNFSELVKPLYNIIATAPGKYITWTTDNSQQLQNIISMLNSAENLEERNPEVRLIMKVNTSPSAGYIRFYNEFAKRPIMYLNYVYTKAEVKFTNTEKLLTTIHKGLIKALDLGMGQEILVYSPIVSMTKIQKTPLPERKALPIRWITWMSYLEDPRIQFHYDKTLPELQQVPTVTDDIIAKIKHPSEFSMVFYTDGSAIKHPNVNKSHNAGMGIAQVQFKPEFTVINTWSIPLGDHTAQLAEVAAVEFACKKALKIDGPVLIVTDSFYVAESVNKELPYWQSNGFFNNKKKPLKHVSKWKSIADCIQLKPDIIIIHEKGHQPTASTFHTEGNNLADKLATQGSYVVNAGKRTADGSEFEKRTADGSEFESPKKKAKVE

SEQ ID NO: 608 - protein, 2170 aa, synthetic construct
MPAAKRVKLDGGDKKYSIGLDIGTNSVGWAVITDEYKVPSKKFKVLGNTDRHSIKKNLIGALLFDSGETAEATRLKRTARRRYTRRKNRICYLQEIFSNEMAKVDDSFFHRLEESFLVEEDKKHERHPIFGNIVDEVAYHEKYPTIYHLRKKLVDSTDKADLRLIYLALAHMIKFRGHFLIEGDLNPDNSDVDKLFIQLVQTYNQLFEENPINASGVDAKAILSARLSKSRRLENLIAQLPGEKKNGLFGNLIALSLGLTPNFKSNFDLAEDAKLQLSKDTYDDDLDNLLAQIGDQYADLFLAAKNLSDAILLSDILRVNTEITKAPLSASMIKRYDEHHQDLTLLKALVRQQLPEKYKEIFFDQSKNGYAGYIDGGASQEEFYKFIKPILEKMDGTEELLVKLNREDLLRKQRTFDNGSIPHQIHLGELHAILRRQEDFYPFLKDNREKIEKILTFRIPYYVGPLARGNSRFAWMTRKSEETITPWNFEEVVDKGASAQSFIERMTNFDKNLPNEKVLPKHSLLYEYFTVYNELTKVKYVTEGMRKPAFLSGEQKKAIVDLLFKTNRKVTVKQLKEDYFKKIECFDSVEISGVEDRFNASLGTYHDLLKIIKDKDFLDNEENEDILEDIVLTLTLFEDREMIEERLKTYAHLFDDKVMKQLKRRRYTGWGRLSRKLINGIRDKQSGKTILDFLKSDGFANRNFMQLIHDDSLTFKEDIQKAQVSGQGDSLHEHIANLAGSPAIKKGILQTVKVVDELVKVMGRHKPENIVIEMARENQTTQKGQKNSRERMKRIEEGIKELGSQILKEHPVENTQLQNEKLYLYYLQNGRDMYVDQELDINRLSDYDVDHIVPQSFLKDDSIDNKVLTRSDKARGKSDNVPSEEVVKKMKNYWRQLLNAKLITQRKFDNLTKAERGGLSELDKAGFIKRQLVETRQITKHVAQILDSRMNTKYDENDKLIREVKVITLKSKLVSDFRKDFQFYKVREINNYHHAHDAYLNAVVGTALIKKYPKLESEFVYGDYKVYDVRKMIAKSEQEIGKATAKYFFYSNIMNFFKTEITLANGEIRKRPLIETNGETGEIVWDKGRDFATVRKVLSMPQVNIVKKTEVQTGGFSKESILPKRNSDKLIARKKDWDPKKYGGFDSPTVAYSVLVVAKVEKGKSKKLKSVKELLGITIMERSSFEKNPIDFLEAKGYKEVKKDLIIKLPKYSLFELENGRKRMLASAGELQKGNELALPSKYVNFLYLASHYEKLKGSPEDNEQKQLFVEQHKHYLDEIIEQISEFSKRVILADANLDKVLSAYNKHRDKPIREQAENIIHLFTLTNLGAPAAFKYFDTTIDRKRYTSTKEVLDATLIHQSITGLYETRIDLSQLGGDGGEAAAKGGMDPLQLLQPLEAEIKGTKLKAHWNSGATITCVPQAFLEEEVPIKNIWIKTIHGEKEQPVYYLTFKIQGRKVEAEVISSPYDYILVSPSDIPWLMKKPLQLTTLVPLQEYEERLLKQTMLTGSYKEKLQSLFLKYDALWQHWENQVGHRRIKPHHIATGTVNPRPQKQYPINPKAKASIQTVINDLLKQGVLIQQNSIMNTPVYPVPKPDGKWRMVLDYREVNKTIPLIAAQNQHSAGILSSIFRGKYKTTLDLSNGFWAHSITPESYWLTAFTWLGQQYCWTRLPQGFLNSPALFNADVVDLLKEVPNVQVYVDDIYISHDDPREHLEQLEKVFSLLLNAGYVVSLKKSEIAQHEVEFLGFNITKEGRGLTETFKQKLLNITPPRDLKQLQSILGLLNFARNFIPNFSELVKPLYNIIATAPGKYITWTTDNSQQLQNIISMLNSAENLEERNPEVRLIMKVNTSPSAGYIRFYNEFAKRPIMYLNYVYTKAEVKFTNTEKLLTTIHKGLIKALDLGMGQEILVYSPIVSMTKIQKTPLPERKALPIRWITWMSYLEDPRIQFHYDKTLPELQQVPTVTDDIIAKIKHPSEFSMVFYTDGSAIKHPNVNKSHNAGMGIAQVQFKPEFTVINTWSIPLGDHTAQLAEVAAVEFACKKALKIDGPVLIVTDSFYVAESVNKELPYWQSNGFFNNKKKPLKHVSKWKSIADCIQLKPDIIIIHEKGHQPTASTFHTEGNNLADKLATQGSYVVNAGKRTADGSEFEKRTADGSEFESPKKKAKVE

SEQ ID NO: 609 - protein, 2174 aa, synthetic construct
MPAAKRVKLDGGDKKYSIGLDIGTNSVGWAVITDEYKVPSKKFKVLGNTDRHSIKKNLIGALLFDSGETAEATRLKRTARRRYTRRKNRICYLQEIFSNEMAKVDDSFFHRLEESFLVEEDKKHERHPIFGNIVDEVAYHEKYPTIYHLRKKLVDSTDKADLRLIYLALAHMIKFRGHFLIEGDLNPDNSDVDKLFIQLVQTYNQLFEENPINASGVDAKAILSARLSKSRRLENLIAQLPGEKKNGLFGNLIALSLGLTPNFKSNFDLAEDAKLQLSKDTYDDDLDNLLAQIGDQYADLFLAAKNLSDAILLSDILRVNTEITKAPLSASMIKRYDEHHQDLTLLKALVRQQLPEKYKEIFFDQSKNGYAGYIDGGASQEEFYKFIKPILEKMDGTEELLVKLNREDLLRKQRTFDNGSIPHQIHLGELHAILRRQEDFYPFLKDNREKIEKILTFRIPYYVGPLARGNSRFAWMTRKSEETITPWNFEEVVDKGASAQSFIERMTNFDKNLPNEKVLPKHSLLYEYFTVYNELTKVKYVTEGMRKPAFLSGEQKKAIVDLLFKTNRKVTVKQLKEDYFKKIECFDSVEISGVEDRFNASLGTYHDLLKIIKDKDFLDNEENEDILEDIVLTLTLFEDREMIEERLKTYAHLFDDKVMKQLKRRRYTGWGRLSRKLINGIRDKQSGKTILDFLKSDGFANRNFMQLIHDDSLTFKEDIQKAQVSGQGDSLHEHIANLAGSPAIKKGILQTVKVVDELVKVMGRHKPENIVIEMARENQTTQKGQKNSRERMKRIEEGIKELGSQILKEHPVENTQLQNEKLYLYYLQNGRDMYVDQELDINRLSDYDVDHIVPQSFLKDDSIDNKVLTRSDKARGKSDNVPSEEVVKKMKNYWRQLLNAKLITQRKFDNLTKAERGGLSELDKAGFIKRQLVETRQITKHVAQILDSRMNTKYDENDKLIREVKVITLKSKLVSDFRKDFQFYKVREINNYHHAHDAYLNAVVGTALIKKYPKLESEFVYGDYKVYDVRKMIAKSEQEIGKATAKYFFYSNIMNFFKTEITLANGEIRKRPLIETNGETGEIVWDKGRDFATVRKVLSMPQVNIVKKTEVQTGGFSKESILPKRNSDKLIARKKDWDPKKYGGFDSPTVAYSVLVVAKVEKGKSKKLKSVKELLGITIMERSSFEKNPIDFLEAKGYKEVKKDLIIKLPKYSLFELENGRKRMLASAGELQKGNELALPSKYVNFLYLASHYEKLKGSPEDNEQKQLFVEQHKHYLDEIIEQISEFSKRVILADANLDKVLSAYNKHRDKPIREQAENIIHLFTLTNLGAPAAFKYFDTTIDRKRYTSTKEVLDATLIHQSITGLYETRIDLSQLGGDGGGGSPAPGSSGGMDPLQLLQPLEAEIKGTKLKAHWNSGATITCVPQAFLEEEVPIKNIWIKTIHGEKEQPVYYLTFKIQGRKVEAEVISSPYDYILVSPSDIPWLMKKPLQLTTLVPLQEYEERLLKQTMLTGSYKEKLQSLFLKYDALWQHWENQVGHRRIKPHHIATGTVNPRPQKQYPINPKAKASIQTVINDLLKQGVLIQQNSIMNTPVYPVPKPDGKWRMVLDYREVNKTIPLIAAQNQHSAGILSSIFRGKYKTTLDLSNGFWAHSITPESYWLTAFTWLGQQYCWTRLPQGFLNSPALFNADVVDLLKEVPNVQVYVDDIYISHDDPREHLEQLEKVFSLLLNAGYVVSLKKSEIAQHEVEFLGFNITKEGRGLTETFKQKLLNITPPRDLKQLQSILGLLNFARNFIPNFSELVKPLYNIIATAPGKYITWTTDNSQQLQNIISMLNSAENLEERNPEVRLIMKVNTSPSAGYIRFYNEFAKRPIMYLNYVYTKAEVKFTNTEKLLTTIHKGLIKALDLGMGQEILVYSPIVSMTKIQKTPLPERKALPIRWITWMSYLEDPRIQFHYDKTLPELQQVPTVTDDIIAKIKHPSEFSMVFYTDGSAIKHPNVNKSHNAGMGIAQVQFKPEFTVINTWSIPLGDHTAQLAEVAAVEFACKKALKIDGPVLIVTDSFYVAESVNKELPYWQSNGFFNNKKKPLKHVSKWKSIADCIQLKPDIIIIHEKGHQPTASTFHTEGNNLADKLATQGSYVVNAGKRTADGSEFEKRTADGSEFESPKKKAKVE

SEQ ID NO: 610 - protein, 2174 aa, synthetic construct
MPAAKRVKLDGGDKKYSIGLDIGTNSVGWAVITDEYKVPSKKFKVLGNTDRHSIKKNLIGALLFDSGETAEATRLKRTARRRYTRRKNRICYLQEIFSNEMAKVDDSFFHRLEESFLVEEDKKHERHPIFGNIVDEVAYHEKYPTIYHLRKKLVDSTDKADLRLIYLALAHMIKFRGHFLIEGDLNPDNSDVDKLFIQLVQTYNQLFEENPINASGVDAKAILSARLSKSRRLENLIAQLPGEKKNGLFGNLIALSLGLTPNFKSNFDLAEDAKLQLSKDTYDDDLDNLLAQIGDQYADLFLAAKNLSDAILLSDILRVNTEITKAPLSASMIKRYDEHHQDLTLLKALVRQQLPEKYKEIFFDQSKNGYAGYIDGGASQEEFYKFIKPILEKMDGTEELLVKLNREDLLRKQRTFDNGSIPHQIHLGELHAILRRQEDFYPFLKDNREKIEKILTFRIPYYVGPLARGNSRFAWMTRKSEETITPWNFEEVVDKGASAQSFIERMTNFDKNLPNEKVLPKHSLLYEYFTVYNELTKVKYVTEGMRKPAFLSGEQKKAIVDLLFKTNRKVTVKQLKEDYFKKIECFDSVEISGVEDRFNASLGTYHDLLKIIKDKDFLDNEENEDILEDIVLTLTLFEDREMIEERLKTYAHLFDDKVMKQLKRRRYTGWGRLSRKLINGIRDKQSGKTILDFLKSDGFANRNFMQLIHDDSLTFKEDIQKAQVSGQGDSLHEHIANLAGSPAIKKGILQTVKVVDELVKVMGRHKPENIVIEMARENQTTQKGQKNSRERMKRIEEGIKELGSQILKEHPVENTQLQNEKLYLYYLQNGRDMYVDQELDINRLSDYDVDHIVPQSFLKDDSIDNKVLTRSDKARGKSDNVPSEEVVKKMKNYWRQLLNAKLITQRKFDNLTKAERGGLSELDKAGFIKRQLVETRQITKHVAQILDSRMNTKYDENDKLIREVKVITLKSKLVSDFRKDFQFYKVREINNYHHAHDAYLNAVVGTALIKKYPKLESEFVYGDYKVYDVRKMIAKSEQEIGKATAKYFFYSNIMNFFKTEITLANGEIRKRPLIETNGETGEIVWDKGRDFATVRKVLSMPQVNIVKKTEVQTGGFSKESILPKRNSDKLIARKKDWDPKKYGGFDSPTVAYSVLVVAKVEKGKSKKLKSVKELLGITIMERSSFEKNPIDFLEAKGYKEVKKDLIIKLPKYSLFELENGRKRMLASAGELQKGNELALPSKYVNFLYLASHYEKLKGSPEDNEQKQLFVEQHKHYLDEIIEQISEFSKRVILADANLDKVLSAYNKHRDKPIREQAENIIHLFTLTNLGAPAAFKYFDTTIDRKRYTSTKEVLDATLIHQSITGLYETRIDLSQLGGDGGGSSGGGGGSGGMDPLQLLQPLEAEIKGTKLKAHWNSGATITCVPQAFLEEEVPIKNIWIKTIHGEKEQPVYYLTFKIQGRKVEAEVISSPYDYILVSPSDIPWLMKKPLQLTTLVPLQEYEERLLKQTMLTGSYKEKLQSLFLKYDALWQHWENQVGHRRIKPHHIATGTVNPRPQKQYPINPKAKASIQTVINDLLKQGVLIQQNSIMNTPVYPVPKPDGKWRMVLDYREVNKTIPLIAAQNQHSAGILSSIFRGKYKTTLDLSNGFWAHSITPESYWLTAFTWLGQQYCWTRLPQGFLNSPALFNADVVDLLKEVPNVQVYVDDIYISHDDPREHLEQLEKVFSLLLNAGYVVSLKKSEIAQHEVEFLGFNITKEGRGLTETFKQKLLNITPPRDLKQLQSILGLLNFARNFIPNFSELVKPLYNIIATAPGKYITWTTDNSQQLQNIISMLNSAENLEERNPEVRLIMKVNTSPSAGYIRFYNEFAKRPIMYLNYVYTKAEVKFTNTEKLLTTIHKGLIKALDLGMGQEILVYSPIVSMTKIQKTPLPERKALPIRWITWMSYLEDPRIQFHYDKTLPELQQVPTVTDDIIAKIKHPSEFSMVFYTDGSAIKHPNVNKSHNAGMGIAQVQFKPEFTVINTWSIPLGDHTAQLAEVAAVEFACKKALKIDGPVLIVTDSFYVAESVNKELPYWQSNGFFNNKKKPLKHVSKWKSIADCIQLKPDIIIIHEKGHQPTASTFHTEGNNLADKLATQGSYVVNAGKRTADGSEFEKRTADGSEFESPKKKAKVE

SEQ ID NO: 611 - protein, 2180 aa, synthetic construct
MPAAKRVKLDGGDKKYSIGLDIGTNSVGWAVITDEYKVPSKKFKVLGNTDRHSIKKNLIGALLFDSGETAEATRLKRTARRRYTRRKNRICYLQEIFSNEMAKVDDSFFHRLEESFLVEEDKKHERHPIFGNIVDEVAYHEKYPTIYHLRKKLVDSTDKADLRLIYLALAHMIKFRGHFLIEGDLNPDNSDVDKLFIQLVQTYNQLFEENPINASGVDAKAILSARLSKSRRLENLIAQLPGEKKNGLFGNLIALSLGLTPNFKSNFDLAEDAKLQLSKDTYDDDLDNLLAQIGDQYADLFLAAKNLSDAILLSDILRVNTEITKAPLSASMIKRYDEHHQDLTLLKALVRQQLPEKYKEIFFDQSKNGYAGYIDGGASQEEFYKFIKPILEKMDGTEELLVKLNREDLLRKQRTFDNGSIPHQIHLGELHAILRRQEDFYPFLKDNREKIEKILTFRIPYYVGPLARGNSRFAWMTRKSEETITPWNFEEVVDKGASAQSFIERMTNFDKNLPNEKVLPKHSLLYEYFTVYNELTKVKYVTEGMRKPAFLSGEQKKAIVDLLFKTNRKVTVKQLKEDYFKKIECFDSVEISGVEDRFNASLGTYHDLLKIIKDKDFLDNEENEDILEDIVLTLTLFEDREMIEERLKTYAHLFDDKVMKQLKRRRYTGWGRLSRKLINGIRDKQSGKTILDFLKSDGFANRNFMQLIHDDSLTFKEDIQKAQVSGQGDSLHEHIANLAGSPAIKKGILQTVKVVDELVKVMGRHKPENIVIEMARENQTTQKGQKNSRERMKRIEEGIKELGSQILKEHPVENTQLQNEKLYLYYLQNGRDMYVDQELDINRLSDYDVDHIVPQSFLKDDSIDNKVLTRSDKARGKSDNVPSEEVVKKMKNYWRQLLNAKLITQRKFDNLTKAERGGLSELDKAGFIKRQLVETRQITKHVAQILDSRMNTKYDENDKLIREVKVITLKSKLVSDFRKDFQFYKVREINNYHHAHDAYLNAVVGTALIKKYPKLESEFVYGDYKVYDVRKMIAKSEQEIGKATAKYFFYSNIMNFFKTEITLANGEIRKRPLIETNGETGEIVWDKGRDFATVRKVLSMPQVNIVKKTEVQTGGFSKESILPKRNSDKLIARKKDWDPKKYGGFDSPTVAYSVLVVAKVEKGKSKKLKSVKELLGITIMERSSFEKNPIDFLEAKGYKEVKKDLIIKLPKYSLFELENGRKRMLASAGELQKGNELALPSKYVNFLYLASHYEKLKGSPEDNEQKQLFVEQHKHYLDEIIEQISEFSKRVILADANLDKVLSAYNKHRDKPIREQAENIIHLFTLTNLGAPAAFKYFDTTIDRKRYTSTKEVLDATLIHQSITGLYETRIDLSQLGGDGGGGGGSEAAAKGGGGSGGMDPLQLLQPLEAEIKGTKLKAHWNSGATITCVPQAFLEEEVPIKNIWIKTIHGEKEQPVYYLTFKIQGRKVEAEVISSPYDYILVSPSDIPWLMKKPLQLTTLVPLQEYEERLLKQTMLTGSYKEKLQSLFLKYDALWQHWENQVGHRRIKPHHIATGTVNPRPQKQYPINPKAKASIQTVINDLLKQGVLIQQNSIMNTPVYPVPKPDGKWRMVLDYREVNKTIPLIAAQNQHSAGILSSIFRGKYKTTLDLSNGFWAHSITPESYWLTAFTWLGQQYCWTRLPQGFLNSPALFNADVVDLLKEVPNVQVYVDDIYISHDDPREHLEQLEKVFSLLLNAGYVVSLKKSEIAQHEVEFLGFNITKEGRGLTETFKQKLLNITPPRDLKQLQSILGLLNFARNFIPNFSELVKPLYNIIATAPGKYITWTTDNSQQLQNIISMLNSAENLEERNPEVRLIMKVNTSPSAGYIRFYNEFAKRPIMYLNYVYTKAEVKFTNTEKLLTTIHKGLIKALDLGMGQEILVYSPIVSMTKIQKTPLPERKALPIRWITWMSYLEDPRIQFHYDKTLPELQQVPTVTDDIIAKIKHPSEFSMVFYTDGSAIKHPNVNKSHNAGMGIAQVQFKPEFTVINTWSIPLGDHTAQLAEVAAVEFACKKALKIDGPVLIVTDSFYVAESVNKELPYWQSNGFFNNKKKPLKHVSKWKSIADCIQLKPDIIIIHEKGHQPTASTFHTEGNNLADKLATQGSYVVNAGKRTADGSEFEKRTADGSEFESPKKKAKVE

SEQ ID NO: 612 - protein, 2174 aa, synthetic construct
MPAAKRVKLDGGDKKYSIGLDIGTNSVGWAVITDEYKVPSKKFKVLGNTDRHSIKKNLIGALLFDSGETAEATRLKRTARRRYTRRKNRICYLQEIFSNEMAKVDDSFFHRLEESFLVEEDKKHERHPIFGNIVDEVAYHEKYPTIYHLRKKLVDSTDKADLRLIYLALAHMIKFRGHFLIEGDLNPDNSDVDKLFIQLVQTYNQLFEENPINASGVDAKAILSARLSKSRRLENLIAQLPGEKKNGLFGNLIALSLGLTPNFKSNFDLAEDAKLQLSKDTYDDDLDNLLAQIGDQYADLFLAAKNLSDAILLSDILRVNTEITKAPLSASMIKRYDEHHQDLTLLKALVRQQLPEKYKEIFFDQSKNGYAGYIDGGASQEEFYKFIKPILEKMDGTEELLVKLNREDLLRKQRTFDNGSIPHQIHLGELHAILRRQEDFYPFLKDNREKIEKILTFRIPYYVGPLARGNSRFAWMTRKSEETITPWNFEEVVDKGASAQSFIERMTNFDKNLPNEKVLPKHSLLYEYFTVYNELTKVKYVTEGMRKPAFLSGEQKKAIVDLLFKTNRKVTVKQLKEDYFKKIECFDSVEISGVEDRFNASLGTYHDLLKIIKDKDFLDNEENEDILEDIVLTLTLFEDREMIEERLKTYAHLFDDKVMKQLKRRRYTGWGRLSRKLINGIRDKQSGKTILDFLKSDGFANRNFMQLIHDDSLTFKEDIQKAQVSGQGDSLHEHIANLAGSPAIKKGILQTVKVVDELVKVMGRHKPENIVIEMARENQTTQKGQKNSRERMKRIEEGIKELGSQILKEHPVENTQLQNEKLYLYYLQNGRDMYVDQELDINRLSDYDVDHIVPQSFLKDDSIDNKVLTRSDKARGKSDNVPSEEVVKKMKNYWRQLLNAKLITQRKFDNLTKAERGGLSELDKAGFIKRQLVETRQITKHVAQILDSRMNTKYDENDKLIREVKVITLKSKLVSDFRKDFQFYKVREINNYHHAHDAYLNAVVGTALIKKYPKLESEFVYGDYKVYDVRKMIAKSEQEIGKATAKYFFYSNIMNFFKTEITLANGEIRKRPLIETNGETGEIVWDKGRDFATVRKVLSMPQVNIVKKTEVQTGGFSKESILPKRNSDKLIARKKDWDPKKYGGFDSPTVAYSVLVVAKVEKGKSKKLKSVKELLGITIMERSSFEKNPIDFLEAKGYKEVKKDLIIKLPKYSLFELENGRKRMLASAGELQKGNELALPSKYVNFLYLASHYEKLKGSPEDNEQKQLFVEQHKHYLDEIIEQISEFSKRVILADANLDKVLSAYNKHRDKPIREQAENIIHLFTLTNLGAPAAFKYFDTTIDRKRYTSTKEVLDATLIHQSITGLYETRIDLSQLGGDGGGSSPAPGGGGGMDPLQLLQPLEAEIKGTKLKAHWNSGATITCVPQAFLEEEVPIKNIWIKTIHGEKEQPVYYLTFKIQGRKVEAEVISSPYDYILVSPSDIPWLMKKPLQLTTLVPLQEYEERLLKQTMLTGSYKEKLQSLFLKYDALWQHWENQVGHRRIKPHHIATGTVNPRPQKQYPINPKAKASIQTVINDLLKQGVLIQQNSIMNTPVYPVPKPDGKWRMVLDYREVNKTIPLIAAQNQHSAGILSSIFRGKYKTTLDLSNGFWAHSITPESYWLTAFTWLGQQYCWTRLPQGFLNSPALFNADVVDLLKEVPNVQVYVDDIYISHDDPREHLEQLEKVFSLLLNAGYVVSLKKSEIAQHEVEFLGFNITKEGRGLTETFKQKLLNITPPRDLKQLQSILGLLNFARNFIPNFSELVKPLYNIIATAPGKYITWTTDNSQQLQNIISMLNSAENLEERNPEVRLIMKVNTSPSAGYIRFYNEFAKRPIMYLNYVYTKAEVKFTNTEKLLTTIHKGLIKALDLGMGQEILVYSPIVSMTKIQKTPLPERKALPIRWITWMSYLEDPRIQFHYDKTLPELQQVPTVTDDIIAKIKHPSEFSMVFYTDGSAIKHPNVNKSHNAGMGIAQVQFKPEFTVINTWSIPLGDHTAQLAEVAAVEFACKKALKIDGPVLIVTDSFYVAESVNKELPYWQSNGFFNNKKKPLKHVSKWKSIADCIQLKPDIIIIHEKGHQPTASTFHTEGNNLADKLATQGSYVVNAGKRTADGSEFEKRTADGSEFESPKKKAKVE

SEQ ID NO: 613 - protein, 2176 aa, synthetic construct
MPAAKRVKLDGGDKKYSIGLDIGTNSVGWAVITDEYKVPSKKFKVLGNTDRHSIKKNLIGALLFDSGETAEATRLKRTARRRYTRRKNRICYLQEIFSNEMAKVDDSFFHRLEESFLVEEDKKHERHPIFGNIVDEVAYHEKYPTIYHLRKKLVDSTDKADLRLIYLALAHMIKFRGHFLIEGDLNPDNSDVDKLFIQLVQTYNQLFEENPINASGVDAKAILSARLSKSRRLENLIAQLPGEKKNGLFGNLIALSLGLTPNFKSNFDLAEDAKLQLSKDTYDDDLDNLLAQIGDQYADLFLAAKNLSDAILLSDILRVNTEITKAPLSASMIKRYDEHHQDLTLLKALVRQQLPEKYKEIFFDQSKNGYAGYIDGGASQEEFYKFIKPILEKMDGTEELLVKLNREDLLRKQRTFDNGSIPHQIHLGELHAILRRQEDFYPFLKDNREKIEKILTFRIPYYVGPLARGNSRFAWMTRKSEETITPWNFEEVVDKGASAQSFIERMTNFDKNLPNEKVLPKHSLLYEYFTVYNELTKVKYVTEGMRKPAFLSGEQKKAIVDLLFKTNRKVTVKQLKEDYFKKIECFDSVEISGVEDRFNASLGTYHDLLKIIKDKDFLDNEENEDILEDIVLTLTLFEDREMIEERLKTYAHLFDDKVMKQLKRRRYTGWGRLSRKLINGIRDKQSGKTILDFLKSDGFANRNFMQLIHDDSLTFKEDIQKAQVSGQGDSLHEHIANLAGSPAIKKGILQTVKVVDELVKVMGRHKPENIVIEMARENQTTQKGQKNSRERMKRIEEGIKELGSQILKEHPVENTQLQNEKLYLYYLQNGRDMYVDQELDINRLSDYDVDHIVPQSFLKDDSIDNKVLTRSDKARGKSDNVPSEEVVKKMKNYWRQLLNAKLITQRKFDNLTKAERGGLSELDKAGFIKRQLVETRQITKHVAQILDSRMNTKYDENDKLIREVKVITLKSKLVSDFRKDFQFYKVREINNYHHAHDAYLNAVVGTALIKKYPKLESEFVYGDYKVYDVRKMIAKSEQEIGKATAKYFFYSNIMNFFKTEITLANGEIRKRPLIETNGETGEIVWDKGRDFATVRKVLSMPQVNIVKKTEVQTGGFSKESILPKRNSDKLIARKKDWDPKKYGGFDSPTVAYSVLVVAKVEKGKSKKLKSVKELLGITIMERSSFEKNPIDFLEAKGYKEVKKDLIIKLPKYSLFELENGRKRMLASAGELQKGNELALPSKYVNFLYLASHYEKLKGSPEDNEQKQLFVEQHKHYLDEIIEQISEFSKRVILADANLDKVLSAYNKHRDKPIREQAENIIHLFTLTNLGAPAAFKYFDTTIDRKRYTSTKEVLDATLIHQSITGLYETRIDLSQLGGDGGGGGGSSEAAAKGGMDPLQLLQPLEAEIKGTKLKAHWNSGATITCVPQAFLEEEVPIKNIWIKTIHGEKEQPVYYLTFKIQGRKVEAEVISSPYDYILVSPSDIPWLMKKPLQLTTLVPLQEYEERLLKQTMLTGSYKEKLQSLFLKYDALWQHWENQVGHRRIKPHHIATGTVNPRPQKQYPINPKAKASIQTVINDLLKQGVLIQQNSIMNTPVYPVPKPDGKWRMVLDYREVNKTIPLIAAQNQHSAGILSSIFRGKYKTTLDLSNGFWAHSITPESYWLTAFTWLGQQYCWTRLPQGFLNSPALFNADVVDLLKEVPNVQVYVDDIYISHDDPREHLEQLEKVFSLLLNAGYVVSLKKSEIAQHEVEFLGFNITKEGRGLTETFKQKLLNITPPRDLKQLQSILGLLNFARNFIPNFSELVKPLYNIIATAPGKYITWTTDNSQQLQNIISMLNSAENLEERNPEVRLIMKVNTSPSAGYIRFYNEFAKRPIMYLNYVYTKAEVKFTNTEKLLTTIHKGLIKALDLGMGQEILVYSPIVSMTKIQKTPLPERKALPIRWITWMSYLEDPRIQFHYDKTLPELQQVPTVTDDIIAKIKHPSEFSMVFYTDGSAIKHPNVNKSHNAGMGIAQVQFKPEFTVINTWSIPLGDHTAQLAEVAAVEFACKKALKIDGPVLIVTDSFYVAESVNKELPYWQSNGFFNNKKKPLKHVSKWKSIADCIQLKPDIIIIHEKGHQPTASTFHTEGNNLADKLATQGSYVVNAGKRTADGSEFEKRTADGSEFESPKKKAKVE

SEQ ID NO: 614 - protein, 2176 aa, synthetic construct
MPAAKRVKLDGGDKKYSIGLDIGTNSVGWAVITDEYKVPSKKFKVLGNTDRHSIKKNLIGALLFDSGETAEATRLKRTARRRYTRRKNRICYLQEIFSNEMAKVDDSFFHRLEESFLVEEDKKHERHPIFGNIVDEVAYHEKYPTIYHLRKKLVDSTDKADLRLIYLALAHMIKFRGHFLIEGDLNPDNSDVDKLFIQLVQTYNQLFEENPINASGVDAKAILSARLSKSRRLENLIAQLPGEKKNGLFGNLIALSLGLTPNFKSNFDLAEDAKLQLSKDTYDDDLDNLLAQIGDQYADLFLAAKNLSDAILLSDILRVNTEITKAPLSASMIKRYDEHHQDLTLLKALVRQQLPEKYKEIFFDQSKNGYAGYIDGGASQEEFYKFIKPILEKMDGTEELLVKLNREDLLRKQRTFDNGSIPHQIHLGELHAILRRQEDFYPFLKDNREKIEKILTFRIPYYVGPLARGNSRFAWMTRKSEETITPWNFEEVVDKGASAQSFIERMTNFDKNLPNEKVLPKHSLLYEYFTVYNELTKVKYVTEGMRKPAFLSGEQKKAIVDLLFKTNRKVTVKQLKEDYFKKIECFDSVEISGVEDRFNASLGTYHDLLKIIKDKDFLDNEENEDILEDIVLTLTLFEDREMIEERLKTYAHLFDDKVMKQLKRRRYTGWGRLSRKLINGIRDKQSGKTILDFLKSDGFANRNFMQLIHDDSLTFKEDIQKAQVSGQGDSLHEHIANLAGSPAIKKGILQTVKVVDELVKVMGRHKPENIVIEMARENQTTQKGQKNSRERMKRIEEGIKELGSQILKEHPVENTQLQNEKLYLYYLQNGRDMYVDQELDINRLSDYDVDHIVPQSFLKDDSIDNKVLTRSDKARGKSDNVPSEEVVKKMKNYWRQLLNAKLITQRKFDNLTKAERGGLSELDKAGFIKRQLVETRQITKHVAQILDSRMNTKYDENDKLIREVKVITLKSKLVSDFRKDFQFYKVREINNYHHAHDAYLNAVVGTALIKKYPKLESEFVYGDYKVYDVRKMIAKSEQEIGKATAKYFFYSNIMNFFKTEITLANGEIRKRPLIETNGETGEIVWDKGRDFATVRKVLSMPQVNIVKKTEVQTGGFSKESILPKRNSDKLIARKKDWDPKKYGGFDSPTVAYSVLVVAKVEKGKSKKLKSVKELLGITIMERSSFEKNPIDFLEAKGYKEVKKDLIIKLPKYSLFELENGRKRMLASAGELQKGNELALPSKYVNFLYLASHYEKLKGSPEDNEQKQLFVEQHKHYLDEIIEQISEFSKRVILADANLDKVLSAYNKHRDKPIREQAENIIHLFTLTNLGAPAAFKYFDTTIDRKRYTSTKEVLDATLIHQSITGLYETRIDLSQLGGDGGGGSGSSEAAAKGGMDPLQLLQPLEAEIKGTKLKAHWNSGATITCVPQAFLEEEVPIKNIWIKTIHGEKEQPVYYLTFKIQGRKVEAEVISSPYDYILVSPSDIPWLMKKPLQLTTLVPLQEYEERLLKQTMLTGSYKEKLQSLFLKYDALWQHWENQVGHRRIKPHHIATGTVNPRPQKQYPINPKAKASIQTVINDLLKQGVLIQQNSIMNTPVYPVPKPDGKWRMVLDYREVNKTIPLIAAQNQHSAGILSSIFRGKYKTTLDLSNGFWAHSITPESYWLTAFTWLGQQYCWTRLPQGFLNSPALFNADVVDLLKEVPNVQVYVDDIYISHDDPREHLEQLEKVFSLLLNAGYVVSLKKSEIAQHEVEFLGFNITKEGRGLTETFKQKLLNITPPRDLKQLQSILGLLNFARNFIPNFSELVKPLYNIIATAPGKYITWTTDNSQQLQNIISMLNSAENLEERNPEVRLIMKVNTSPSAGYIRFYNEFAKRPIMYLNYVYTKAEVKFTNTEKLLTTIHKGLIKALDLGMGQEILVYSPIVSMTKIQKTPLPERKALPIRWITWMSYLEDPRIQFHYDKTLPELQQVPTVTDDIIAKIKHPSEFSMVFYTDGSAIKHPNVNKSHNAGMGIAQVQFKPEFTVINTWSIPLGDHTAQLAEVAAVEFACKKALKIDGPVLIVTDSFYVAESVNKELPYWQSNGFFNNKKKPLKHVSKWKSIADCIQLKPDIIIIHEKGHQPTASTFHTEGNNLADKLATQGSYVVNAGKRTADGSEFEKRTADGSEFESPKKKAKVE

SEQ ID NO: 615 - protein, 2185 aa, synthetic construct
MPAAKRVKLDGGDKKYSIGLDIGTNSVGWAVITDEYKVPSKKFKVLGNTDRHSIKKNLIGALLFDSGETAEATRLKRTARRRYTRRKNRICYLQEIFSNEMAKVDDSFFHRLEESFLVEEDKKHERHPIFGNIVDEVAYHEKYPTIYHLRKKLVDSTDKADLRLIYLALAHMIKFRGHFLIEGDLNPDNSDVDKLFIQLVQTYNQLFEENPINASGVDAKAILSARLSKSRRLENLIAQLPGEKKNGLFGNLIALSLGLTPNFKSNFDLAEDAKLQLSKDTYDDDLDNLLAQIGDQYADLFLAAKNLSDAILLSDILRVNTEITKAPLSASMIKRYDEHHQDLTLLKALVRQQLPEKYKEIFFDQSKNGYAGYIDGGASQEEFYKFIKPILEKMDGTEELLVKLNREDLLRKQRTFDNGSIPHQIHLGELHAILRRQEDFYPFLKDNREKIEKILTFRIPYYVGPLARGNSRFAWMTRKSEETITPWNFEEVVDKGASAQSFIERMTNFDKNLPNEKVLPKHSLLYEYFTVYNELTKVKYVTEGMRKPAFLSGEQKKAIVDLLFKTNRKVTVKQLKEDYFKKIECFDSVEISGVEDRFNASLGTYHDLLKIIKDKDFLDNEENEDILEDIVLTLTLFEDREMIEERLKTYAHLFDDKVMKQLKRRRYTGWGRLSRKLINGIRDKQSGKTILDFLKSDGFANRNFMQLIHDDSLTFKEDIQKAQVSGQGDSLHEHIANLAGSPAIKKGILQTVKVVDELVKVMGRHKPENIVIEMARENQTTQKGQKNSRERMKRIEEGIKELGSQILKEHPVENTQLQNEKLYLYYLQNGRDMYVDQELDINRLSDYDVDHIVPQSFLKDDSIDNKVLTRSDKARGKSDNVPSEEVVKKMKNYWRQLLNAKLITQRKFDNLTKAERGGLSELDKAGFIKRQLVETRQITKHVAQILDSRMNTKYDENDKLIREVKVITLKSKLVSDFRKDFQFYKVREINNYHHAHDAYLNAVVGTALIKKYPKLESEFVYGDYKVYDVRKMIAKSEQEIGKATAKYFFYSNIMNFFKTEITLANGEIRKRPLIETNGETGEIVWDKGRDFATVRKVLSMPQVNIVKKTEVQTGGFSKESILPKRNSDKLIARKKDWDPKKYGGFDSPTVAYSVLVVAKVEKGKSKKLKSVKELLGITIMERSSFEKNPIDFLEAKGYKEVKKDLIIKLPKYSLFELENGRKRMLASAGELQKGNELALPSKYVNFLYLASHYEKLKGSPEDNEQKQLFVEQHKHYLDEIIEQISEFSKRVILADANLDKVLSAYNKHRDKPIREQAENIIHLFTLTNLGAPAAFKYFDTTIDRKRYTSTKEVLDATLIHQSITGLYETRIDLSQLGGDGGGGGGSGGGGSGGGGSGGGGSGGMDPLQLLQPLEAEIKGTKLKAHWNSGATITCVPQAFLEEEVPIKNIWIKTIHGEKEQPVYYLTFKIQGRKVEAEVISSPYDYILVSPSDIPWLMKKPLQLTTLVPLQEYEERLLKQTMLTGSYKEKLQSLFLKYDALWQHWENQVGHRRIKPHHIATGTVNPRPQKQYPINPKAKASIQTVINDLLKQGVLIQQNSIMNTPVYPVPKPDGKWRMVLDYREVNKTIPLIAAQNQHSAGILSSIFRGKYKTTLDLSNGFWAHSITPESYWLTAFTWLGQQYCWTRLPQGFLNSPALFNADVVDLLKEVPNVQVYVDDIYISHDDPREHLEQLEKVFSLLLNAGYVVSLKKSEIAQHEVEFLGFNITKEGRGLTETFKQKLLNITPPRDLKQLQSILGLLNFARNFIPNFSELVKPLYNIIATAPGKYITWTTDNSQQLQNIISMLNSAENLEERNPEVRLIMKVNTSPSAGYIRFYNEFAKRPIMYLNYVYTKAEVKFTNTEKLLTTIHKGLIKALDLGMGQEILVYSPIVSMTKIQKTPLPERKALPIRWITWMSYLEDPRIQFHYDKTLPELQQVPTVTDDIIAKIKHPSEFSMVFYTDGSAIKHPNVNKSHNAGMGIAQVQFKPEFTVINTWSIPLGDHTAQLAEVAAVEFACKKALKIDGPVLIVTDSFYVAESVNKELPYWQSNGFFNNKKKPLKHVSKWKSIADCIQLKPDIIIIHEKGHQPTASTFHTEGNNLADKLATQGSYVVNAGKRTADGSEFEKRTADGSEFESPKKKAKVE

SEQ ID NO: 616 - protein, 2176 aa, synthetic construct
MPAAKRVKLDGGDKKYSIGLDIGTNSVGWAVITDEYKVPSKKFKVLGNTDRHSIKKNLIGALLFDSGETAEATRLKRTARRRYTRRKNRICYLQEIFSNEMAKVDDSFFHRLEESFLVEEDKKHERHPIFGNIVDEVAYHEKYPTIYHLRKKLVDSTDKADLRLIYLALAHMIKFRGHFLIEGDLNPDNSDVDKLFIQLVQTYNQLFEENPINASGVDAKAILSARLSKSRRLENLIAQLPGEKKNGLFGNLIALSLGLTPNFKSNFDLAEDAKLQLSKDTYDDDLDNLLAQIGDQYADLFLAAKNLSDAILLSDILRVNTEITKAPLSASMIKRYDEHHQDLTLLKALVRQQLPEKYKEIFFDQSKNGYAGYIDGGASQEEFYKFIKPILEKMDGTEELLVKLNREDLLRKQRTFDNGSIPHQIHLGELHAILRRQEDFYPFLKDNREKIEKILTFRIPYYVGPLARGNSRFAWMTRKSEETITPWNFEEVVDKGASAQSFIERMTNFDKNLPNEKVLPKHSLLYEYFTVYNELTKVKYVTEGMRKPAFLSGEQKKAIVDLLFKTNRKVTVKQLKEDYFKKIECFDSVEISGVEDRFNASLGTYHDLLKIIKDKDFLDNEENEDILEDIVLTLTLFEDREMIEERLKTYAHLFDDKVMKQLKRRRYTGWGRLSRKLINGIRDKQSGKTILDFLKSDGFANRNFMQLIHDDSLTFKEDIQKAQVSGQGDSLHEHIANLAGSPAIKKGILQTVKVVDELVKVMGRHKPENIVIEMARENQTTQKGQKNSRERMKRIEEGIKELGSQILKEHPVENTQLQNEKLYLYYLQNGRDMYVDQELDINRLSDYDVDHIVPQSFLKDDSIDNKVLTRSDKARGKSDNVPSEEVVKKMKNYWRQLLNAKLITQRKFDNLTKAERGGLSELDKAGFIKRQLVETRQITKHVAQILDSRMNTKYDENDKLIREVKVITLKSKLVSDFRKDFQFYKVREINNYHHAHDAYLNAVVGTALIKKYPKLESEFVYGDYKVYDVRKMIAKSEQEIGKATAKYFFYSNIMNFFKTEITLANGEIRKRPLIETNGETGEIVWDKGRDFATVRKVLSMPQVNIVKKTEVQTGGFSKESILPKRNSDKLIARKKDWDPKKYGGFDSPTVAYSVLVVAKVEKGKSKKLKSVKELLGITIMERSSFEKNPIDFLEAKGYKEVKKDLIIKLPKYSLFELENGRKRMLASAGELQKGNELALPSKYVNFLYLASHYEKLKGSPEDNEQKQLFVEQHKHYLDEIIEQISEFSKRVILADANLDKVLSAYNKHRDKPIREQAENIIHLFTLTNLGAPAAFKYFDTTIDRKRYTSTKEVLDATLIHQSITGLYETRIDLSQLGGDGGPAPEAAAKGGGGGMDPLQLLQPLEAEIKGTKLKAHWNSGATITCVPQAFLEEEVPIKNIWIKTIHGEKEQPVYYLTFKIQGRKVEAEVISSPYDYILVSPSDIPWLMKKPLQLTTLVPLQEYEERLLKQTMLTGSYKEKLQSLFLKYDALWQHWENQVGHRRIKPHHIATGTVNPRPQKQYPINPKAKASIQTVINDLLKQGVLIQQNSIMNTPVYPVPKPDGKWRMVLDYREVNKTIPLIAAQNQHSAGILSSIFRGKYKTTLDLSNGFWAHSITPESYWLTAFTWLGQQYCWTRLPQGFLNSPALFNADVVDLLKEVPNVQVYVDDIYISHDDPREHLEQLEKVFSLLLNAGYVVSLKKSEIAQHEVEFLGFNITKEGRGLTETFKQKLLNITPPRDLKQLQSILGLLNFARNFIPNFSELVKPLYNIIATAPGKYITWTTDNSQQLQNIISMLNSAENLEERNPEVRLIMKVNTSPSAGYIRFYNEFAKRPIMYLNYVYTKAEVKFTNTEKLLTTIHKGLIKALDLGMGQEILVYSPIVSMTKIQKTPLPERKALPIRWITWMSYLEDPRIQFHYDKTLPELQQVPTVTDDIIAKIKHPSEFSMVFYTDGSAIKHPNVNKSHNAGMGIAQVQFKPEFTVINTWSIPLGDHTAQLAEVAAVEFACKKALKIDGPVLIVTDSFYVAESVNKELPYWQSNGFFNNKKKPLKHVSKWKSIADCIQLKPDIIIIHEKGHQPTASTFHTEGNNLADKLATQGSYVVNAGKRTADGSEFEKRTADGSEFESPKKKAKVE

SEQ ID NO: 617 - protein, 2174 aa, synthetic construct
MPAAKRVKLDGGDKKYSIGLDIGTNSVGWAVITDEYKVPSKKFKVLGNTDRHSIKKNLIGALLFDSGETAEATRLKRTARRRYTRRKNRICYLQEIFSNEMAKVDDSFFHRLEESFLVEEDKKHERHPIFGNIVDEVAYHEKYPTIYHLRKKLVDSTDKADLRLIYLALAHMIKFRGHFLIEGDLNPDNSDVDKLFIQLVQTYNQLFEENPINASGVDAKAILSARLSKSRRLENLIAQLPGEKKNGLFGNLIALSLGLTPNFKSNFDLAEDAKLQLSKDTYDDDLDNLLAQIGDQYADLFLAAKNLSDAILLSDILRVNTEITKAPLSASMIKRYDEHHQDLTLLKALVRQQLPEKYKEIFFDQSKNGYAGYIDGGASQEEFYKFIKPILEKMDGTEELLVKLNREDLLRKQRTFDNGSIPHQIHLGELHAILRRQEDFYPFLKDNREKIEKILTFRIPYYVGPLARGNSRFAWMTRKSEETITPWNFEEVVDKGASAQSFIERMTNFDKNLPNEKVLPKHSLLYEYFTVYNELTKVKYVTEGMRKPAFLSGEQKKAIVDLLFKTNRKVTVKQLKEDYFKKIECFDSVEISGVEDRFNASLGTYHDLLKIIKDKDFLDNEENEDILEDIVLTLTLFEDREMIEERLKTYAHLFDDKVMKQLKRRRYTGWGRLSRKLINGIRDKQSGKTILDFLKSDGFANRNFMQLIHDDSLTFKEDIQKAQVSGQGDSLHEHIANLAGSPAIKKGILQTVKVVDELVKVMGRHKPENIVIEMARENQTTQKGQKNSRERMKRIEEGIKELGSQILKEHPVENTQLQNEKLYLYYLQNGRDMYVDQELDINRLSDYDVDHIVPQSFLKDDSIDNKVLTRSDKARGKSDNVPSEEVVKKMKNYWRQLLNAKLITQRKFDNLTKAERGGLSELDKAGFIKRQLVETRQITKHVAQILDSRMNTKYDENDKLIREVKVITLKSKLVSDFRKDFQFYKVREINNYHHAHDAYLNAVVGTALIKKYPKLESEFVYGDYKVYDVRKMIAKSEQEIGKATAKYFFYSNIMNFFKTEITLANGEIRKRPLIETNGETGEIVWDKGRDFATVRKVLSMPQVNIVKKTEVQTGGFSKESILPKRNSDKLIARKKDWDPKKYGGFDSPTVAYSVLVVAKVEKGKSKKLKSVKELLGITIMERSSFEKNPIDFLEAKGYKEVKKDLIIKLPKYSLFELENGRKRMLASAGELQKGNELALPSKYVNFLYLASHYEKLKGSPEDNEQKQLFVEQHKHYLDEIIEQISEFSKRVILADANLDKVLSAYNKHRDKPIREQAENIIHLFTLTNLGAPAAFKYFDTTIDRKRYTSTKEVLDATLIHQSITGLYETRIDLSQLGGDGGPAPGSSGGGGGMDPLQLLQPLEAEIKGTKLKAHWNSGATITCVPQAFLEEEVPIKNIWIKTIHGEKEQPVYYLTFKIQGRKVEAEVISSPYDYILVSPSDIPWLMKKPLQLTTLVPLQEYEERLLKQTMLTGSYKEKLQSLFLKYDALWQHWENQVGHRRIKPHHIATGTVNPRPQKQYPINPKAKASIQTVINDLLKQGVLIQQNSIMNTPVYPVPKPDGKWRMVLDYREVNKTIPLIAAQNQHSAGILSSIFRGKYKTTLDLSNGFWAHSITPESYWLTAFTWLGQQYCWTRLPQGFLNSPALFNADVVDLLKEVPNVQVYVDDIYISHDDPREHLEQLEKVFSLLLNAGYVVSLKKSEIAQHEVEFLGFNITKEGRGLTETFKQKLLNITPPRDLKQLQSILGLLNFARNFIPNFSELVKPLYNIIATAPGKYITWTTDNSQQLQNIISMLNSAENLEERNPEVRLIMKVNTSPSAGYIRFYNEFAKRPIMYLNYVYTKAEVKFTNTEKLLTTIHKGLIKALDLGMGQEILVYSPIVSMTKIQKTPLPERKALPIRWITWMSYLEDPRIQFHYDKTLPELQQVPTVTDDIIAKIKHPSEFSMVFYTDGSAIKHPNVNKSHNAGMGIAQVQFKPEFTVINTWSIPLGDHTAQLAEVAAVEFACKKALKIDGPVLIVTDSFYVAESVNKELPYWQSNGFFNNKKKPLKHVSKWKSIADCIQLKPDIIIIHEKGHQPTASTFHTEGNNLADKLATQGSYVVNAGKRTADGSEFEKRTADGSEFESPKKKAKVE

SEQ ID NO: 618 - protein, 2174 aa, synthetic construct
MPAAKRVKLDGGDKKYSIGLDIGTNSVGWAVITDEYKVPSKKFKVLGNTDRHSIKKNLIGALLFDSGETAEATRLKRTARRRYTRRKNRICYLQEIFSNEMAKVDDSFFHRLEESFLVEEDKKHERHPIFGNIVDEVAYHEKYPTIYHLRKKLVDSTDKADLRLIYLALAHMIKFRGHFLIEGDLNPDNSDVDKLFIQLVQTYNQLFEENPINASGVDAKAILSARLSKSRRLENLIAQLPGEKKNGLFGNLIALSLGLTPNFKSNFDLAEDAKLQLSKDTYDDDLDNLLAQIGDQYADLFLAAKNLSDAILLSDILRVNTEITKAPLSASMIKRYDEHHQDLTLLKALVRQQLPEKYKEIFFDQSKNGYAGYIDGGASQEEFYKFIKPILEKMDGTEELLVKLNREDLLRKQRTFDNGSIPHQIHLGELHAILRRQEDFYPFLKDNREKIEKILTFRIPYYVGPLARGNSRFAWMTRKSEETITPWNFEEVVDKGASAQSFIERMTNFDKNLPNEKVLPKHSLLYEYFTVYNELTKVKYVTEGMRKPAFLSGEQKKAIVDLLFKTNRKVTVKQLKEDYFKKIECFDSVEISGVEDRFNASLGTYHDLLKIIKDKDFLDNEENEDILEDIVLTLTLFEDREMIEERLKTYAHLFDDKVMKQLKRRRYTGWGRLSRKLINGIRDKQSGKTILDFLKSDGFANRNFMQLIHDDSLTFKEDIQKAQVSGQGDSLHEHIANLAGSPAIKKGILQTVKVVDELVKVMGRHKPENIVIEMARENQTTQKGQKNSRERMKRIEEGIKELGSQILKEHPVENTQLQNEKLYLYYLQNGRDMYVDQELDINRLSDYDVDHIVPQSFLKDDSIDNKVLTRSDKARGKSDNVPSEEVVKKMKNYWRQLLNAKLITQRKFDNLTKAERGGLSELDKAGFIKRQLVETRQITKHVAQILDSRMNTKYDENDKLIREVKVITLKSKLVSDFRKDFQFYKVREINNYHHAHDAYLNAVVGTALIKKYPKLESEFVYGDYKVYDVRKMIAKSEQEIGKATAKYFFYSNIMNFFKTEITLANGEIRKRPLIETNGETGEIVWDKGRDFATVRKVLSMPQVNIVKKTEVQTGGFSKESILPKRNSDKLIARKKDWDPKKYGGFDSPTVAYSVLVVAKVEKGKSKKLKSVKELLGITIMERSSFEKNPIDFLEAKGYKEVKKDLIIKLPKYSLFELENGRKRMLASAGELQKGNELALPSKYVNFLYLASHYEKLKGSPEDNEQKQLFVEQHKHYLDEIIEQISEFSKRVILADANLDKVLSAYNKHRDKPIREQAENIIHLFTLTNLGAPAAFKYFDTTIDRKRYTSTKEVLDATLIHQSITGLYETRIDLSQLGGDGGPAPGGSGGGGGMDPLQLLQPLEAEIKGTKLKAHWNSGATITCVPQAFLEEEVPIKNIWIKTIHGEKEQPVYYLTFKIQGRKVEAEVISSPYDYILVSPSDIPWLMKKPLQLTTLVPLQEYEERLLKQTMLTGSYKEKLQSLFLKYDALWQHWENQVGHRRIKPHHIATGTVNPRPQKQYPINPKAKASIQTVINDLLKQGVLIQQNSIMNTPVYPVPKPDGKWRMVLDYREVNKTIPLIAAQNQHSAGILSSIFRGKYKTTLDLSNGFWAHSITPESYWLTAFTWLGQQYCWTRLPQGFLNSPALFNADVVDLLKEVPNVQVYVDDIYISHDDPREHLEQLEKVFSLLLNAGYVVSLKKSEIAQHEVEFLGFNITKEGRGLTETFKQKLLNITPPRDLKQLQSILGLLNFARNFIPNFSELVKPLYNIIATAPGKYITWTTDNSQQLQNIISMLNSAENLEERNPEVRLIMKVNTSPSAGYIRFYNEFAKRPIMYLNYVYTKAEVKFTNTEKLLTTIHKGLIKALDLGMGQEILVYSPIVSMTKIQKTPLPERKALPIRWITWMSYLEDPRIQFHYDKTLPELQQVPTVTDDIIAKIKHPSEFSMVFYTDGSAIKHPNVNKSHNAGMGIAQVQFKPEFTVINTWSIPLGDHTAQLAEVAAVEFACKKALKIDGPVLIVTDSFYVAESVNKELPYWQSNGFFNNKKKPLKHVSKWKSIADCIQLKPDIIIIHEKGHQPTASTFHTEGNNLADKLATQGSYVVNAGKRTADGSEFEKRTADGSEFESPKKKAKVE

SEQ ID NO: 619 - protein, 2173 aa, synthetic construct
MPAAKRVKLDGGDKKYSIGLDIGTNSVGWAVITDEYKVPSKKFKVLGNTDRHSIKKNLIGALLFDSGETAEATRLKRTARRRYTRRKNRICYLQEIFSNEMAKVDDSFFHRLEESFLVEEDKKHERHPIFGNIVDEVAYHEKYPTIYHLRKKLVDSTDKADLRLIYLALAHMIKFRGHFLIEGDLNPDNSDVDKLFIQLVQTYNQLFEENPINASGVDAKAILSARLSKSRRLENLIAQLPGEKKNGLFGNLIALSLGLTPNFKSNFDLAEDAKLQLSKDTYDDDLDNLLAQIGDQYADLFLAAKNLSDAILLSDILRVNTEITKAPLSASMIKRYDEHHQDLTLLKALVRQQLPEKYKEIFFDQSKNGYAGYIDGGASQEEFYKFIKPILEKMDGTEELLVKLNREDLLRKQRTFDNGSIPHQIHLGELHAILRRQEDFYPFLKDNREKIEKILTFRIPYYVGPLARGNSRFAWMTRKSEETITPWNFEEVVDKGASAQSFIERMTNFDKNLPNEKVLPKHSLLYEYFTVYNELTKVKYVTEGMRKPAFLSGEQKKAIVDLLFKTNRKVTVKQLKEDYFKKIECFDSVEISGVEDRFNASLGTYHDLLKIIKDKDFLDNEENEDILEDIVLTLTLFEDREMIEERLKTYAHLFDDKVMKQLKRRRYTGWGRLSRKLINGIRDKQSGKTILDFLKSDGFANRNFMQLIHDDSLTFKEDIQKAQVSGQGDSLHEHIANLAGSPAIKKGILQTVKVVDELVKVMGRHKPENIVIEMARENQTTQKGQKNSRERMKRIEEGIKELGSQILKEHPVENTQLQNEKLYLYYLQNGRDMYVDQELDINRLSDYDVDHIVPQSFLKDDSIDNKVLTRSDKARGKSDNVPSEEVVKKMKNYWRQLLNAKLITQRKFDNLTKAERGGLSELDKAGFIKRQLVETRQITKHVAQILDSRMNTKYDENDKLIREVKVITLKSKLVSDFRKDFQFYKVREINNYHHAHDAYLNAVVGTALIKKYPKLESEFVYGDYKVYDVRKMIAKSEQEIGKATAKYFFYSNIMNFFKTEITLANGEIRKRPLIETNGETGEIVWDKGRDFATVRKVLSMPQVNIVKKTEVQTGGFSKESILPKRNSDKLIARKKDWDPKKYGGFDSPTVAYSVLVVAKVEKGKSKKLKSVKELLGITIMERSSFEKNPIDFLEAKGYKEVKKDLIIKLPKYSLFELENGRKRMLASAGELQKGNELALPSKYVNFLYLASHYEKLKGSPEDNEQKQLFVEQHKHYLDEIIEQISEFSKRVILADANLDKVLSAYNKHRDKPIREQAENIIHLFTLTNLGAPAAFKYFDTTIDRKRYTSTKEVLDATLIHQSITGLYETRIDLSQLGGDGGEAAAKPAPGGMDPLQLLQPLEAEIKGTKLKAHWNSGATITCVPQAFLEEEVPIKNIWIKTIHGEKEQPVYYLTFKIQGRKVEAEVISSPYDYILVSPSDIPWLMKKPLQLTTLVPLQEYEERLLKQTMLTGSYKEKLQSLFLKYDALWQHWENQVGHRRIKPHHIATGTVNPRPQKQYPINPKAKASIQTVINDLLKQGVLIQQNSIMNTPVYPVPKPDGKWRMVLDYREVNKTIPLIAAQNQHSAGILSSIFRGKYKTTLDLSNGFWAHSITPESYWLTAFTWLGQQYCWTRLPQGFLNSPALFNADVVDLLKEVPNVQVYVDDIYISHDDPREHLEQLEKVFSLLLNAGYVVSLKKSEIAQHEVEFLGFNITKEGRGLTETFKQKLLNITPPRDLKQLQSILGLLNFARNFIPNFSELVKPLYNIIATAPGKYITWTTDNSQQLQNIISMLNSAENLEERNPEVRLIMKVNTSPSAGYIRFYNEFAKRPIMYLNYVYTKAEVKFTNTEKLLTTIHKGLIKALDLGMGQEILVYSPIVSMTKIQKTPLPERKALPIRWITWMSYLEDPRIQFHYDKTLPELQQVPTVTDDIIAKIKHPSEFSMVFYTDGSAIKHPNVNKSHNAGMGIAQVQFKPEFTVINTWSIPLGDHTAQLAEVAAVEFACKKALKIDGPVLIVTDSFYVAESVNKELPYWQSNGFFNNKKKPLKHVSKWKSIADCIQLKPDIIIIHEKGHQPTASTFHTEGNNLADKLATQGSYVVNAGKRTADGSEFEKRTADGSEFESPKKKAKVE

SEQ ID NO: 620 - protein, 2176 aa, synthetic construct
MPAAKRVKLDGGDKKYSIGLDIGTNSVGWAVITDEYKVPSKKFKVLGNTDRHSIKKNLIGALLFDSGETAEATRLKRTARRRYTRRKNRICYLQEIFSNEMAKVDDSFFHRLEESFLVEEDKKHERHPIFGNIVDEVAYHEKYPTIYHLRKKLVDSTDKADLRLIYLALAHMIKFRGHFLIEGDLNPDNSDVDKLFIQLVQTYNQLFEENPINASGVDAKAILSARLSKSRRLENLIAQLPGEKKNGLFGNLIALSLGLTPNFKSNFDLAEDAKLQLSKDTYDDDLDNLLAQIGDQYADLFLAAKNLSDAILLSDILRVNTEITKAPLSASMIKRYDEHHQDLTLLKALVRQQLPEKYKEIFFDQSKNGYAGYIDGGASQEEFYKFIKPILEKMDGTEELLVKLNREDLLRKQRTFDNGSIPHQIHLGELHAILRRQEDFYPFLKDNREKIEKILTFRIPYYVGPLARGNSRFAWMTRKSEETITPWNFEEVVDKGASAQSFIERMTNFDKNLPNEKVLPKHSLLYEYFTVYNELTKVKYVTEGMRKPAFLSGEQKKAIVDLLFKTNRKVTVKQLKEDYFKKIECFDSVEISGVEDRFNASLGTYHDLLKIIKDKDFLDNEENEDILEDIVLTLTLFEDREMIEERLKTYAHLFDDKVMKQLKRRRYTGWGRLSRKLINGIRDKQSGKTILDFLKSDGFANRNFMQLIHDDSLTFKEDIQKAQVSGQGDSLHEHIANLAGSPAIKKGILQTVKVVDELVKVMGRHKPENIVIEMARENQTTQKGQKNSRERMKRIEEGIKELGSQILKEHPVENTQLQNEKLYLYYLQNGRDMYVDQELDINRLSDYDVDHIVPQSFLKDDSIDNKVLTRSDKARGKSDNVPSEEVVKKMKNYWRQLLNAKLITQRKFDNLTKAERGGLSELDKAGFIKRQLVETRQITKHVAQILDSRMNTKYDENDKLIREVKVITLKSKLVSDFRKDFQFYKVREINNYHHAHDAYLNAVVGTALIKKYPKLESEFVYGDYKVYDVRKMIAKSEQEIGKATAKYFFYSNIMNFFKTEITLANGEIRKRPLIETNGETGEIVWDKGRDFATVRKVLSMPQVNIVKKTEVQTGGFSKESILPKRNSDKLIARKKDWDPKKYGGFDSPTVAYSVLVVAKVEKGKSKKLKSVKELLGITIMERSSFEKNPIDFLEAKGYKEVKKDLIIKLPKYSLFELENGRKRMLASAGELQKGNELALPSKYVNFLYLASHYEKLKGSPEDNEQKQLFVEQHKHYLDEIIEQISEFSKRVILADANLDKVLSAYNKHRDKPIREQAENIIHLFTLTNLGAPAAFKYFDTTIDRKRYTSTKEVLDATLIHQSITGLYETRIDLSQLGGDGGGGGEAAAKGSSGGMDPLQLLQPLEAEIKGTKLKAHWNSGATITCVPQAFLEEEVPIKNIWIKTIHGEKEQPVYYLTFKIQGRKVEAEVISSPYDYILVSPSDIPWLMKKPLQLTTLVPLQEYEERLLKQTMLTGSYKEKLQSLFLKYDALWQHWENQVGHRRIKPHHIATGTVNPRPQKQYPINPKAKASIQTVINDLLKQGVLIQQNSIMNTPVYPVPKPDGKWRMVLDYREVNKTIPLIAAQNQHSAGILSSIFRGKYKTTLDLSNGFWAHSITPESYWLTAFTWLGQQYCWTRLPQGFLNSPALFNADVVDLLKEVPNVQVYVDDIYISHDDPREHLEQLEKVFSLLLNAGYVVSLKKSEIAQHEVEFLGFNITKEGRGLTETFKQKLLNITPPRDLKQLQSILGLLNFARNFIPNFSELVKPLYNIIATAPGKYITWTTDNSQQLQNIISMLNSAENLEERNPEVRLIMKVNTSPSAGYIRFYNEFAKRPIMYLNYVYTKAEVKFTNTEKLLTTIHKGLIKALDLGMGQEILVYSPIVSMTKIQKTPLPERKALPIRWITWMSYLEDPRIQFHYDKTLPELQQVPTVTDDIIAKIKHPSEFSMVFYTDGSAIKHPNVNKSHNAGMGIAQVQFKPEFTVINTWSIPLGDHTAQLAEVAAVEFACKKALKIDGPVLIVTDSFYVAESVNKELPYWQSNGFFNNKKKPLKHVSKWKSIADCIQLKPDIIIIHEKGHQPTASTFHTEGNNLADKLATQGSYVVNAGKRTADGSEFEKRTADGSEFESPKKKAKVE

SEQ ID NO: 621 - protein, 2176 aa, synthetic construct
MPAAKRVKLDGGDKKYSIGLDIGTNSVGWAVITDEYKVPSKKFKVLGNTDRHSIKKNLIGALLFDSGETAEATRLKRTARRRYTRRKNRICYLQEIFSNEMAKVDDSFFHRLEESFLVEEDKKHERHPIFGNIVDEVAYHEKYPTIYHLRKKLVDSTDKADLRLIYLALAHMIKFRGHFLIEGDLNPDNSDVDKLFIQLVQTYNQLFEENPINASGVDAKAILSARLSKSRRLENLIAQLPGEKKNGLFGNLIALSLGLTPNFKSNFDLAEDAKLQLSKDTYDDDLDNLLAQIGDQYADLFLAAKNLSDAILLSDILRVNTEITKAPLSASMIKRYDEHHQDLTLLKALVRQQLPEKYKEIFFDQSKNGYAGYIDGGASQEEFYKFIKPILEKMDGTEELLVKLNREDLLRKQRTFDNGSIPHQIHLGELHAILRRQEDFYPFLKDNREKIEKILTFRIPYYVGPLARGNSRFAWMTRKSEETITPWNFEEVVDKGASAQSFIERMTNFDKNLPNEKVLPKHSLLYEYFTVYNELTKVKYVTEGMRKPAFLSGEQKKAIVDLLFKTNRKVTVKQLKEDYFKKIECFDSVEISGVEDRFNASLGTYHDLLKIIKDKDFLDNEENEDILEDIVLTLTLFEDREMIEERLKTYAHLFDDKVMKQLKRRRYTGWGRLSRKLINGIRDKQSGKTILDFLKSDGFANRNFMQLIHDDSLTFKEDIQKAQVSGQGDSLHEHIANLAGSPAIKKGILQTVKVVDELVKVMGRHKPENIVIEMARENQTTQKGQKNSRERMKRIEEGIKELGSQILKEHPVENTQLQNEKLYLYYLQNGRDMYVDQELDINRLSDYDVDHIVPQSFLKDDSIDNKVLTRSDKARGKSDNVPSEEVVKKMKNYWRQLLNAKLITQRKFDNLTKAERGGLSELDKAGFIKRQLVETRQITKHVAQILDSRMNTKYDENDKLIREVKVITLKSKLVSDFRKDFQFYKVREINNYHHAHDAYLNAVVGTALIKKYPKLESEFVYGDYKVYDVRKMIAKSEQEIGKATAKYFFYSNIMNFFKTEITLANGEIRKRPLIETNGETGEIVWDKGRDFATVRKVLSMPQVNIVKKTEVQTGGFSKESILPKRNSDKLIARKKDWDPKKYGGFDSPTVAYSVLVVAKVEKGKSKKLKSVKELLGITIMERSSFEKNPIDFLEAKGYKEVKKDLIIKLPKYSLFELENGRKRMLASAGELQKGNELALPSKYVNFLYLASHYEKLKGSPEDNEQKQLFVEQHKHYLDEIIEQISEFSKRVILADANLDKVLSAYNKHRDKPIREQAENIIHLFTLTNLGAPAAFKYFDTTIDRKRYTSTKEVLDATLIHQSITGLYETRIDLSQLGGDGGGGGEAAAKPAPGGMDPLQLLQPLEAEIKGTKLKAHWNSGATITCVPQAFLEEEVPIKNIWIKTIHGEKEQPVYYLTFKIQGRKVEAEVISSPYDYILVSPSDIPWLMKKPLQLTTLVPLQEYEERLLKQTMLTGSYKEKLQSLFLKYDALWQHWENQVGHRRIKPHHIATGTVNPRPQKQYPINPKAKASIQTVINDLLKQGVLIQQNSIMNTPVYPVPKPDGKWRMVLDYREVNKTIPLIAAQNQHSAGILSSIFRGKYKTTLDLSNGFWAHSITPESYWLTAFTWLGQQYCWTRLPQGFLNSPALFNADVVDLLKEVPNVQVYVDDIYISHDDPREHLEQLEKVFSLLLNAGYVVSLKKSEIAQHEVEFLGFNITKEGRGLTETFKQKLLNITPPRDLKQLQSILGLLNFARNFIPNFSELVKPLYNIIATAPGKYITWTTDNSQQLQNIISMLNSAENLEERNPEVRLIMKVNTSPSAGYIRFYNEFAKRPIMYLNYVYTKAEVKFTNTEKLLTTIHKGLIKALDLGMGQEILVYSPIVSMTKIQKTPLPERKALPIRWITWMSYLEDPRIQFHYDKTLPELQQVPTVTDDIIAKIKHPSEFSMVFYTDGSAIKHPNVNKSHNAGMGIAQVQFKPEFTVINTWSIPLGDHTAQLAEVAAVEFACKKALKIDGPVLIVTDSFYVAESVNKELPYWQSNGFFNNKKKPLKHVSKWKSIADCIQLKPDIIIIHEKGHQPTASTFHTEGNNLADKLATQGSYVVNAGKRTADGSEFEKRTADGSEFESPKKKAKVE

SEQ ID NO: 622 - protein, 2176 aa, synthetic construct
MPAAKRVKLDGGDKKYSIGLDIGTNSVGWAVITDEYKVPSKKFKVLGNTDRHSIKKNLIGALLFDSGETAEATRLKRTARRRYTRRKNRICYLQEIFSNEMAKVDDSFFHRLEESFLVEEDKKHERHPIFGNIVDEVAYHEKYPTIYHLRKKLVDSTDKADLRLIYLALAHMIKFRGHFLIEGDLNPDNSDVDKLFIQLVQTYNQLFEENPINASGVDAKAILSARLSKSRRLENLIAQLPGEKKNGLFGNLIALSLGLTPNFKSNFDLAEDAKLQLSKDTYDDDLDNLLAQIGDQYADLFLAAKNLSDAILLSDILRVNTEITKAPLSASMIKRYDEHHQDLTLLKALVRQQLPEKYKEIFFDQSKNGYAGYIDGGASQEEFYKFIKPILEKMDGTEELLVKLNREDLLRKQRTFDNGSIPHQIHLGELHAILRRQEDFYPFLKDNREKIEKILTFRIPYYVGPLARGNSRFAWMTRKSEETITPWNFEEVVDKGASAQSFIERMTNFDKNLPNEKVLPKHSLLYEYFTVYNELTKVKYVTEGMRKPAFLSGEQKKAIVDLLFKTNRKVTVKQLKEDYFKKIECFDSVEISGVEDRFNASLGTYHDLLKIIKDKDFLDNEENEDILEDIVLTLTLFEDREMIEERLKTYAHLFDDKVMKQLKRRRYTGWGRLSRKLINGIRDKQSGKTILDFLKSDGFANRNFMQLIHDDSLTFKEDIQKAQVSGQGDSLHEHIANLAGSPAIKKGILQTVKVVDELVKVMGRHKPENIVIEMARENQTTQKGQKNSRERMKRIEEGIKELGSQILKEHPVENTQLQNEKLYLYYLQNGRDMYVDQELDINRLSDYDVDHIVPQSFLKDDSIDNKVLTRSDKARGKSDNVPSEEVVKKMKNYWRQLLNAKLITQRKFDNLTKAERGGLSELDKAGFIKRQLVETRQITKHVAQILDSRMNTKYDENDKLIREVKVITLKSKLVSDFRKDFQFYKVREINNYHHAHDAYLNAVVGTALIKKYPKLESEFVYGDYKVYDVRKMIAKSEQEIGKATAKYFFYSNIMNFFKTEITLANGEIRKRPLIETNGETGEIVWDKGRDFATVRKVLSMPQVNIVKKTEVQTGGFSKESILPKRNSDKLIARKKDWDPKKYGGFDSPTVAYSVLVVAKVEKGKSKKLKSVKELLGITIMERSSFEKNPIDFLEAKGYKEVKKDLIIKLPKYSLFELENGRKRMLASAGELQKGNELALPSKYVNFLYLASHYEKLKGSPEDNEQKQLFVEQHKHYLDEIIEQISEFSKRVILADANLDKVLSAYNKHRDKPIREQAENIIHLFTLTNLGAPAAFKYFDTTIDRKRYTSTKEVLDATLIHQSITGLYETRIDLSQLGGDGGPAPGGGEAAAKGGMDPLQLLQPLEAEIKGTKLKAHWNSGATITCVPQAFLEEEVPIKNIWIKTIHGEKEQPVYYLTFKIQGRKVEAEVISSPYDYILVSPSDIPWLMKKPLQLTTLVPLQEYEERLLKQTMLTGSYKEKLQSLFLKYDALWQHWENQVGHRRIKPHHIATGTVNPRPQKQYPINPKAKASIQTVINDLLKQGVLIQQNSIMNTPVYPVPKPDGKWRMVLDYREVNKTIPLIAAQNQHSAGILSSIFRGKYKTTLDLSNGFWAHSITPESYWLTAFTWLGQQYCWTRLPQGFLNSPALFNADVVDLLKEVPNVQVYVDDIYISHDDPREHLEQLEKVFSLLLNAGYVVSLKKSEIAQHEVEFLGFNITKEGRGLTETFKQKLLNITPPRDLKQLQSILGLLNFARNFIPNFSELVKPLYNIIATAPGKYITWTTDNSQQLQNIISMLNSAENLEERNPEVRLIMKVNTSPSAGYIRFYNEFAKRPIMYLNYVYTKAEVKFTNTEKLLTTIHKGLIKALDLGMGQEILVYSPIVSMTKIQKTPLPERKALPIRWITWMSYLEDPRIQFHYDKTLPELQQVPTVTDDIIAKIKHPSEFSMVFYTDGSAIKHPNVNKSHNAGMGIAQVQFKPEFTVINTWSIPLGDHTAQLAEVAAVEFACKKALKIDGPVLIVTDSFYVAESVNKELPYWQSNGFFNNKKKPLKHVSKWKSIADCIQLKPDIIIIHEKGHQPTASTFHTEGNNLADKLATQGSYVVNAGKRTADGSEFEKRTADGSEFESPKKKAKVE

SEQ ID NO: 623 - protein, 2168 aa, synthetic construct
MPAAKRVKLDGGDKKYSIGLDIGTNSVGWAVITDEYKVPSKKFKVLGNTDRHSIKKNLIGALLFDSGETAEATRLKRTARRRYTRRKNRICYLQEIFSNEMAKVDDSFFHRLEESFLVEEDKKHERHPIFGNIVDEVAYHEKYPTIYHLRKKLVDSTDKADLRLIYLALAHMIKFRGHFLIEGDLNPDNSDVDKLFIQLVQTYNQLFEENPINASGVDAKAILSARLSKSRRLENLIAQLPGEKKNGLFGNLIALSLGLTPNFKSNFDLAEDAKLQLSKDTYDDDLDNLLAQIGDQYADLFLAAKNLSDAILLSDILRVNTEITKAPLSASMIKRYDEHHQDLTLLKALVRQQLPEKYKEIFFDQSKNGYAGYIDGGASQEEFYKFIKPILEKMDGTEELLVKLNREDLLRKQRTFDNGSIPHQIHLGELHAILRRQEDFYPFLKDNREKIEKILTFRIPYYVGPLARGNSRFAWMTRKSEETITPWNFEEVVDKGASAQSFIERMTNFDKNLPNEKVLPKHSLLYEYFTVYNELTKVKYVTEGMRKPAFLSGEQKKAIVDLLFKTNRKVTVKQLKEDYFKKIECFDSVEISGVEDRFNASLGTYHDLLKIIKDKDFLDNEENEDILEDIVLTLTLFEDREMIEERLKTYAHLFDDKVMKQLKRRRYTGWGRLSRKLINGIRDKQSGKTILDFLKSDGFANRNFMQLIHDDSLTFKEDIQKAQVSGQGDSLHEHIANLAGSPAIKKGILQTVKVVDELVKVMGRHKPENIVIEMARENQTTQKGQKNSRERMKRIEEGIKELGSQILKEHPVENTQLQNEKLYLYYLQNGRDMYVDQELDINRLSDYDVDHIVPQSFLKDDSIDNKVLTRSDKARGKSDNVPSEEVVKKMKNYWRQLLNAKLITQRKFDNLTKAERGGLSELDKAGFIKRQLVETRQITKHVAQILDSRMNTKYDENDKLIREVKVITLKSKLVSDFRKDFQFYKVREINNYHHAHDAYLNAVVGTALIKKYPKLESEFVYGDYKVYDVRKMIAKSEQEIGKATAKYFFYSNIMNFFKTEITLANGEIRKRPLIETNGETGEIVWDKGRDFATVRKVLSMPQVNIVKKTEVQTGGFSKESILPKRNSDKLIARKKDWDPKKYGGFDSPTVAYSVLVVAKVEKGKSKKLKSVKELLGITIMERSSFEKNPIDFLEAKGYKEVKKDLIIKLPKYSLFELENGRKRMLASAGELQKGNELALPSKYVNFLYLASHYEKLKGSPEDNEQKQLFVEQHKHYLDEIIEQISEFSKRVILADANLDKVLSAYNKHRDKPIREQAENIIHLFTLTNLGAPAAFKYFDTTIDRKRYTSTKEVLDATLIHQSITGLYETRIDLSQLGGDGGGGGGGMDPLQLLQPLEAEIKGTKLKAHWNSGATITCVPQAFLEEEVPIKNIWIKTIHGEKEQPVYYLTFKIQGRKVEAEVISSPYDYILVSPSDIPWLMKKPLQLTTLVPLQEYEERLLKQTMLTGSYKEKLQSLFLKYDALWQHWENQVGHRRIKPHHIATGTVNPRPQKQYPINPKAKASIQTVINDLLKQGVLIQQNSIMNTPVYPVPKPDGKWRMVLDYREVNKTIPLIAAQNQHSAGILSSIFRGKYKTTLDLSNGFWAHSITPESYWLTAFTWLGQQYCWTRLPQGFLNSPALFNADVVDLLKEVPNVQVYVDDIYISHDDPREHLEQLEKVFSLLLNAGYVVSLKKSEIAQHEVEFLGFNITKEGRGLTETFKQKLLNITPPRDLKQLQSILGLLNFARNFIPNFSELVKPLYNIIATAPGKYITWTTDNSQQLQNIISMLNSAENLEERNPEVRLIMKVNTSPSAGYIRFYNEFAKRPIMYLNYVYTKAEVKFTNTEKLLTTIHKGLIKALDLGMGQEILVYSPIVSMTKIQKTPLPERKALPIRWITWMSYLEDPRIQFHYDKTLPELQQVPTVTDDIIAKIKHPSEFSMVFYTDGSAIKHPNVNKSHNAGMGIAQVQFKPEFTVINTWSIPLGDHTAQLAEVAAVEFACKKALKIDGPVLIVTDSFYVAESVNKELPYWQSNGFFNNKKKPLKHVSKWKSIADCIQLKPDIIIIHEKGHQPTASTFHTEGNNLADKLATQGSYVVNAGKRTADGSEFEKRTADGSEFESPKKKAKVE

SEQ ID NO: 624 - protein, 2180 aa, synthetic construct
MPAAKRVKLDGGDKKYSIGLDIGTNSVGWAVITDEYKVPSKKFKVLGNTDRHSIKKNLIGALLFDSGETAEATRLKRTARRRYTRRKNRICYLQEIFSNEMAKVDDSFFHRLEESFLVEEDKKHERHPIFGNIVDEVAYHEKYPTIYHLRKKLVDSTDKADLRLIYLALAHMIKFRGHFLIEGDLNPDNSDVDKLFIQLVQTYNQLFEENPINASGVDAKAILSARLSKSRRLENLIAQLPGEKKNGLFGNLIALSLGLTPNFKSNFDLAEDAKLQLSKDTYDDDLDNLLAQIGDQYADLFLAAKNLSDAILLSDILRVNTEITKAPLSASMIKRYDEHHQDLTLLKALVRQQLPEKYKEIFFDQSKNGYAGYIDGGASQEEFYKFIKPILEKMDGTEELLVKLNREDLLRKQRTFDNGSIPHQIHLGELHAILRRQEDFYPFLKDNREKIEKILTFRIPYYVGPLARGNSRFAWMTRKSEETITPWNFEEVVDKGASAQSFIERMTNFDKNLPNEKVLPKHSLLYEYFTVYNELTKVKYVTEGMRKPAFLSGEQKKAIVDLLFKTNRKVTVKQLKEDYFKKIECFDSVEISGVEDRFNASLGTYHDLLKIIKDKDFLDNEENEDILEDIVLTLTLFEDREMIEERLKTYAHLFDDKVMKQLKRRRYTGWGRLSRKLINGIRDKQSGKTILDFLKSDGFANRNFMQLIHDDSLTFKEDIQKAQVSGQGDSLHEHIANLAGSPAIKKGILQTVKVVDELVKVMGRHKPENIVIEMARENQTTQKGQKNSRERMKRIEEGIKELGSQILKEHPVENTQLQNEKLYLYYLQNGRDMYVDQELDINRLSDYDVDHIVPQSFLKDDSIDNKVLTRSDKARGKSDNVPSEEVVKKMKNYWRQLLNAKLITQRKFDNLTKAERGGLSELDKAGFIKRQLVETRQITKHVAQILDSRMNTKYDENDKLIREVKVITLKSKLVSDFRKDFQFYKVREINNYHHAHDAYLNAVVGTALIKKYPKLESEFVYGDYKVYDVRKMIAKSEQEIGKATAKYFFYSNIMNFFKTEITLANGEIRKRPLIETNGETGEIVWDKGRDFATVRKVLSMPQVNIVKKTEVQTGGFSKESILPKRNSDKLIARKKDWDPKKYGGFDSPTVAYSVLVVAKVEKGKSKKLKSVKELLGITIMERSSFEKNPIDFLEAKGYKEVKKDLIIKLPKYSLFELENGRKRMLASAGELQKGNELALPSKYVNFLYLASHYEKLKGSPEDNEQKQLFVEQHKHYLDEIIEQISEFSKRVILADANLDKVLSAYNKHRDKPIREQAENIIHLFTLTNLGAPAAFKYFDTTIDRKRYTSTKEVLDATLIHQSITGLYETRIDLSQLGGDGGEAAAKEAAAKEAAAKGGMDPLQLLQPLEAEIKGTKLKAHWNSGATITCVPQAFLEEEVPIKNIWIKTIHGEKEQPVYYLTFKIQGRKVEAEVISSPYDYILVSPSDIPWLMKKPLQLTTLVPLQEYEERLLKQTMLTGSYKEKLQSLFLKYDALWQHWENQVGHRRIKPHHIATGTVNPRPQKQYPINPKAKASIQTVINDLLKQGVLIQQNSIMNTPVYPVPKPDGKWRMVLDYREVNKTIPLIAAQNQHSAGILSSIFRGKYKTTLDLSNGFWAHSITPESYWLTAFTWLGQQYCWTRLPQGFLNSPALFNADVVDLLKEVPNVQVYVDDIYISHDDPREHLEQLEKVFSLLLNAGYVVSLKKSEIAQHEVEFLGFNITKEGRGLTETFKQKLLNITPPRDLKQLQSILGLLNFARNFIPNFSELVKPLYNIIATAPGKYITWTTDNSQQLQNIISMLNSAENLEERNPEVRLIMKVNTSPSAGYIRFYNEFAKRPIMYLNYVYTKAEVKFTNTEKLLTTIHKGLIKALDLGMGQEILVYSPIVSMTKIQKTPLPERKALPIRWITWMSYLEDPRIQFHYDKTLPELQQVPTVTDDIIAKIKHPSEFSMVFYTDGSAIKHPNVNKSHNAGMGIAQVQFKPEFTVINTWSIPLGDHTAQLAEVAAVEFACKKALKIDGPVLIVTDSFYVAESVNKELPYWQSNGFFNNKKKPLKHVSKWKSIADCIQLKPDIIIIHEKGHQPTASTFHTEGNNLADKLATQGSYVVNAGKRTADGSEFEKRTADGSEFESPKKKAKVE

SEQ ID NO: 625 - protein, 2173 aa, synthetic construct
MPAAKRVKLDGGDKKYSIGLDIGTNSVGWAVITDEYKVPSKKFKVLGNTDRHSIKKNLIGALLFDSGETAEATRLKRTARRRYTRRKNRICYLQEIFSNEMAKVDDSFFHRLEESFLVEEDKKHERHPIFGNIVDEVAYHEKYPTIYHLRKKLVDSTDKADLRLIYLALAHMIKFRGHFLIEGDLNPDNSDVDKLFIQLVQTYNQLFEENPINASGVDAKAILSARLSKSRRLENLIAQLPGEKKNGLFGNLIALSLGLTPNFKSNFDLAEDAKLQLSKDTYDDDLDNLLAQIGDQYADLFLAAKNLSDAILLSDILRVNTEITKAPLSASMIKRYDEHHQDLTLLKALVRQQLPEKYKEIFFDQSKNGYAGYIDGGASQEEFYKFIKPILEKMDGTEELLVKLNREDLLRKQRTFDNGSIPHQIHLGELHAILRRQEDFYPFLKDNREKIEKILTFRIPYYVGPLARGNSRFAWMTRKSEETITPWNFEEVVDKGASAQSFIERMTNFDKNLPNEKVLPKHSLLYEYFTVYNELTKVKYVTEGMRKPAFLSGEQKKAIVDLLFKTNRKVTVKQLKEDYFKKIECFDSVEISGVEDRFNASLGTYHDLLKIIKDKDFLDNEENEDILEDIVLTLTLFEDREMIEERLKTYAHLFDDKVMKQLKRRRYTGWGRLSRKLINGIRDKQSGKTILDFLKSDGFANRNFMQLIHDDSLTFKEDIQKAQVSGQGDSLHEHIANLAGSPAIKKGILQTVKVVDELVKVMGRHKPENIVIEMARENQTTQKGQKNSRERMKRIEEGIKELGSQILKEHPVENTQLQNEKLYLYYLQNGRDMYVDQELDINRLSDYDVDHIVPQSFLKDDSIDNKVLTRSDKARGKSDNVPSEEVVKKMKNYWRQLLNAKLITQRKFDNLTKAERGGLSELDKAGFIKRQLVETRQITKHVAQILDSRMNTKYDENDKLIREVKVITLKSKLVSDFRKDFQFYKVREINNYHHAHDAYLNAVVGTALIKKYPKLESEFVYGDYKVYDVRKMIAKSEQEIGKATAKYFFYSNIMNFFKTEITLANGEIRKRPLIETNGETGEIVWDKGRDFATVRKVLSMPQVNIVKKTEVQTGGFSKESILPKRNSDKLIARKKDWDPKKYGGFDSPTVAYSVLVVAKVEKGKSKKLKSVKELLGITIMERSSFEKNPIDFLEAKGYKEVKKDLIIKLPKYSLFELENGRKRMLASAGELQKGNELALPSKYVNFLYLASHYEKLKGSPEDNEQKQLFVEQHKHYLDEIIEQISEFSKRVILADANLDKVLSAYNKHRDKPIREQAENIIHLFTLTNLGAPAAFKYFDTTIDRKRYTSTKEVLDATLIHQSITGLYETRIDLSQLGGDGGEAAAKGGGGGMDPLQLLQPLEAEIKGTKLKAHWNSGATITCVPQAFLEEEVPIKNIWIKTIHGEKEQPVYYLTFKIQGRKVEAEVISSPYDYILVSPSDIPWLMKKPLQLTTLVPLQEYEERLLKQTMLTGSYKEKLQSLFLKYDALWQHWENQVGHRRIKPHHIATGTVNPRPQKQYPINPKAKASIQTVINDLLKQGVLIQQNSIMNTPVYPVPKPDGKWRMVLDYREVNKTIPLIAAQNQHSAGILSSIFRGKYKTTLDLSNGFWAHSITPESYWLTAFTWLGQQYCWTRLPQGFLNSPALFNADVVDLLKEVPNVQVYVDDIYISHDDPREHLEQLEKVFSLLLNAGYVVSLKKSEIAQHEVEFLGFNITKEGRGLTETFKQKLLNITPPRDLKQLQSILGLLNFARNFIPNFSELVKPLYNIIATAPGKYITWTTDNSQQLQNIISMLNSAENLEERNPEVRLIMKVNTSPSAGYIRFYNEFAKRPIMYLNYVYTKAEVKFTNTEKLLTTIHKGLIKALDLGMGQEILVYSPIVSMTKIQKTPLPERKALPIRWITWMSYLEDPRIQFHYDKTLPELQQVPTVTDDIIAKIKHPSEFSMVFYTDGSAIKHPNVNKSHNAGMGIAQVQFKPEFTVINTWSIPLGDHTAQLAEVAAVEFACKKALKIDGPVLIVTDSFYVAESVNKELPYWQSNGFFNNKKKPLKHVSKWKSIADCIQLKPDIIIIHEKGHQPTASTFHTEGNNLADKLATQGSYVVNAGKRTADGSEFEKRTADGSEFESPKKKAKVE

SEQ ID NO: 626 - protein, 2176 aa, synthetic construct
MPAAKRVKLDGGDKKYSIGLDIGTNSVGWAVITDEYKVPSKKFKVLGNTDRHSIKKNLIGALLFDSGETAEATRLKRTARRRYTRRKNRICYLQEIFSNEMAKVDDSFFHRLEESFLVEEDKKHERHPIFGNIVDEVAYHEKYPTIYHLRKKLVDSTDKADLRLIYLALAHMIKFRGHFLIEGDLNPDNSDVDKLFIQLVQTYNQLFEENPINASGVDAKAILSARLSKSRRLENLIAQLPGEKKNGLFGNLIALSLGLTPNFKSNFDLAEDAKLQLSKDTYDDDLDNLLAQIGDQYADLFLAAKNLSDAILLSDILRVNTEITKAPLSASMIKRYDEHHQDLTLLKALVRQQLPEKYKEIFFDQSKNGYAGYIDGGASQEEFYKFIKPILEKMDGTEELLVKLNREDLLRKQRTFDNGSIPHQIHLGELHAILRRQEDFYPFLKDNREKIEKILTFRIPYYVGPLARGNSRFAWMTRKSEETITPWNFEEVVDKGASAQSFIERMTNFDKNLPNEKVLPKHSLLYEYFTVYNELTKVKYVTEGMRKPAFLSGEQKKAIVDLLFKTNRKVTVKQLKEDYFKKIECFDSVEISGVEDRFNASLGTYHDLLKIIKDKDFLDNEENEDILEDIVLTLTLFEDREMIEERLKTYAHLFDDKVMKQLKRRRYTGWGRLSRKLINGIRDKQSGKTILDFLKSDGFANRNFMQLIHDDSLTFKEDIQKAQVSGQGDSLHEHIANLAGSPAIKKGILQTVKVVDELVKVMGRHKPENIVIEMARENQTTQKGQKNSRERMKRIEEGIKELGSQILKEHPVENTQLQNEKLYLYYLQNGRDMYVDQELDINRLSDYDVDHIVPQSFLKDDSIDNKVLTRSDKARGKSDNVPSEEVVKKMKNYWRQLLNAKLITQRKFDNLTKAERGGLSELDKAGFIKRQLVETRQITKHVAQILDSRMNTKYDENDKLIREVKVITLKSKLVSDFRKDFQFYKVREINNYHHAHDAYLNAVVGTALIKKYPKLESEFVYGDYKVYDVRKMIAKSEQEIGKATAKYFFYSNIMNFFKTEITLANGEIRKRPLIETNGETGEIVWDKGRDFATVRKVLSMPQVNIVKKTEVQTGGFSKESILPKRNSDKLIARKKDWDPKKYGGFDSPTVAYSVLVVAKVEKGKSKKLKSVKELLGITIMERSSFEKNPIDFLEAKGYKEVKKDLIIKLPKYSLFELENGRKRMLASAGELQKGNELALPSKYVNFLYLASHYEKLKGSPEDNEQKQLFVEQHKHYLDEIIEQISEFSKRVILADANLDKVLSAYNKHRDKPIREQAENIIHLFTLTNLGAPAAFKYFDTTIDRKRYTSTKEVLDATLIHQSITGLYETRIDLSQLGGDGGEAAAKGGGGGSGGMDPLQLLQPLEAEIKGTKLKAHWNSGATITCVPQAFLEEEVPIKNIWIKTIHGEKEQPVYYLTFKIQGRKVEAEVISSPYDYILVSPSDIPWLMKKPLQLTTLVPLQEYEERLLKQTMLTGSYKEKLQSLFLKYDALWQHWENQVGHRRIKPHHIATGTVNPRPQKQYPINPKAKASIQTVINDLLKQGVLIQQNSIMNTPVYPVPKPDGKWRMVLDYREVNKTIPLIAAQNQHSAGILSSIFRGKYKTTLDLSNGFWAHSITPESYWLTAFTWLGQQYCWTRLPQGFLNSPALFNADVVDLLKEVPNVQVYVDDIYISHDDPREHLEQLEKVFSLLLNAGYVVSLKKSEIAQHEVEFLGFNITKEGRGLTETFKQKLLNITPPRDLKQLQSILGLLNFARNFIPNFSELVKPLYNIIATAPGKYITWTTDNSQQLQNIISMLNSAENLEERNPEVRLIMKVNTSPSAGYIRFYNEFAKRPIMYLNYVYTKAEVKFTNTEKLLTTIHKGLIKALDLGMGQEILVYSPIVSMTKIQKTPLPERKALPIRWITWMSYLEDPRIQFHYDKTLPELQQVPTVTDDIIAKIKHPSEFSMVFYTDGSAIKHPNVNKSHNAGMGIAQVQFKPEFTVINTWSIPLGDHTAQLAEVAAVEFACKKALKIDGPVLIVTDSFYVAESVNKELPYWQSNGFFNNKKKPLKHVSKWKSIADCIQLKPDIIIIHEKGHQPTASTFHTEGNNLADKLATQGSYVVNAGKRTADGSEFEKRTADGSEFESPKKKAKVE

SEQ ID NO: 627 - protein, 2177 aa, synthetic construct
MPAAKRVKLDGGDKKYSIGLDIGTNSVGWAVITDEYKVPSKKFKVLGNTDRHSIKKNLIGALLFDSGETAEATRLKRTARRRYTRRKNRICYLQEIFSNEMAKVDDSFFHRLEESFLVEEDKKHERHPIFGNIVDEVAYHEKYPTIYHLRKKLVDSTDKADLRLIYLALAHMIKFRGHFLIEGDLNPDNSDVDKLFIQLVQTYNQLFEENPINASGVDAKAILSARLSKSRRLENLIAQLPGEKKNGLFGNLIALSLGLTPNFKSNFDLAEDAKLQLSKDTYDDDLDNLLAQIGDQYADLFLAAKNLSDAILLSDILRVNTEITKAPLSASMIKRYDEHHQDLTLLKALVRQQLPEKYKEIFFDQSKNGYAGYIDGGASQEEFYKFIKPILEKMDGTEELLVKLNREDLLRKQRTFDNGSIPHQIHLGELHAILRRQEDFYPFLKDNREKIEKILTFRIPYYVGPLARGNSRFAWMTRKSEETITPWNFEEVVDKGASAQSFIERMTNFDKNLPNEKVLPKHSLLYEYFTVYNELTKVKYVTEGMRKPAFLSGEQKKAIVDLLFKTNRKVTVKQLKEDYFKKIECFDSVEISGVEDRFNASLGTYHDLLKIIKDKDFLDNEENEDILEDIVLTLTLFEDREMIEERLKTYAHLFDDKVMKQLKRRRYTGWGRLSRKLINGIRDKQSGKTILDFLKSDGFANRNFMQLIHDDSLTFKEDIQKAQVSGQGDSLHEHIANLAGSPAIKKGILQTVKVVDELVKVMGRHKPENIVIEMARENQTTQKGQKNSRERMKRIEEGIKELGSQILKEHPVENTQLQNEKLYLYYLQNGRDMYVDQELDINRLSDYDVDHIVPQSFLKDDSIDNKVLTRSDKARGKSDNVPSEEVVKKMKNYWRQLLNAKLITQRKFDNLTKAERGGLSELDKAGFIKRQLVETRQITKHVAQILDSRMNTKYDENDKLIREVKVITLKSKLVSDFRKDFQFYKVREINNYHHAHDAYLNAVVGTALIKKYPKLESEFVYGDYKVYDVRKMIAKSEQEIGKATAKYFFYSNIMNFFKTEITLANGEIRKRPLIETNGETGEIVWDKGRDFATVRKVLSMPQVNIVKKTEVQTGGFSKESILPKRNSDKLIARKKDWDPKKYGGFDSPTVAYSVLVVAKVEKGKSKKLKSVKELLGITIMERSSFEKNPIDFLEAKGYKEVKKDLIIKLPKYSLFELENGRKRMLASAGELQKGNELALPSKYVNFLYLASHYEKLKGSPEDNEQKQLFVEQHKHYLDEIIEQISEFSKRVILADANLDKVLSAYNKHRDKPIREQAENIIHLFTLTNLGAPAAFKYFDTTIDRKRYTSTKEVLDATLIHQSITGLYETRIDLSQLGGDGGGSSGSSGSSGSSGGMDPLQLLQPLEAEIKGTKLKAHWNSGATITCVPQAFLEEEVPIKNIWIKTIHGEKEQPVYYLTFKIQGRKVEAEVISSPYDYILVSPSDIPWLMKKPLQLTTLVPLQEYEERLLKQTMLTGSYKEKLQSLFLKYDALWQHWENQVGHRRIKPHHIATGTVNPRPQKQYPINPKAKASIQTVINDLLKQGVLIQQNSIMNTPVYPVPKPDGKWRMVLDYREVNKTIPLIAAQNQHSAGILSSIFRGKYKTTLDLSNGFWAHSITPESYWLTAFTWLGQQYCWTRLPQGFLNSPALFNADVVDLLKEVPNVQVYVDDIYISHDDPREHLEQLEKVFSLLLNAGYVVSLKKSEIAQHEVEFLGFNITKEGRGLTETFKQKLLNITPPRDLKQLQSILGLLNFARNFIPNFSELVKPLYNIIATAPGKYITWTTDNSQQLQNIISMLNSAENLEERNPEVRLIMKVNTSPSAGYIRFYNEFAKRPIMYLNYVYTKAEVKFTNTEKLLTTIHKGLIKALDLGMGQEILVYSPIVSMTKIQKTPLPERKALPIRWITWMSYLEDPRIQFHYDKTLPELQQVPTVTDDIIAKIKHPSEFSMVFYTDGSAIKHPNVNKSHNAGMGIAQVQFKPEFTVINTWSIPLGDHTAQLAEVAAVEFACKKALKIDGPVLIVTDSFYVAESVNKELPYWQSNGFFNNKKKPLKHVSKWKSIADCIQLKPDIIIIHEKGHQPTASTFHTEGNNLADKLATQGSYVVNAGKRTADGSEFEKRTADGSEFESPKKKAKVE

SEQ ID NO: 628 - protein, 2176 aa, synthetic construct
MPAAKRVKLDGGDKKYSIGLDIGTNSVGWAVITDEYKVPSKKFKVLGNTDRHSIKKNLIGALLFDSGETAEATRLKRTARRRYTRRKNRICYLQEIFSNEMAKVDDSFFHRLEESFLVEEDKKHERHPIFGNIVDEVAYHEKYPTIYHLRKKLVDSTDKADLRLIYLALAHMIKFRGHFLIEGDLNPDNSDVDKLFIQLVQTYNQLFEENPINASGVDAKAILSARLSKSRRLENLIAQLPGEKKNGLFGNLIALSLGLTPNFKSNFDLAEDAKLQLSKDTYDDDLDNLLAQIGDQYADLFLAAKNLSDAILLSDILRVNTEITKAPLSASMIKRYDEHHQDLTLLKALVRQQLPEKYKEIFFDQSKNGYAGYIDGGASQEEFYKFIKPILEKMDGTEELLVKLNREDLLRKQRTFDNGSIPHQIHLGELHAILRRQEDFYPFLKDNREKIEKILTFRIPYYVGPLARGNSRFAWMTRKSEETITPWNFEEVVDKGASAQSFIERMTNFDKNLPNEKVLPKHSLLYEYFTVYNELTKVKYVTEGMRKPAFLSGEQKKAIVDLLFKTNRKVTVKQLKEDYFKKIECFDSVEISGVEDRFNASLGTYHDLLKIIKDKDFLDNEENEDILEDIVLTLTLFEDREMIEERLKTYAHLFDDKVMKQLKRRRYTGWGRLSRKLINGIRDKQSGKTILDFLKSDGFANRNFMQLIHDDSLTFKEDIQKAQVSGQGDSLHEHIANLAGSPAIKKGILQTVKVVDELVKVMGRHKPENIVIEMARENQTTQKGQKNSRERMKRIEEGIKELGSQILKEHPVENTQLQNEKLYLYYLQNGRDMYVDQELDINRLSDYDVDHIVPQSFLKDDSIDNKVLTRSDKARGKSDNVPSEEVVKKMKNYWRQLLNAKLITQRKFDNLTKAERGGLSELDKAGFIKRQLVETRQITKHVAQILDSRMNTKYDENDKLIREVKVITLKSKLVSDFRKDFQFYKVREINNYHHAHDAYLNAVVGTALIKKYPKLESEFVYGDYKVYDVRKMIAKSEQEIGKATAKYFFYSNIMNFFKTEITLANGEIRKRPLIETNGETGEIVWDKGRDFATVRKVLSMPQVNIVKKTEVQTGGFSKESILPKRNSDKLIARKKDWDPKKYGGFDSPTVAYSVLVVAKVEKGKSKKLKSVKELLGITIMERSSFEKNPIDFLEAKGYKEVKKDLIIKLPKYSLFELENGRKRMLASAGELQKGNELALPSKYVNFLYLASHYEKLKGSPEDNEQKQLFVEQHKHYLDEIIEQISEFSKRVILADANLDKVLSAYNKHRDKPIREQAENIIHLFTLTNLGAPAAFKYFDTTIDRKRYTSTKEVLDATLIHQSITGLYETRIDLSQLGGDGGGSSEAAAKGGSGGMDPLQLLQPLEAEIKGTKLKAHWNSGATITCVPQAFLEEEVPIKNIWIKTIHGEKEQPVYYLTFKIQGRKVEAEVISSPYDYILVSPSDIPWLMKKPLQLTTLVPLQEYEERLLKQTMLTGSYKEKLQSLFLKYDALWQHWENQVGHRRIKPHHIATGTVNPRPQKQYPINPKAKASIQTVINDLLKQGVLIQQNSIMNTPVYPVPKPDGKWRMVLDYREVNKTIPLIAAQNQHSAGILSSIFRGKYKTTLDLSNGFWAHSITPESYWLTAFTWLGQQYCWTRLPQGFLNSPALFNADVVDLLKEVPNVQVYVDDIYISHDDPREHLEQLEKVFSLLLNAGYVVSLKKSEIAQHEVEFLGFNITKEGRGLTETFKQKLLNITPPRDLKQLQSILGLLNFARNFIPNFSELVKPLYNIIATAPGKYITWTTDNSQQLQNIISMLNSAENLEERNPEVRLIMKVNTSPSAGYIRFYNEFAKRPIMYLNYVYTKAEVKFTNTEKLLTTIHKGLIKALDLGMGQEILVYSPIVSMTKIQKTPLPERKALPIRWITWMSYLEDPRIQFHYDKTLPELQQVPTVTDDIIAKIKHPSEFSMVFYTDGSAIKHPNVNKSHNAGMGIAQVQFKPEFTVINTWSIPLGDHTAQLAEVAAVEFACKKALKIDGPVLIVTDSFYVAESVNKELPYWQSNGFFNNKKKPLKHVSKWKSIADCIQLKPDIIIIHEKGHQPTASTFHTEGNNLADKLATQGSYVVNAGKRTADGSEFEKRTADGSEFESPKKKAKVE

SEQ ID NO: 629 - protein, 2176 aa, synthetic construct
MPAAKRVKLDGGDKKYSIGLDIGTNSVGWAVITDEYKVPSKKFKVLGNTDRHSIKKNLIGALLFDSGETAEATRLKRTARRRYTRRKNRICYLQEIFSNEMAKVDDSFFHRLEESFLVEEDKKHERHPIFGNIVDEVAYHEKYPTIYHLRKKLVDSTDKADLRLIYLALAHMIKFRGHFLIEGDLNPDNSDVDKLFIQLVQTYNQLFEENPINASGVDAKAILSARLSKSRRLENLIAQLPGEKKNGLFGNLIALSLGLTPNFKSNFDLAEDAKLQLSKDTYDDDLDNLLAQIGDQYADLFLAAKNLSDAILLSDILRVNTEITKAPLSASMIKRYDEHHQDLTLLKALVRQQLPEKYKEIFFDQSKNGYAGYIDGGASQEEFYKFIKPILEKMDGTEELLVKLNREDLLRKQRTFDNGSIPHQIHLGELHAILRRQEDFYPFLKDNREKIEKILTFRIPYYVGPLARGNSRFAWMTRKSEETITPWNFEEVVDKGASAQSFIERMTNFDKNLPNEKVLPKHSLLYEYFTVYNELTKVKYVTEGMRKPAFLSGEQKKAIVDLLFKTNRKVTVKQLKEDYFKKIECFDSVEISGVEDRFNASLGTYHDLLKIIKDKDFLDNEENEDILEDIVLTLTLFEDREMIEERLKTYAHLFDDKVMKQLKRRRYTGWGRLSRKLINGIRDKQSGKTILDFLKSDGFANRNFMQLIHDDSLTFKEDIQKAQVSGQGDSLHEHIANLAGSPAIKKGILQTVKVVDELVKVMGRHKPENIVIEMARENQTTQKGQKNSRERMKRIEEGIKELGSQILKEHPVENTQLQNEKLYLYYLQNGRDMYVDQELDINRLSDYDVDHIVPQSFLKDDSIDNKVLTRSDKARGKSDNVPSEEVVKKMKNYWRQLLNAKLITQRKFDNLTKAERGGLSELDKAGFIKRQLVETRQITKHVAQILDSRMNTKYDENDKLIREVKVITLKSKLVSDFRKDFQFYKVREINNYHHAHDAYLNAVVGTALIKKYPKLESEFVYGDYKVYDVRKMIAKSEQEIGKATAKYFFYSNIMNFFKTEITLANGEIRKRPLIETNGETGEIVWDKGRDFATVRKVLSMPQVNIVKKTEVQTGGFSKESILPKRNSDKLIARKKDWDPKKYGGFDSPTVAYSVLVVAKVEKGKSKKLKSVKELLGITIMERSSFEKNPIDFLEAKGYKEVKKDLIIKLPKYSLFELENGRKRMLASAGELQKGNELALPSKYVNFLYLASHYEKLKGSPEDNEQKQLFVEQHKHYLDEIIEQISEFSKRVILADANLDKVLSAYNKHRDKPIREQAENIIHLFTLTNLGAPAAFKYFDTTIDRKRYTSTKEVLDATLIHQSITGLYETRIDLSQLGGDGGEAAAKGGSPAPGGMDPLQLLQPLEAEIKGTKLKAHWNSGATITCVPQAFLEEEVPIKNIWIKTIHGEKEQPVYYLTFKIQGRKVEAEVISSPYDYILVSPSDIPWLMKKPLQLTTLVPLQEYEERLLKQTMLTGSYKEKLQSLFLKYDALWQHWENQVGHRRIKPHHIATGTVNPRPQKQYPINPKAKASIQTVINDLLKQGVLIQQNSIMNTPVYPVPKPDGKWRMVLDYREVNKTIPLIAAQNQHSAGILSSIFRGKYKTTLDLSNGFWAHSITPESYWLTAFTWLGQQYCWTRLPQGFLNSPALFNADVVDLLKEVPNVQVYVDDIYISHDDPREHLEQLEKVFSLLLNAGYVVSLKKSEIAQHEVEFLGFNITKEGRGLTETFKQKLLNITPPRDLKQLQSILGLLNFARNFIPNFSELVKPLYNIIATAPGKYITWTTDNSQQLQNIISMLNSAENLEERNPEVRLIMKVNTSPSAGYIRFYNEFAKRPIMYLNYVYTKAEVKFTNTEKLLTTIHKGLIKALDLGMGQEILVYSPIVSMTKIQKTPLPERKALPIRWITWMSYLEDPRIQFHYDKTLPELQQVPTVTDDIIAKIKHPSEFSMVFYTDGSAIKHPNVNKSHNAGMGIAQVQFKPEFTVINTWSIPLGDHTAQLAEVAAVEFACKKALKIDGPVLIVTDSFYVAESVNKELPYWQSNGFFNNKKKPLKHVSKWKSIADCIQLKPDIIIIHEKGHQPTASTFHTEGNNLADKLATQGSYVVNAGKRTADGSEFEKRTADGSEFESPKKKAKVE

SEQ ID NO: 630 - protein, 2176 aa, synthetic construct
MPAAKRVKLDGGDKKYSIGLDIGTNSVGWAVITDEYKVPSKKFKVLGNTDRHSIKKNLIGALLFDSGETAEATRLKRTARRRYTRRKNRICYLQEIFSNEMAKVDDSFFHRLEESFLVEEDKKHERHPIFGNIVDEVAYHEKYPTIYHLRKKLVDSTDKADLRLIYLALAHMIKFRGHFLIEGDLNPDNSDVDKLFIQLVQTYNQLFEENPINASGVDAKAILSARLSKSRRLENLIAQLPGEKKNGLFGNLIALSLGLTPNFKSNFDLAEDAKLQLSKDTYDDDLDNLLAQIGDQYADLFLAAKNLSDAILLSDILRVNTEITKAPLSASMIKRYDEHHQDLTLLKALVRQQLPEKYKEIFFDQSKNGYAGYIDGGASQEEFYKFIKPILEKMDGTEELLVKLNREDLLRKQRTFDNGSIPHQIHLGELHAILRRQEDFYPFLKDNREKIEKILTFRIPYYVGPLARGNSRFAWMTRKSEETITPWNFEEVVDKGASAQSFIERMTNFDKNLPNEKVLPKHSLLYEYFTVYNELTKVKYVTEGMRKPAFLSGEQKKAIVDLLFKTNRKVTVKQLKEDYFKKIECFDSVEISGVEDRFNASLGTYHDLLKIIKDKDFLDNEENEDILEDIVLTLTLFEDREMIEERLKTYAHLFDDKVMKQLKRRRYTGWGRLSRKLINGIRDKQSGKTILDFLKSDGFANRNFMQLIHDDSLTFKEDIQKAQVSGQGDSLHEHIANLAGSPAIKKGILQTVKVVDELVKVMGRHKPENIVIEMARENQTTQKGQKNSRERMKRIEEGIKELGSQILKEHPVENTQLQNEKLYLYYLQNGRDMYVDQELDINRLSDYDVDHIVPQSFLKDDSIDNKVLTRSDKARGKSDNVPSEEVVKKMKNYWRQLLNAKLITQRKFDNLTKAERGGLSELDKAGFIKRQLVETRQITKHVAQILDSRMNTKYDENDKLIREVKVITLKSKLVSDFRKDFQFYKVREINNYHHAHDAYLNAVVGTALIKKYPKLESEFVYGDYKVYDVRKMIAKSEQEIGKATAKYFFYSNIMNFFKTEITLANGEIRKRPLIETNGETGEIVWDKGRDFATVRKVLSMPQVNIVKKTEVQTGGFSKESILPKRNSDKLIARKKDWDPKKYGGFDSPTVAYSVLVVAKVEKGKSKKLKSVKELLGITIMERSSFEKNPIDFLEAKGYKEVKKDLIIKLPKYSLFELENGRKRMLASAGELQKGNELALPSKYVNFLYLASHYEKLKGSPEDNEQKQLFVEQHKHYLDEIIEQISEFSKRVILADANLDKVLSAYNKHRDKPIREQAENIIHLFTLTNLGAPAAFKYFDTTIDRKRYTSTKEVLDATLIHQSITGLYETRIDLSQLGGDGGGGGGGSEAAAKGGMDPLQLLQPLEAEIKGTKLKAHWNSGATITCVPQAFLEEEVPIKNIWIKTIHGEKEQPVYYLTFKIQGRKVEAEVISSPYDYILVSPSDIPWLMKKPLQLTTLVPLQEYEERLLKQTMLTGSYKEKLQSLFLKYDALWQHWENQVGHRRIKPHHIATGTVNPRPQKQYPINPKAKASIQTVINDLLKQGVLIQQNSIMNTPVYPVPKPDGKWRMVLDYREVNKTIPLIAAQNQHSAGILSSIFRGKYKTTLDLSNGFWAHSITPESYWLTAFTWLGQQYCWTRLPQGFLNSPALFNADVVDLLKEVPNVQVYVDDIYISHDDPREHLEQLEKVFSLLLNAGYVVSLKKSEIAQHEVEFLGFNITKEGRGLTETFKQKLLNITPPRDLKQLQSILGLLNFARNFIPNFSELVKPLYNIIATAPGKYITWTTDNSQQLQNIISMLNSAENLEERNPEVRLIMKVNTSPSAGYIRFYNEFAKRPIMYLNYVYTKAEVKFTNTEKLLTTIHKGLIKALDLGMGQEILVYSPIVSMTKIQKTPLPERKALPIRWITWMSYLEDPRIQFHYDKTLPELQQVPTVTDDIIAKIKHPSEFSMVFYTDGSAIKHPNVNKSHNAGMGIAQVQFKPEFTVINTWSIPLGDHTAQLAEVAAVEFACKKALKIDGPVLIVTDSFYVAESVNKELPYWQSNGFFNNKKKPLKHVSKWKSIADCIQLKPDIIIIHEKGHQPTASTFHTEGNNLADKLATQGSYVVNAGKRTADGSEFEKRTADGSEFESPKKKAKVE

SEQ ID NO: 631 - protein, 2174 aa, synthetic construct
MPAAKRVKLDGGDKKYSIGLDIGTNSVGWAVITDEYKVPSKKFKVLGNTDRHSIKKNLIGALLFDSGETAEATRLKRTARRRYTRRKNRICYLQEIFSNEMAKVDDSFFHRLEESFLVEEDKKHERHPIFGNIVDEVAYHEKYPTIYHLRKKLVDSTDKADLRLIYLALAHMIKFRGHFLIEGDLNPDNSDVDKLFIQLVQTYNQLFEENPINASGVDAKAILSARLSKSRRLENLIAQLPGEKKNGLFGNLIALSLGLTPNFKSNFDLAEDAKLQLSKDTYDDDLDNLLAQIGDQYADLFLAAKNLSDAILLSDILRVNTEITKAPLSASMIKRYDEHHQDLTLLKALVRQQLPEKYKEIFFDQSKNGYAGYIDGGASQEEFYKFIKPILEKMDGTEELLVKLNREDLLRKQRTFDNGSIPHQIHLGELHAILRRQEDFYPFLKDNREKIEKILTFRIPYYVGPLARGNSRFAWMTRKSEETITPWNFEEVVDKGASAQSFIERMTNFDKNLPNEKVLPKHSLLYEYFTVYNELTKVKYVTEGMRKPAFLSGEQKKAIVDLLFKTNRKVTVKQLKEDYFKKIECFDSVEISGVEDRFNASLGTYHDLLKIIKDKDFLDNEENEDILEDIVLTLTLFEDREMIEERLKTYAHLFDDKVMKQLKRRRYTGWGRLSRKLINGIRDKQSGKTILDFLKSDGFANRNFMQLIHDDSLTFKEDIQKAQVSGQGDSLHEHIANLAGSPAIKKGILQTVKVVDELVKVMGRHKPENIVIEMARENQTTQKGQKNSRERMKRIEEGIKELGSQILKEHPVENTQLQNEKLYLYYLQNGRDMYVDQELDINRLSDYDVDHIVPQSFLKDDSIDNKVLTRSDKARGKSDNVPSEEVVKKMKNYWRQLLNAKLITQRKFDNLTKAERGGLSELDKAGFIKRQLVETRQITKHVAQILDSRMNTKYDENDKLIREVKVITLKSKLVSDFRKDFQFYKVREINNYHHAHDAYLNAVVGTALIKKYPKLESEFVYGDYKVYDVRKMIAKSEQEIGKATAKYFFYSNIMNFFKTEITLANGEIRKRPLIETNGETGEIVWDKGRDFATVRKVLSMPQVNIVKKTEVQTGGFSKESILPKRNSDKLIARKKDWDPKKYGGFDSPTVAYSVLVVAKVEKGKSKKLKSVKELLGITIMERSSFEKNPIDFLEAKGYKEVKKDLIIKLPKYSLFELENGRKRMLASAGELQKGNELALPSKYVNFLYLASHYEKLKGSPEDNEQKQLFVEQHKHYLDEIIEQISEFSKRVILADANLDKVLSAYNKHRDKPIREQAENIIHLFTLTNLGAPAAFKYFDTTIDRKRYTSTKEVLDATLIHQSITGLYETRIDLSQLGGDGGGGGGSSPAPGGMDPLQLLQPLEAEIKGTKLKAHWNSGATITCVPQAFLEEEVPIKNIWIKTIHGEKEQPVYYLTFKIQGRKVEAEVISSPYDYILVSPSDIPWLMKKPLQLTTLVPLQEYEERLLKQTMLTGSYKEKLQSLFLKYDALWQHWENQVGHRRIKPHHIATGTVNPRPQKQYPINPKAKASIQTVINDLLKQGVLIQQNSIMNTPVYPVPKPDGKWRMVLDYREVNKTIPLIAAQNQHSAGILSSIFRGKYKTTLDLSNGFWAHSITPESYWLTAFTWLGQQYCWTRLPQGFLNSPALFNADVVDLLKEVPNVQVYVDDIYISHDDPREHLEQLEKVFSLLLNAGYVVSLKKSEIAQHEVEFLGFNITKEGRGLTETFKQKLLNITPPRDLKQLQSILGLLNFARNFIPNFSELVKPLYNIIATAPGKYITWTTDNSQQLQNIISMLNSAENLEERNPEVRLIMKVNTSPSAGYIRFYNEFAKRPIMYLNYVYTKAEVKFTNTEKLLTTIHKGLIKALDLGMGQEILVYSPIVSMTKIQKTPLPERKALPIRWITWMSYLEDPRIQFHYDKTLPELQQVPTVTDDIIAKIKHPSEFSMVFYTDGSAIKHPNVNKSHNAGMGIAQVQFKPEFTVINTWSIPLGDHTAQLAEVAAVEFACKKALKIDGPVLIVTDSFYVAESVNKELPYWQSNGFFNNKKKPLKHVSKWKSIADCIQLKPDIIIIHEKGHQPTASTFHTEGNNLADKLATQGSYVVNAGKRTADGSEFEKRTADGSEFESPKKKAKVE

SEQ ID NO: 632 - protein, 2176 aa, synthetic construct
MPAAKRVKLDGGDKKYSIGLDIGTNSVGWAVITDEYKVPSKKFKVLGNTDRHSIKKNLIGALLFDSGETAEATRLKRTARRRYTRRKNRICYLQEIFSNEMAKVDDSFFHRLEESFLVEEDKKHERHPIFGNIVDEVAYHEKYPTIYHLRKKLVDSTDKADLRLIYLALAHMIKFRGHFLIEGDLNPDNSDVDKLFIQLVQTYNQLFEENPINASGVDAKAILSARLSKSRRLENLIAQLPGEKKNGLFGNLIALSLGLTPNFKSNFDLAEDAKLQLSKDTYDDDLDNLLAQIGDQYADLFLAAKNLSDAILLSDILRVNTEITKAPLSASMIKRYDEHHQDLTLLKALVRQQLPEKYKEIFFDQSKNGYAGYIDGGASQEEFYKFIKPILEKMDGTEELLVKLNREDLLRKQRTFDNGSIPHQIHLGELHAILRRQEDFYPFLKDNREKIEKILTFRIPYYVGPLARGNSRFAWMTRKSEETITPWNFEEVVDKGASAQSFIERMTNFDKNLPNEKVLPKHSLLYEYFTVYNELTKVKYVTEGMRKPAFLSGEQKKAIVDLLFKTNRKVTVKQLKEDYFKKIECFDSVEISGVEDRFNASLGTYHDLLKIIKDKDFLDNEENEDILEDIVLTLTLFEDREMIEERLKTYAHLFDDKVMKQLKRRRYTGWGRLSRKLINGIRDKQSGKTILDFLKSDGFANRNFMQLIHDDSLTFKEDIQKAQVSGQGDSLHEHIANLAGSPAIKKGILQTVKVVDELVKVMGRHKPENIVIEMARENQTTQKGQKNSRERMKRIEEGIKELGSQILKEHPVENTQLQNEKLYLYYLQNGRDMYVDQELDINRLSDYDVDHIVPQSFLKDDSIDNKVLTRSDKARGKSDNVPSEEVVKKMKNYWRQLLNAKLITQRKFDNLTKAERGGLSELDKAGFIKRQLVETRQITKHVAQILDSRMNTKYDENDKLIREVKVITLKSKLVSDFRKDFQFYKVREINNYHHAHDAYLNAVVGTALIKKYPKLESEFVYGDYKVYDVRKMIAKSEQEIGKATAKYFFYSNIMNFFKTEITLANGEIRKRPLIETNGETGEIVWDKGRDFATVRKVLSMPQVNIVKKTEVQTGGFSKESILPKRNSDKLIARKKDWDPKKYGGFDSPTVAYSVLVVAKVEKGKSKKLKSVKELLGITIMERSSFEKNPIDFLEAKGYKEVKKDLIIKLPKYSLFELENGRKRMLASAGELQKGNELALPSKYVNFLYLASHYEKLKGSPEDNEQKQLFVEQHKHYLDEIIEQISEFSKRVILADANLDKVLSAYNKHRDKPIREQAENIIHLFTLTNLGAPAAFKYFDTTIDRKRYTSTKEVLDATLIHQSITGLYETRIDLSQLGGDGGEAAAKPAPGSSGGMDPLQLLQPLEAEIKGTKLKAHWNSGATITCVPQAFLEEEVPIKNIWIKTIHGEKEQPVYYLTFKIQGRKVEAEVISSPYDYILVSPSDIPWLMKKPLQLTTLVPLQEYEERLLKQTMLTGSYKEKLQSLFLKYDALWQHWENQVGHRRIKPHHIATGTVNPRPQKQYPINPKAKASIQTVINDLLKQGVLIQQNSIMNTPVYPVPKPDGKWRMVLDYREVNKTIPLIAAQNQHSAGILSSIFRGKYKTTLDLSNGFWAHSITPESYWLTAFTWLGQQYCWTRLPQGFLNSPALFNADVVDLLKEVPNVQVYVDDIYISHDDPREHLEQLEKVFSLLLNAGYVVSLKKSEIAQHEVEFLGFNITKEGRGLTETFKQKLLNITPPRDLKQLQSILGLLNFARNFIPNFSELVKPLYNIIATAPGKYITWTTDNSQQLQNIISMLNSAENLEERNPEVRLIMKVNTSPSAGYIRFYNEFAKRPIMYLNYVYTKAEVKFTNTEKLLTTIHKGLIKALDLGMGQEILVYSPIVSMTKIQKTPLPERKALPIRWITWMSYLEDPRIQFHYDKTLPELQQVPTVTDDIIAKIKHPSEFSMVFYTDGSAIKHPNVNKSHNAGMGIAQVQFKPEFTVINTWSIPLGDHTAQLAEVAAVEFACKKALKIDGPVLIVTDSFYVAESVNKELPYWQSNGFFNNKKKPLKHVSKWKSIADCIQLKPDIIIIHEKGHQPTASTFHTEGNNLADKLATQGSYVVNAGKRTADGSEFEKRTADGSEFESPKKKAKVE

SEQ ID NO: 633 - protein, 2176 aa, synthetic construct
MPAAKRVKLDGGDKKYSIGLDIGTNSVGWAVITDEYKVPSKKFKVLGNTDRHSIKKNLIGALLFDSGETAEATRLKRTARRRYTRRKNRICYLQEIFSNEMAKVDDSFFHRLEESFLVEEDKKHERHPIFGNIVDEVAYHEKYPTIYHLRKKLVDSTDKADLRLIYLALAHMIKFRGHFLIEGDLNPDNSDVDKLFIQLVQTYNQLFEENPINASGVDAKAILSARLSKSRRLENLIAQLPGEKKNGLFGNLIALSLGLTPNFKSNFDLAEDAKLQLSKDTYDDDLDNLLAQIGDQYADLFLAAKNLSDAILLSDILRVNTEITKAPLSASMIKRYDEHHQDLTLLKALVRQQLPEKYKEIFFDQSKNGYAGYIDGGASQEEFYKFIKPILEKMDGTEELLVKLNREDLLRKQRTFDNGSIPHQIHLGELHAILRRQEDFYPFLKDNREKIEKILTFRIPYYVGPLARGNSRFAWMTRKSEETITPWNFEEVVDKGASAQSFIERMTNFDKNLPNEKVLPKHSLLYEYFTVYNELTKVKYVTEGMRKPAFLSGEQKKAIVDLLFKTNRKVTVKQLKEDYFKKIECFDSVEISGVEDRFNASLGTYHDLLKIIKDKDFLDNEENEDILEDIVLTLTLFEDREMIEERLKTYAHLFDDKVMKQLKRRRYTGWGRLSRKLINGIRDKQSGKTILDFLKSDGFANRNFMQLIHDDSLTFKEDIQKAQVSGQGDSLHEHIANLAGSPAIKKGILQTVKVVDELVKVMGRHKPENIVIEMARENQTTQKGQKNSRERMKRIEEGIKELGSQILKEHPVENTQLQNEKLYLYYLQNGRDMYVDQELDINRLSDYDVDHIVPQSFLKDDSIDNKVLTRSDKARGKSDNVPSEEVVKKMKNYWRQLLNAKLITQRKFDNLTKAERGGLSELDKAGFIKRQLVETRQITKHVAQILDSRMNTKYDENDKLIREVKVITLKSKLVSDFRKDFQFYKVREINNYHHAHDAYLNAVVGTALIKKYPKLESEFVYGDYKVYDVRKMIAKSEQEIGKATAKYFFYSNIMNFFKTEITLANGEIRKRPLIETNGETGEIVWDKGRDFATVRKVLSMPQVNIVKKTEVQTGGFSKESILPKRNSDKLIARKKDWDPKKYGGFDSPTVAYSVLVVAKVEKGKSKKLKSVKELLGITIMERSSFEKNPIDFLEAKGYKEVKKDLIIKLPKYSLFELENGRKRMLASAGELQKGNELALPSKYVNFLYLASHYEKLKGSPEDNEQKQLFVEQHKHYLDEIIEQISEFSKRVILADANLDKVLSAYNKHRDKPIREQAENIIHLFTLTNLGAPAAFKYFDTTIDRKRYTSTKEVLDATLIHQSITGLYETRIDLSQLGGDGGGGSPAPEAAAKGGMDPLQLLQPLEAEIKGTKLKAHWNSGATITCVPQAFLEEEVPIKNIWIKTIHGEKEQPVYYLTFKIQGRKVEAEVISSPYDYILVSPSDIPWLMKKPLQLTTLVPLQEYEERLLKQTMLTGSYKEKLQSLFLKYDALWQHWENQVGHRRIKPHHIATGTVNPRPQKQYPINPKAKASIQTVINDLLKQGVLIQQNSIMNTPVYPVPKPDGKWRMVLDYREVNKTIPLIAAQNQHSAGILSSIFRGKYKTTLDLSNGFWAHSITPESYWLTAFTWLGQQYCWTRLPQGFLNSPALFNADVVDLLKEVPNVQVYVDDIYISHDDPREHLEQLEKVFSLLLNAGYVVSLKKSEIAQHEVEFLGFNITKEGRGLTETFKQKLLNITPPRDLKQLQSILGLLNFARNFIPNFSELVKPLYNIIATAPGKYITWTTDNSQQLQNIISMLNSAENLEERNPEVRLIMKVNTSPSAGYIRFYNEFAKRPIMYLNYVYTKAEVKFTNTEKLLTTIHKGLIKALDLGMGQEILVYSPIVSMTKIQKTPLPERKALPIRWITWMSYLEDPRIQFHYDKTLPELQQVPTVTDDIIAKIKHPSEFSMVFYTDGSAIKHPNVNKSHNAGMGIAQVQFKPEFTVINTWSIPLGDHTAQLAEVAAVEFACKKALKIDGPVLIVTDSFYVAESVNKELPYWQSNGFFNNKKKPLKHVSKWKSIADCIQLKPDIIIIHEKGHQPTASTFHTEGNNLADKLATQGSYVVNAGKRTADGSEFEKRTADGSEFESPKKKAKVE

SEQ ID NO: 634 - protein, 2174 aa, synthetic construct
MPAAKRVKLDGGDKKYSIGLDIGTNSVGWAVITDEYKVPSKKFKVLGNTDRHSIKKNLIGALLFDSGETAEATRLKRTARRRYTRRKNRICYLQEIFSNEMAKVDDSFFHRLEESFLVEEDKKHERHPIFGNIVDEVAYHEKYPTIYHLRKKLVDSTDKADLRLIYLALAHMIKFRGHFLIEGDLNPDNSDVDKLFIQLVQTYNQLFEENPINASGVDAKAILSARLSKSRRLENLIAQLPGEKKNGLFGNLIALSLGLTPNFKSNFDLAEDAKLQLSKDTYDDDLDNLLAQIGDQYADLFLAAKNLSDAILLSDILRVNTEITKAPLSASMIKRYDEHHQDLTLLKALVRQQLPEKYKEIFFDQSKNGYAGYIDGGASQEEFYKFIKPILEKMDGTEELLVKLNREDLLRKQRTFDNGSIPHQIHLGELHAILRRQEDFYPFLKDNREKIEKILTFRIPYYVGPLARGNSRFAWMTRKSEETITPWNFEEVVDKGASAQSFIERMTNFDKNLPNEKVLPKHSLLYEYFTVYNELTKVKYVTEGMRKPAFLSGEQKKAIVDLLFKTNRKVTVKQLKEDYFKKIECFDSVEISGVEDRFNASLGTYHDLLKIIKDKDFLDNEENEDILEDIVLTLTLFEDREMIEERLKTYAHLFDDKVMKQLKRRRYTGWGRLSRKLINGIRDKQSGKTILDFLKSDGFANRNFMQLIHDDSLTFKEDIQKAQVSGQGDSLHEHIANLAGSPAIKKGILQTVKVVDELVKVMGRHKPENIVIEMARENQTTQKGQKNSRERMKRIEEGIKELGSQILKEHPVENTQLQNEKLYLYYLQNGRDMYVDQELDINRLSDYDVDHIVPQSFLKDDSIDNKVLTRSDKARGKSDNVPSEEVVKKMKNYWRQLLNAKLITQRKFDNLTKAERGGLSELDKAGFIKRQLVETRQITKHVAQILDSRMNTKYDENDKLIREVKVITLKSKLVSDFRKDFQFYKVREINNYHHAHDAYLNAVVGTALIKKYPKLESEFVYGDYKVYDVRKMIAKSEQEIGKATAKYFFYSNIMNFFKTEITLANGEIRKRPLIETNGETGEIVWDKGRDFATVRKVLSMPQVNIVKKTEVQTGGFSKESILPKRNSDKLIARKKDWDPKKYGGFDSPTVAYSVLVVAKVEKGKSKKLKSVKELLGITIMERSSFEKNPIDFLEAKGYKEVKKDLIIKLPKYSLFELENGRKRMLASAGELQKGNELALPSKYVNFLYLASHYEKLKGSPEDNEQKQLFVEQHKHYLDEIIEQISEFSKRVILADANLDKVLSAYNKHRDKPIREQAENIIHLFTLTNLGAPAAFKYFDTTIDRKRYTSTKEVLDATLIHQSITGLYETRIDLSQLGGDGGGGGPAPGSSGGMDPLQLLQPLEAEIKGTKLKAHWNSGATITCVPQAFLEEEVPIKNIWIKTIHGEKEQPVYYLTFKIQGRKVEAEVISSPYDYILVSPSDIPWLMKKPLQLTTLVPLQEYEERLLKQTMLTGSYKEKLQSLFLKYDALWQHWENQVGHRRIKPHHIATGTVNPRPQKQYPINPKAKASIQTVINDLLKQGVLIQQNSIMNTPVYPVPKPDGKWRMVLDYREVNKTIPLIAAQNQHSAGILSSIFRGKYKTTLDLSNGFWAHSITPESYWLTAFTWLGQQYCWTRLPQGFLNSPALFNADVVDLLKEVPNVQVYVDDIYISHDDPREHLEQLEKVFSLLLNAGYVVSLKKSEIAQHEVEFLGFNITKEGRGLTETFKQKLLNITPPRDLKQLQSILGLLNFARNFIPNFSELVKPLYNIIATAPGKYITWTTDNSQQLQNIISMLNSAENLEERNPEVRLIMKVNTSPSAGYIRFYNEFAKRPIMYLNYVYTKAEVKFTNTEKLLTTIHKGLIKALDLGMGQEILVYSPIVSMTKIQKTPLPERKALPIRWITWMSYLEDPRIQFHYDKTLPELQQVPTVTDDIIAKIKHPSEFSMVFYTDGSAIKHPNVNKSHNAGMGIAQVQFKPEFTVINTWSIPLGDHTAQLAEVAAVEFACKKALKIDGPVLIVTDSFYVAESVNKELPYWQSNGFFNNKKKPLKHVSKWKSIADCIQLKPDIIIIHEKGHQPTASTFHTEGNNLADKLATQGSYVVNAGKRTADGSEFEKRTADGSEFESPKKKAKVE

SEQ ID NO: 635 - protein, 2174 aa, synthetic construct
MPAAKRVKLDGGDKKYSIGLDIGTNSVGWAVITDEYKVPSKKFKVLGNTDRHSIKKNLIGALLFDSGETAEATRLKRTARRRYTRRKNRICYLQEIFSNEMAKVDDSFFHRLEESFLVEEDKKHERHPIFGNIVDEVAYHEKYPTIYHLRKKLVDSTDKADLRLIYLALAHMIKFRGHFLIEGDLNPDNSDVDKLFIQLVQTYNQLFEENPINASGVDAKAILSARLSKSRRLENLIAQLPGEKKNGLFGNLIALSLGLTPNFKSNFDLAEDAKLQLSKDTYDDDLDNLLAQIGDQYADLFLAAKNLSDAILLSDILRVNTEITKAPLSASMIKRYDEHHQDLTLLKALVRQQLPEKYKEIFFDQSKNGYAGYIDGGASQEEFYKFIKPILEKMDGTEELLVKLNREDLLRKQRTFDNGSIPHQIHLGELHAILRRQEDFYPFLKDNREKIEKILTFRIPYYVGPLARGNSRFAWMTRKSEETITPWNFEEVVDKGASAQSFIERMTNFDKNLPNEKVLPKHSLLYEYFTVYNELTKVKYVTEGMRKPAFLSGEQKKAIVDLLFKTNRKVTVKQLKEDYFKKIECFDSVEISGVEDRFNASLGTYHDLLKIIKDKDFLDNEENEDILEDIVLTLTLFEDREMIEERLKTYAHLFDDKVMKQLKRRRYTGWGRLSRKLINGIRDKQSGKTILDFLKSDGFANRNFMQLIHDDSLTFKEDIQKAQVSGQGDSLHEHIANLAGSPAIKKGILQTVKVVDELVKVMGRHKPENIVIEMARENQTTQKGQKNSRERMKRIEEGIKELGSQILKEHPVENTQLQNEKLYLYYLQNGRDMYVDQELDINRLSDYDVDHIVPQSFLKDDSIDNKVLTRSDKARGKSDNVPSEEVVKKMKNYWRQLLNAKLITQRKFDNLTKAERGGLSELDKAGFIKRQLVETRQITKHVAQILDSRMNTKYDENDKLIREVKVITLKSKLVSDFRKDFQFYKVREINNYHHAHDAYLNAVVGTALIKKYPKLESEFVYGDYKVYDVRKMIAKSEQEIGKATAKYFFYSNIMNFFKTEITLANGEIRKRPLIETNGETGEIVWDKGRDFATVRKVLSMPQVNIVKKTEVQTGGFSKESILPKRNSDKLIARKKDWDPKKYGGFDSPTVAYSVLVVAKVEKGKSKKLKSVKELLGITIMERSSFEKNPIDFLEAKGYKEVKKDLIIKLPKYSLFELENGRKRMLASAGELQKGNELALPSKYVNFLYLASHYEKLKGSPEDNEQKQLFVEQHKHYLDEIIEQISEFSKRVILADANLDKVLSAYNKHRDKPIREQAENIIHLFTLTNLGAPAAFKYFDTTIDRKRYTSTKEVLDATLIHQSITGLYETRIDLSQLGGDGGGGSGSSPAPGGMDPLQLLQPLEAEIKGTKLKAHWNSGATITCVPQAFLEEEVPIKNIWIKTIHGEKEQPVYYLTFKIQGRKVEAEVISSPYDYILVSPSDIPWLMKKPLQLTTLVPLQEYEERLLKQTMLTGSYKEKLQSLFLKYDALWQHWENQVGHRRIKPHHIATGTVNPRPQKQYPINPKAKASIQTVINDLLKQGVLIQQNSIMNTPVYPVPKPDGKWRMVLDYREVNKTIPLIAAQNQHSAGILSSIFRGKYKTTLDLSNGFWAHSITPESYWLTAFTWLGQQYCWTRLPQGFLNSPALFNADVVDLLKEVPNVQVYVDDIYISHDDPREHLEQLEKVFSLLLNAGYVVSLKKSEIAQHEVEFLGFNITKEGRGLTETFKQKLLNITPPRDLKQLQSILGLLNFARNFIPNFSELVKPLYNIIATAPGKYITWTTDNSQQLQNIISMLNSAENLEERNPEVRLIMKVNTSPSAGYIRFYNEFAKRPIMYLNYVYTKAEVKFTNTEKLLTTIHKGLIKALDLGMGQEILVYSPIVSMTKIQKTPLPERKALPIRWITWMSYLEDPRIQFHYDKTLPELQQVPTVTDDIIAKIKHPSEFSMVFYTDGSAIKHPNVNKSHNAGMGIAQVQFKPEFTVINTWSIPLGDHTAQLAEVAAVEFACKKALKIDGPVLIVTDSFYVAESVNKELPYWQSNGFFNNKKKPLKHVSKWKSIADCIQLKPDIIIIHEKGHQPTASTFHTEGNNLADKLATQGSYVVNAGKRTADGSEFEKRTADGSEFESPKKKAKVE

SEQ ID NO: 636 - protein, 2176 aa, synthetic construct
MPAAKRVKLDGGDKKYSIGLDIGTNSVGWAVITDEYKVPSKKFKVLGNTDRHSIKKNLIGALLFDSGETAEATRLKRTARRRYTRRKNRICYLQEIFSNEMAKVDDSFFHRLEESFLVEEDKKHERHPIFGNIVDEVAYHEKYPTIYHLRKKLVDSTDKADLRLIYLALAHMIKFRGHFLIEGDLNPDNSDVDKLFIQLVQTYNQLFEENPINASGVDAKAILSARLSKSRRLENLIAQLPGEKKNGLFGNLIALSLGLTPNFKSNFDLAEDAKLQLSKDTYDDDLDNLLAQIGDQYADLFLAAKNLSDAILLSDILRVNTEITKAPLSASMIKRYDEHHQDLTLLKALVRQQLPEKYKEIFFDQSKNGYAGYIDGGASQEEFYKFIKPILEKMDGTEELLVKLNREDLLRKQRTFDNGSIPHQIHLGELHAILRRQEDFYPFLKDNREKIEKILTFRIPYYVGPLARGNSRFAWMTRKSEETITPWNFEEVVDKGASAQSFIERMTNFDKNLPNEKVLPKHSLLYEYFTVYNELTKVKYVTEGMRKPAFLSGEQKKAIVDLLFKTNRKVTVKQLKEDYFKKIECFDSVEISGVEDRFNASLGTYHDLLKIIKDKDFLDNEENEDILEDIVLTLTLFEDREMIEERLKTYAHLFDDKVMKQLKRRRYTGWGRLSRKLINGIRDKQSGKTILDFLKSDGFANRNFMQLIHDDSLTFKEDIQKAQVSGQGDSLHEHIANLAGSPAIKKGILQTVKVVDELVKVMGRHKPENIVIEMARENQTTQKGQKNSRERMKRIEEGIKELGSQILKEHPVENTQLQNEKLYLYYLQNGRDMYVDQELDINRLSDYDVDHIVPQSFLKDDSIDNKVLTRSDKARGKSDNVPSEEVVKKMKNYWRQLLNAKLITQRKFDNLTKAERGGLSELDKAGFIKRQLVETRQITKHVAQILDSRMNTKYDENDKLIREVKVITLKSKLVSDFRKDFQFYKVREINNYHHAHDAYLNAVVGTALIKKYPKLESEFVYGDYKVYDVRKMIAKSEQEIGKATAKYFFYSNIMNFFKTEITLANGEIRKRPLIETNGETGEIVWDKGRDFATVRKVLSMPQVNIVKKTEVQTGGFSKESILPKRNSDKLIARKKDWDPKKYGGFDSPTVAYSVLVVAKVEKGKSKKLKSVKELLGITIMERSSFEKNPIDFLEAKGYKEVKKDLIIKLPKYSLFELENGRKRMLASAGELQKGNELALPSKYVNFLYLASHYEKLKGSPEDNEQKQLFVEQHKHYLDEIIEQISEFSKRVILADANLDKVLSAYNKHRDKPIREQAENIIHLFTLTNLGAPAAFKYFDTTIDRKRYTSTKEVLDATLIHQSITGLYETRIDLSQLGGDGGEAAAKGGGPAPGGMDPLQLLQPLEAEIKGTKLKAHWNSGATITCVPQAFLEEEVPIKNIWIKTIHGEKEQPVYYLTFKIQGRKVEAEVISSPYDYILVSPSDIPWLMKKPLQLTTLVPLQEYEERLLKQTMLTGSYKEKLQSLFLKYDALWQHWENQVGHRRIKPHHIATGTVNPRPQKQYPINPKAKASIQTVINDLLKQGVLIQQNSIMNTPVYPVPKPDGKWRMVLDYREVNKTIPLIAAQNQHSAGILSSIFRGKYKTTLDLSNGFWAHSITPESYWLTAFTWLGQQYCWTRLPQGFLNSPALFNADVVDLLKEVPNVQVYVDDIYISHDDPREHLEQLEKVFSLLLNAGYVVSLKKSEIAQHEVEFLGFNITKEGRGLTETFKQKLLNITPPRDLKQLQSILGLLNFARNFIPNFSELVKPLYNIIATAPGKYITWTTDNSQQLQNIISMLNSAENLEERNPEVRLIMKVNTSPSAGYIRFYNEFAKRPIMYLNYVYTKAEVKFTNTEKLLTTIHKGLIKALDLGMGQEILVYSPIVSMTKIQKTPLPERKALPIRWITWMSYLEDPRIQFHYDKTLPELQQVPTVTDDIIAKIKHPSEFSMVFYTDGSAIKHPNVNKSHNAGMGIAQVQFKPEFTVINTWSIPLGDHTAQLAEVAAVEFACKKALKIDGPVLIVTDSFYVAESVNKELPYWQSNGFFNNKKKPLKHVSKWKSIADCIQLKPDIIIIHEKGHQPTASTFHTEGNNLADKLATQGSYVVNAGKRTADGSEFEKRTADGSEFESPKKKAKVE

SEQ ID NO: 637 - protein, 2180 aa, synthetic construct
MPAAKRVKLDGGDKKYSIGLDIGTNSVGWAVITDEYKVPSKKFKVLGNTDRHSIKKNLIGALLFDSGETAEATRLKRTARRRYTRRKNRICYLQEIFSNEMAKVDDSFFHRLEESFLVEEDKKHERHPIFGNIVDEVAYHEKYPTIYHLRKKLVDSTDKADLRLIYLALAHMIKFRGHFLIEGDLNPDNSDVDKLFIQLVQTYNQLFEENPINASGVDAKAILSARLSKSRRLENLIAQLPGEKKNGLFGNLIALSLGLTPNFKSNFDLAEDAKLQLSKDTYDDDLDNLLAQIGDQYADLFLAAKNLSDAILLSDILRVNTEITKAPLSASMIKRYDEHHQDLTLLKALVRQQLPEKYKEIFFDQSKNGYAGYIDGGASQEEFYKFIKPILEKMDGTEELLVKLNREDLLRKQRTFDNGSIPHQIHLGELHAILRRQEDFYPFLKDNREKIEKILTFRIPYYVGPLARGNSRFAWMTRKSEETITPWNFEEVVDKGASAQSFIERMTNFDKNLPNEKVLPKHSLLYEYFTVYNELTKVKYVTEGMRKPAFLSGEQKKAIVDLLFKTNRKVTVKQLKEDYFKKIECFDSVEISGVEDRFNASLGTYHDLLKIIKDKDFLDNEENEDILEDIVLTLTLFEDREMIEERLKTYAHLFDDKVMKQLKRRRYTGWGRLSRKLINGIRDKQSGKTILDFLKSDGFANRNFMQLIHDDSLTFKEDIQKAQVSGQGDSLHEHIANLAGSPAIKKGILQTVKVVDELVKVMGRHKPENIVIEMARENQTTQKGQKNSRERMKRIEEGIKELGSQILKEHPVENTQLQNEKLYLYYLQNGRDMYVDQELDINRLSDYDVDHIVPQSFLKDDSIDNKVLTRSDKARGKSDNVPSEEVVKKMKNYWRQLLNAKLITQRKFDNLTKAERGGLSELDKAGFIKRQLVETRQITKHVAQILDSRMNTKYDENDKLIREVKVITLKSKLVSDFRKDFQFYKVREINNYHHAHDAYLNAVVGTALIKKYPKLESEFVYGDYKVYDVRKMIAKSEQEIGKATAKYFFYSNIMNFFKTEITLANGEIRKRPLIETNGETGEIVWDKGRDFATVRKVLSMPQVNIVKKTEVQTGGFSKESILPKRNSDKLIARKKDWDPKKYGGFDSPTVAYSVLVVAKVEKGKSKKLKSVKELLGITIMERSSFEKNPIDFLEAKGYKEVKKDLIIKLPKYSLFELENGRKRMLASAGELQKGNELALPSKYVNFLYLASHYEKLKGSPEDNEQKQLFVEQHKHYLDEIIEQISEFSKRVILADANLDKVLSAYNKHRDKPIREQAENIIHLFTLTNLGAPAAFKYFDTTIDRKRYTSTKEVLDATLIHQSITGLYETRIDLSQLGGDGGGSSGSSGSSGSSGSSGGMDPLQLLQPLEAEIKGTKLKAHWNSGATITCVPQAFLEEEVPIKNIWIKTIHGEKEQPVYYLTFKIQGRKVEAEVISSPYDYILVSPSDIPWLMKKPLQLTTLVPLQEYEERLLKQTMLTGSYKEKLQSLFLKYDALWQHWENQVGHRRIKPHHIATGTVNPRPQKQYPINPKAKASIQTVINDLLKQGVLIQQNSIMNTPVYPVPKPDGKWRMVLDYREVNKTIPLIAAQNQHSAGILSSIFRGKYKTTLDLSNGFWAHSITPESYWLTAFTWLGQQYCWTRLPQGFLNSPALFNADVVDLLKEVPNVQVYVDDIYISHDDPREHLEQLEKVFSLLLNAGYVVSLKKSEIAQHEVEFLGFNITKEGRGLTETFKQKLLNITPPRDLKQLQSILGLLNFARNFIPNFSELVKPLYNIIATAPGKYITWTTDNSQQLQNIISMLNSAENLEERNPEVRLIMKVNTSPSAGYIRFYNEFAKRPIMYLNYVYTKAEVKFTNTEKLLTTIHKGLIKALDLGMGQEILVYSPIVSMTKIQKTPLPERKALPIRWITWMSYLEDPRIQFHYDKTLPELQQVPTVTDDIIAKIKHPSEFSMVFYTDGSAIKHPNVNKSHNAGMGIAQVQFKPEFTVINTWSIPLGDHTAQLAEVAAVEFACKKALKIDGPVLIVTDSFYVAESVNKELPYWQSNGFFNNKKKPLKHVSKWKSIADCIQLKPDIIIIHEKGHQPTASTFHTEGNNLADKLATQGSYVVNAGKRTADGSEFEKRTADGSEFESPKKKAKVE

SEQ ID NO: 638 - protein, 2173 aa, synthetic construct
MPAAKRVKLDGGDKKYSIGLDIGTNSVGWAVITDEYKVPSKKFKVLGNTDRHSIKKNLIGALLFDSGETAEATRLKRTARRRYTRRKNRICYLQEIFSNEMAKVDDSFFHRLEESFLVEEDKKHERHPIFGNIVDEVAYHEKYPTIYHLRKKLVDSTDKADLRLIYLALAHMIKFRGHFLIEGDLNPDNSDVDKLFIQLVQTYNQLFEENPINASGVDAKAILSARLSKSRRLENLIAQLPGEKKNGLFGNLIALSLGLTPNFKSNFDLAEDAKLQLSKDTYDDDLDNLLAQIGDQYADLFLAAKNLSDAILLSDILRVNTEITKAPLSASMIKRYDEHHQDLTLLKALVRQQLPEKYKEIFFDQSKNGYAGYIDGGASQEEFYKFIKPILEKMDGTEELLVKLNREDLLRKQRTFDNGSIPHQIHLGELHAILRRQEDFYPFLKDNREKIEKILTFRIPYYVGPLARGNSRFAWMTRKSEETITPWNFEEVVDKGASAQSFIERMTNFDKNLPNEKVLPKHSLLYEYFTVYNELTKVKYVTEGMRKPAFLSGEQKKAIVDLLFKTNRKVTVKQLKEDYFKKIECFDSVEISGVEDRFNASLGTYHDLLKIIKDKDFLDNEENEDILEDIVLTLTLFEDREMIEERLKTYAHLFDDKVMKQLKRRRYTGWGRLSRKLINGIRDKQSGKTILDFLKSDGFANRNFMQLIHDDSLTFKEDIQKAQVSGQGDSLHEHIANLAGSPAIKKGILQTVKVVDELVKVMGRHKPENIVIEMARENQTTQKGQKNSRERMKRIEEGIKELGSQILKEHPVENTQLQNEKLYLYYLQNGRDMYVDQELDINRLSDYDVDHIVPQSFLKDDSIDNKVLTRSDKARGKSDNVPSEEVVKKMKNYWRQLLNAKLITQRKFDNLTKAERGGLSELDKAGFIKRQLVETRQITKHVAQILDSRMNTKYDENDKLIREVKVITLKSKLVSDFRKDFQFYKVREINNYHHAHDAYLNAVVGTALIKKYPKLESEFVYGDYKVYDVRKMIAKSEQEIGKATAKYFFYSNIMNFFKTEITLANGEIRKRPLIETNGETGEIVWDKGRDFATVRKVLSMPQVNIVKKTEVQTGGFSKESILPKRNSDKLIARKKDWDPKKYGGFDSPTVAYSVLVVAKVEKGKSKKLKSVKELLGITIMERSSFEKNPIDFLEAKGYKEVKKDLIIKLPKYSLFELENGRKRMLASAGELQKGNELALPSKYVNFLYLASHYEKLKGSPEDNEQKQLFVEQHKHYLDEIIEQISEFSKRVILADANLDKVLSAYNKHRDKPIREQAENIIHLFTLTNLGAPAAFKYFDTTIDRKRYTSTKEVLDATLIHQSITGLYETRIDLSQLGGDGGEAAAKGSSGGMDPLQLLQPLEAEIKGTKLKAHWNSGATITCVPQAFLEEEVPIKNIWIKTIHGEKEQPVYYLTFKIQGRKVEAEVISSPYDYILVSPSDIPWLMKKPLQLTTLVPLQEYEERLLKQTMLTGSYKEKLQSLFLKYDALWQHWENQVGHRRIKPHHIATGTVNPRPQKQYPINPKAKASIQTVINDLLKQGVLIQQNSIMNTPVYPVPKPDGKWRMVLDYREVNKTIPLIAAQNQHSAGILSSIFRGKYKTTLDLSNGFWAHSITPESYWLTAFTWLGQQYCWTRLPQGFLNSPALFNADVVDLLKEVPNVQVYVDDIYISHDDPREHLEQLEKVFSLLLNAGYVVSLKKSEIAQHEVEFLGFNITKEGRGLTETFKQKLLNITPPRDLKQLQSILGLLNFARNFIPNFSELVKPLYNIIATAPGKYITWTTDNSQQLQNIISMLNSAENLEERNPEVRLIMKVNTSPSAGYIRFYNEFAKRPIMYLNYVYTKAEVKFTNTEKLLTTIHKGLIKALDLGMGQEILVYSPIVSMTKIQKTPLPERKALPIRWITWMSYLEDPRIQFHYDKTLPELQQVPTVTDDIIAKIKHPSEFSMVFYTDGSAIKHPNVNKSHNAGMGIAQVQFKPEFTVINTWSIPLGDHTAQLAEVAAVEFACKKALKIDGPVLIVTDSFYVAESVNKELPYWQSNGFFNNKKKPLKHVSKWKSIADCIQLKPDIIIIHEKGHQPTASTFHTEGNNLADKLATQGSYVVNAGKRTADGSEFEKRTADGSEFESPKKKAKVE

SEQ ID NO: 639 - protein, 2172 aa, synthetic construct
MPAAKRVKLDGGDKKYSIGLDIGTNSVGWAVITDEYKVPSKKFKVLGNTDRHSIKKNLIGALLFDSGETAEATRLKRTARRRYTRRKNRICYLQEIFSNEMAKVDDSFFHRLEESFLVEEDKKHERHPIFGNIVDEVAYHEKYPTIYHLRKKLVDSTDKADLRLIYLALAHMIKFRGHFLIEGDLNPDNSDVDKLFIQLVQTYNQLFEENPINASGVDAKAILSARLSKSRRLENLIAQLPGEKKNGLFGNLIALSLGLTPNFKSNFDLAEDAKLQLSKDTYDDDLDNLLAQIGDQYADLFLAAKNLSDAILLSDILRVNTEITKAPLSASMIKRYDEHHQDLTLLKALVRQQLPEKYKEIFFDQSKNGYAGYIDGGASQEEFYKFIKPILEKMDGTEELLVKLNREDLLRKQRTFDNGSIPHQIHLGELHAILRRQEDFYPFLKDNREKIEKILTFRIPYYVGPLARGNSRFAWMTRKSEETITPWNFEEVVDKGASAQSFIERMTNFDKNLPNEKVLPKHSLLYEYFTVYNELTKVKYVTEGMRKPAFLSGEQKKAIVDLLFKTNRKVTVKQLKEDYFKKIECFDSVEISGVEDRFNASLGTYHDLLKIIKDKDFLDNEENEDILEDIVLTLTLFEDREMIEERLKTYAHLFDDKVMKQLKRRRYTGWGRLSRKLINGIRDKQSGKTILDFLKSDGFANRNFMQLIHDDSLTFKEDIQKAQVSGQGDSLHEHIANLAGSPAIKKGILQTVKVVDELVKVMGRHKPENIVIEMARENQTTQKGQKNSRERMKRIEEGIKELGSQILKEHPVENTQLQNEKLYLYYLQNGRDMYVDQELDINRLSDYDVDHIVPQSFLKDDSIDNKVLTRSDKARGKSDNVPSEEVVKKMKNYWRQLLNAKLITQRKFDNLTKAERGGLSELDKAGFIKRQLVETRQITKHVAQILDSRMNTKYDENDKLIREVKVITLKSKLVSDFRKDFQFYKVREINNYHHAHDAYLNAVVGTALIKKYPKLESEFVYGDYKVYDVRKMIAKSEQEIGKATAKYFFYSNIMNFFKTEITLANGEIRKRPLIETNGETGEIVWDKGRDFATVRKVLSMPQVNIVKKTEVQTGGFSKESILPKRNSDKLIARKKDWDPKKYGGFDSPTVAYSVLVVAKVEKGKSKKLKSVKELLGITIMERSSFEKNPIDFLEAKGYKEVKKDLIIKLPKYSLFELENGRKRMLASAGELQKGNELALPSKYVNFLYLASHYEKLKGSPEDNEQKQLFVEQHKHYLDEIIEQISEFSKRVILADANLDKVLSAYNKHRDKPIREQAENIIHLFTLTNLGAPAAFKYFDTTIDRKRYTSTKEVLDATLIHQSITGLYETRIDLSQLGGDGGGGGGGGGGGMDPLQLLQPLEAEIKGTKLKAHWNSGATITCVPQAFLEEEVPIKNIWIKTIHGEKEQPVYYLTFKIQGRKVEAEVISSPYDYILVSPSDIPWLMKKPLQLTTLVPLQEYEERLLKQTMLTGSYKEKLQSLFLKYDALWQHWENQVGHRRIKPHHIATGTVNPRPQKQYPINPKAKASIQTVINDLLKQGVLIQQNSIMNTPVYPVPKPDGKWRMVLDYREVNKTIPLIAAQNQHSAGILSSIFRGKYKTTLDLSNGFWAHSITPESYWLTAFTWLGQQYCWTRLPQGFLNSPALFNADVVDLLKEVPNVQVYVDDIYISHDDPREHLEQLEKVFSLLLNAGYVVSLKKSEIAQHEVEFLGFNITKEGRGLTETFKQKLLNITPPRDLKQLQSILGLLNFARNFIPNFSELVKPLYNIIATAPGKYITWTTDNSQQLQNIISMLNSAENLEERNPEVRLIMKVNTSPSAGYIRFYNEFAKRPIMYLNYVYTKAEVKFTNTEKLLTTIHKGLIKALDLGMGQEILVYSPIVSMTKIQKTPLPERKALPIRWITWMSYLEDPRIQFHYDKTLPELQQVPTVTDDIIAKIKHPSEFSMVFYTDGSAIKHPNVNKSHNAGMGIAQVQFKPEFTVINTWSIPLGDHTAQLAEVAAVEFACKKALKIDGPVLIVTDSFYVAESVNKELPYWQSNGFFNNKKKPLKHVSKWKSIADCIQLKPDIIIIHEKGHQPTASTFHTEGNNLADKLATQGSYVVNAGKRTADGSEFEKRTADGSEFESPKKKAKVE

SEQ ID NO: 640 - protein, 2176 aa, synthetic construct
MPAAKRVKLDGGDKKYSIGLDIGTNSVGWAVITDEYKVPSKKFKVLGNTDRHSIKKNLIGALLFDSGETAEATRLKRTARRRYTRRKNRICYLQEIFSNEMAKVDDSFFHRLEESFLVEEDKKHERHPIFGNIVDEVAYHEKYPTIYHLRKKLVDSTDKADLRLIYLALAHMIKFRGHFLIEGDLNPDNSDVDKLFIQLVQTYNQLFEENPINASGVDAKAILSARLSKSRRLENLIAQLPGEKKNGLFGNLIALSLGLTPNFKSNFDLAEDAKLQLSKDTYDDDLDNLLAQIGDQYADLFLAAKNLSDAILLSDILRVNTEITKAPLSASMIKRYDEHHQDLTLLKALVRQQLPEKYKEIFFDQSKNGYAGYIDGGASQEEFYKFIKPILEKMDGTEELLVKLNREDLLRKQRTFDNGSIPHQIHLGELHAILRRQEDFYPFLKDNREKIEKILTFRIPYYVGPLARGNSRFAWMTRKSEETITPWNFEEVVDKGASAQSFIERMTNFDKNLPNEKVLPKHSLLYEYFTVYNELTKVKYVTEGMRKPAFLSGEQKKAIVDLLFKTNRKVTVKQLKEDYFKKIECFDSVEISGVEDRFNASLGTYHDLLKIIKDKDFLDNEENEDILEDIVLTLTLFEDREMIEERLKTYAHLFDDKVMKQLKRRRYTGWGRLSRKLINGIRDKQSGKTILDFLKSDGFANRNFMQLIHDDSLTFKEDIQKAQVSGQGDSLHEHIANLAGSPAIKKGILQTVKVVDELVKVMGRHKPENIVIEMARENQTTQKGQKNSRERMKRIEEGIKELGSQILKEHPVENTQLQNEKLYLYYLQNGRDMYVDQELDINRLSDYDVDHIVPQSFLKDDSIDNKVLTRSDKARGKSDNVPSEEVVKKMKNYWRQLLNAKLITQRKFDNLTKAERGGLSELDKAGFIKRQLVETRQITKHVAQILDSRMNTKYDENDKLIREVKVITLKSKLVSDFRKDFQFYKVREINNYHHAHDAYLNAVVGTALIKKYPKLESEFVYGDYKVYDVRKMIAKSEQEIGKATAKYFFYSNIMNFFKTEITLANGEIRKRPLIETNGETGEIVWDKGRDFATVRKVLSMPQVNIVKKTEVQTGGFSKESILPKRNSDKLIARKKDWDPKKYGGFDSPTVAYSVLVVAKVEKGKSKKLKSVKELLGITIMERSSFEKNPIDFLEAKGYKEVKKDLIIKLPKYSLFELENGRKRMLASAGELQKGNELALPSKYVNFLYLASHYEKLKGSPEDNEQKQLFVEQHKHYLDEIIEQISEFSKRVILADANLDKVLSAYNKHRDKPIREQAENIIHLFTLTNLGAPAAFKYFDTTIDRKRYTSTKEVLDATLIHQSITGLYETRIDLSQLGGDGGGGSEAAAKGSSGGMDPLQLLQPLEAEIKGTKLKAHWNSGATITCVPQAFLEEEVPIKNIWIKTIHGEKEQPVYYLTFKIQGRKVEAEVISSPYDYILVSPSDIPWLMKKPLQLTTLVPLQEYEERLLKQTMLTGSYKEKLQSLFLKYDALWQHWENQVGHRRIKPHHIATGTVNPRPQKQYPINPKAKASIQTVINDLLKQGVLIQQNSIMNTPVYPVPKPDGKWRMVLDYREVNKTIPLIAAQNQHSAGILSSIFRGKYKTTLDLSNGFWAHSITPESYWLTAFTWLGQQYCWTRLPQGFLNSPALFNADVVDLLKEVPNVQVYVDDIYISHDDPREHLEQLEKVFSLLLNAGYVVSLKKSEIAQHEVEFLGFNITKEGRGLTETFKQKLLNITPPRDLKQLQSILGLLNFARNFIPNFSELVKPLYNIIATAPGKYITWTTDNSQQLQNIISMLNSAENLEERNPEVRLIMKVNTSPSAGYIRFYNEFAKRPIMYLNYVYTKAEVKFTNTEKLLTTIHKGLIKALDLGMGQEILVYSPIVSMTKIQKTPLPERKALPIRWITWMSYLEDPRIQFHYDKTLPELQQVPTVTDDIIAKIKHPSEFSMVFYTDGSAIKHPNVNKSHNAGMGIAQVQFKPEFTVINTWSIPLGDHTAQLAEVAAVEFACKKALKIDGPVLIVTDSFYVAESVNKELPYWQSNGFFNNKKKPLKHVSKWKSIADCIQLKPDIIIIHEKGHQPTASTFHTEGNNLADKLATQGSYVVNAGKRTADGSEFEKRTADGSEFESPKKKAKVE

SEQ ID NO: 641 - protein, 2176 aa, synthetic construct
MPAAKRVKLDGGDKKYSIGLDIGTNSVGWAVITDEYKVPSKKFKVLGNTDRHSIKKNLIGALLFDSGETAEATRLKRTARRRYTRRKNRICYLQEIFSNEMAKVDDSFFHRLEESFLVEEDKKHERHPIFGNIVDEVAYHEKYPTIYHLRKKLVDSTDKADLRLIYLALAHMIKFRGHFLIEGDLNPDNSDVDKLFIQLVQTYNQLFEENPINASGVDAKAILSARLSKSRRLENLIAQLPGEKKNGLFGNLIALSLGLTPNFKSNFDLAEDAKLQLSKDTYDDDLDNLLAQIGDQYADLFLAAKNLSDAILLSDILRVNTEITKAPLSASMIKRYDEHHQDLTLLKALVRQQLPEKYKEIFFDQSKNGYAGYIDGGASQEEFYKFIKPILEKMDGTEELLVKLNREDLLRKQRTFDNGSIPHQIHLGELHAILRRQEDFYPFLKDNREKIEKILTFRIPYYVGPLARGNSRFAWMTRKSEETITPWNFEEVVDKGASAQSFIERMTNFDKNLPNEKVLPKHSLLYEYFTVYNELTKVKYVTEGMRKPAFLSGEQKKAIVDLLFKTNRKVTVKQLKEDYFKKIECFDSVEISGVEDRFNASLGTYHDLLKIIKDKDFLDNEENEDILEDIVLTLTLFEDREMIEERLKTYAHLFDDKVMKQLKRRRYTGWGRLSRKLINGIRDKQSGKTILDFLKSDGFANRNFMQLIHDDSLTFKEDIQKAQVSGQGDSLHEHIANLAGSPAIKKGILQTVKVVDELVKVMGRHKPENIVIEMARENQTTQKGQKNSRERMKRIEEGIKELGSQILKEHPVENTQLQNEKLYLYYLQNGRDMYVDQELDINRLSDYDVDHIVPQSFLKDDSIDNKVLTRSDKARGKSDNVPSEEVVKKMKNYWRQLLNAKLITQRKFDNLTKAERGGLSELDKAGFIKRQLVETRQITKHVAQILDSRMNTKYDENDKLIREVKVITLKSKLVSDFRKDFQFYKVREINNYHHAHDAYLNAVVGTALIKKYPKLESEFVYGDYKVYDVRKMIAKSEQEIGKATAKYFFYSNIMNFFKTEITLANGEIRKRPLIETNGETGEIVWDKGRDFATVRKVLSMPQVNIVKKTEVQTGGFSKESILPKRNSDKLIARKKDWDPKKYGGFDSPTVAYSVLVVAKVEKGKSKKLKSVKELLGITIMERSSFEKNPIDFLEAKGYKEVKKDLIIKLPKYSLFELENGRKRMLASAGELQKGNELALPSKYVNFLYLASHYEKLKGSPEDNEQKQLFVEQHKHYLDEIIEQISEFSKRVILADANLDKVLSAYNKHRDKPIREQAENIIHLFTLTNLGAPAAFKYFDTTIDRKRYTSTKEVLDATLIHQSITGLYETRIDLSQLGGDGGPAPEAAAKGGSGGMDPLQLLQPLEAEIKGTKLKAHWNSGATITCVPQAFLEEEVPIKNIWIKTIHGEKEQPVYYLTFKIQGRKVEAEVISSPYDYILVSPSDIPWLMKKPLQLTTLVPLQEYEERLLKQTMLTGSYKEKLQSLFLKYDALWQHWENQVGHRRIKPHHIATGTVNPRPQKQYPINPKAKASIQTVINDLLKQGVLIQQNSIMNTPVYPVPKPDGKWRMVLDYREVNKTIPLIAAQNQHSAGILSSIFRGKYKTTLDLSNGFWAHSITPESYWLTAFTWLGQQYCWTRLPQGFLNSPALFNADVVDLLKEVPNVQVYVDDIYISHDDPREHLEQLEKVFSLLLNAGYVVSLKKSEIAQHEVEFLGFNITKEGRGLTETFKQKLLNITPPRDLKQLQSILGLLNFARNFIPNFSELVKPLYNIIATAPGKYITWTTDNSQQLQNIISMLNSAENLEERNPEVRLIMKVNTSPSAGYIRFYNEFAKRPIMYLNYVYTKAEVKFTNTEKLLTTIHKGLIKALDLGMGQEILVYSPIVSMTKIQKTPLPERKALPIRWITWMSYLEDPRIQFHYDKTLPELQQVPTVTDDIIAKIKHPSEFSMVFYTDGSAIKHPNVNKSHNAGMGIAQVQFKPEFTVINTWSIPLGDHTAQLAEVAAVEFACKKALKIDGPVLIVTDSFYVAESVNKELPYWQSNGFFNNKKKPLKHVSKWKSIADCIQLKPDIIIIHEKGHQPTASTFHTEGNNLADKLATQGSYVVNAGKRTADGSEFEKRTADGSEFESPKKKAKVE

SEQ ID NO: 642 - protein, 2173 aa, synthetic construct
MPAAKRVKLDGGDKKYSIGLDIGTNSVGWAVITDEYKVPSKKFKVLGNTDRHSIKKNLIGALLFDSGETAEATRLKRTARRRYTRRKNRICYLQEIFSNEMAKVDDSFFHRLEESFLVEEDKKHERHPIFGNIVDEVAYHEKYPTIYHLRKKLVDSTDKADLRLIYLALAHMIKFRGHFLIEGDLNPDNSDVDKLFIQLVQTYNQLFEENPINASGVDAKAILSARLSKSRRLENLIAQLPGEKKNGLFGNLIALSLGLTPNFKSNFDLAEDAKLQLSKDTYDDDLDNLLAQIGDQYADLFLAAKNLSDAILLSDILRVNTEITKAPLSASMIKRYDEHHQDLTLLKALVRQQLPEKYKEIFFDQSKNGYAGYIDGGASQEEFYKFIKPILEKMDGTEELLVKLNREDLLRKQRTFDNGSIPHQIHLGELHAILRRQEDFYPFLKDNREKIEKILTFRIPYYVGPLARGNSRFAWMTRKSEETITPWNFEEVVDKGASAQSFIERMTNFDKNLPNEKVLPKHSLLYEYFTVYNELTKVKYVTEGMRKPAFLSGEQKKAIVDLLFKTNRKVTVKQLKEDYFKKIECFDSVEISGVEDRFNASLGTYHDLLKIIKDKDFLDNEENEDILEDIVLTLTLFEDREMIEERLKTYAHLFDDKVMKQLKRRRYTGWGRLSRKLINGIRDKQSGKTILDFLKSDGFANRNFMQLIHDDSLTFKEDIQKAQVSGQGDSLHEHIANLAGSPAIKKGILQTVKVVDELVKVMGRHKPENIVIEMARENQTTQKGQKNSRERMKRIEEGIKELGSQILKEHPVENTQLQNEKLYLYYLQNGRDMYVDQELDINRLSDYDVDHIVPQSFLKDDSIDNKVLTRSDKARGKSDNVPSEEVVKKMKNYWRQLLNAKLITQRKFDNLTKAERGGLSELDKAGFIKRQLVETRQITKHVAQILDSRMNTKYDENDKLIREVKVITLKSKLVSDFRKDFQFYKVREINNYHHAHDAYLNAVVGTALIKKYPKLESEFVYGDYKVYDVRKMIAKSEQEIGKATAKYFFYSNIMNFFKTEITLANGEIRKRPLIETNGETGEIVWDKGRDFATVRKVLSMPQVNIVKKTEVQTGGFSKESILPKRNSDKLIARKKDWDPKKYGGFDSPTVAYSVLVVAKVEKGKSKKLKSVKELLGITIMERSSFEKNPIDFLEAKGYKEVKKDLIIKLPKYSLFELENGRKRMLASAGELQKGNELALPSKYVNFLYLASHYEKLKGSPEDNEQKQLFVEQHKHYLDEIIEQISEFSKRVILADANLDKVLSAYNKHRDKPIREQAENIIHLFTLTNLGAPAAFKYFDTTIDRKRYTSTKEVLDATLIHQSITGLYETRIDLSQLGGDGGGGGGGGGGGGMDPLQLLQPLEAEIKGTKLKAHWNSGATITCVPQAFLEEEVPIKNIWIKTIHGEKEQPVYYLTFKIQGRKVEAEVISSPYDYILVSPSDIPWLMKKPLQLTTLVPLQEYEERLLKQTMLTGSYKEKLQSLFLKYDALWQHWENQVGHRRIKPHHIATGTVNPRPQKQYPINPKAKASIQTVINDLLKQGVLIQQNSIMNTPVYPVPKPDGKWRMVLDYREVNKTIPLIAAQNQHSAGILSSIFRGKYKTTLDLSNGFWAHSITPESYWLTAFTWLGQQYCWTRLPQGFLNSPALFNADVVDLLKEVPNVQVYVDDIYISHDDPREHLEQLEKVFSLLLNAGYVVSLKKSEIAQHEVEFLGFNITKEGRGLTETFKQKLLNITPPRDLKQLQSILGLLNFARNFIPNFSELVKPLYNIIATAPGKYITWTTDNSQQLQNIISMLNSAENLEERNPEVRLIMKVNTSPSAGYIRFYNEFAKRPIMYLNYVYTKAEVKFTNTEKLLTTIHKGLIKALDLGMGQEILVYSPIVSMTKIQKTPLPERKALPIRWITWMSYLEDPRIQFHYDKTLPELQQVPTVTDDIIAKIKHPSEFSMVFYTDGSAIKHPNVNKSHNAGMGIAQVQFKPEFTVINTWSIPLGDHTAQLAEVAAVEFACKKALKIDGPVLIVTDSFYVAESVNKELPYWQSNGFFNNKKKPLKHVSKWKSIADCIQLKPDIIIIHEKGHQPTASTFHTEGNNLADKLATQGSYVVNAGKRTADGSEFEKRTADGSEFESPKKKAKVE

SEQ ID NO: 643 - protein, 2171 aa, synthetic construct
MPAAKRVKLDGGDKKYSIGLDIGTNSVGWAVITDEYKVPSKKFKVLGNTDRHSIKKNLIGALLFDSGETAEATRLKRTARRRYTRRKNRICYLQEIFSNEMAKVDDSFFHRLEESFLVEEDKKHERHPIFGNIVDEVAYHEKYPTIYHLRKKLVDSTDKADLRLIYLALAHMIKFRGHFLIEGDLNPDNSDVDKLFIQLVQTYNQLFEENPINASGVDAKAILSARLSKSRRLENLIAQLPGEKKNGLFGNLIALSLGLTPNFKSNFDLAEDAKLQLSKDTYDDDLDNLLAQIGDQYADLFLAAKNLSDAILLSDILRVNTEITKAPLSASMIKRYDEHHQDLTLLKALVRQQLPEKYKEIFFDQSKNGYAGYIDGGASQEEFYKFIKPILEKMDGTEELLVKLNREDLLRKQRTFDNGSIPHQIHLGELHAILRRQEDFYPFLKDNREKIEKILTFRIPYYVGPLARGNSRFAWMTRKSEETITPWNFEEVVDKGASAQSFIERMTNFDKNLPNEKVLPKHSLLYEYFTVYNELTKVKYVTEGMRKPAFLSGEQKKAIVDLLFKTNRKVTVKQLKEDYFKKIECFDSVEISGVEDRFNASLGTYHDLLKIIKDKDFLDNEENEDILEDIVLTLTLFEDREMIEERLKTYAHLFDDKVMKQLKRRRYTGWGRLSRKLINGIRDKQSGKTILDFLKSDGFANRNFMQLIHDDSLTFKEDIQKAQVSGQGDSLHEHIANLAGSPAIKKGILQTVKVVDELVKVMGRHKPENIVIEMARENQTTQKGQKNSRERMKRIEEGIKELGSQILKEHPVENTQLQNEKLYLYYLQNGRDMYVDQELDINRLSDYDVDHIVPQSFLKDDSIDNKVLTRSDKARGKSDNVPSEEVVKKMKNYWRQLLNAKLITQRKFDNLTKAERGGLSELDKAGFIKRQLVETRQITKHVAQILDSRMNTKYDENDKLIREVKVITLKSKLVSDFRKDFQFYKVREINNYHHAHDAYLNAVVGTALIKKYPKLESEFVYGDYKVYDVRKMIAKSEQEIGKATAKYFFYSNIMNFFKTEITLANGEIRKRPLIETNGETGEIVWDKGRDFATVRKVLSMPQVNIVKKTEVQTGGFSKESILPKRNSDKLIARKKDWDPKKYGGFDSPTVAYSVLVVAKVEKGKSKKLKSVKELLGITIMERSSFEKNPIDFLEAKGYKEVKKDLIIKLPKYSLFELENGRKRMLASAGELQKGNELALPSKYVNFLYLASHYEKLKGSPEDNEQKQLFVEQHKHYLDEIIEQISEFSKRVILADANLDKVLSAYNKHRDKPIREQAENIIHLFTLTNLGAPAAFKYFDTTIDRKRYTSTKEVLDATLIHQSITGLYETRIDLSQLGGDGGGGSGSSGGMDPLQLLQPLEAEIKGTKLKAHWNSGATITCVPQAFLEEEVPIKNIWIKTIHGEKEQPVYYLTFKIQGRKVEAEVISSPYDYILVSPSDIPWLMKKPLQLTTLVPLQEYEERLLKQTMLTGSYKEKLQSLFLKYDALWQHWENQVGHRRIKPHHIATGTVNPRPQKQYPINPKAKASIQTVINDLLKQGVLIQQNSIMNTPVYPVPKPDGKWRMVLDYREVNKTIPLIAAQNQHSAGILSSIFRGKYKTTLDLSNGFWAHSITPESYWLTAFTWLGQQYCWTRLPQGFLNSPALFNADVVDLLKEVPNVQVYVDDIYISHDDPREHLEQLEKVFSLLLNAGYVVSLKKSEIAQHEVEFLGFNITKEGRGLTETFKQKLLNITPPRDLKQLQSILGLLNFARNFIPNFSELVKPLYNIIATAPGKYITWTTDNSQQLQNIISMLNSAENLEERNPEVRLIMKVNTSPSAGYIRFYNEFAKRPIMYLNYVYTKAEVKFTNTEKLLTTIHKGLIKALDLGMGQEILVYSPIVSMTKIQKTPLPERKALPIRWITWMSYLEDPRIQFHYDKTLPELQQVPTVTDDIIAKIKHPSEFSMVFYTDGSAIKHPNVNKSHNAGMGIAQVQFKPEFTVINTWSIPLGDHTAQLAEVAAVEFACKKALKIDGPVLIVTDSFYVAESVNKELPYWQSNGFFNNKKKPLKHVSKWKSIADCIQLKPDIIIIHEKGHQPTASTFHTEGNNLADKLATQGSYVVNAGKRTADGSEFEKRTADGSEFESPKKKAKVE

SEQ ID NO: 644 - protein, 2171 aa, synthetic construct
MPAAKRVKLDGGDKKYSIGLDIGTNSVGWAVITDEYKVPSKKFKVLGNTDRHSIKKNLIGALLFDSGETAEATRLKRTARRRYTRRKNRICYLQEIFSNEMAKVDDSFFHRLEESFLVEEDKKHERHPIFGNIVDEVAYHEKYPTIYHLRKKLVDSTDKADLRLIYLALAHMIKFRGHFLIEGDLNPDNSDVDKLFIQLVQTYNQLFEENPINASGVDAKAILSARLSKSRRLENLIAQLPGEKKNGLFGNLIALSLGLTPNFKSNFDLAEDAKLQLSKDTYDDDLDNLLAQIGDQYADLFLAAKNLSDAILLSDILRVNTEITKAPLSASMIKRYDEHHQDLTLLKALVRQQLPEKYKEIFFDQSKNGYAGYIDGGASQEEFYKFIKPILEKMDGTEELLVKLNREDLLRKQRTFDNGSIPHQIHLGELHAILRRQEDFYPFLKDNREKIEKILTFRIPYYVGPLARGNSRFAWMTRKSEETITPWNFEEVVDKGASAQSFIERMTNFDKNLPNEKVLPKHSLLYEYFTVYNELTKVKYVTEGMRKPAFLSGEQKKAIVDLLFKTNRKVTVKQLKEDYFKKIECFDSVEISGVEDRFNASLGTYHDLLKIIKDKDFLDNEENEDILEDIVLTLTLFEDREMIEERLKTYAHLFDDKVMKQLKRRRYTGWGRLSRKLINGIRDKQSGKTILDFLKSDGFANRNFMQLIHDDSLTFKEDIQKAQVSGQGDSLHEHIANLAGSPAIKKGILQTVKVVDELVKVMGRHKPENIVIEMARENQTTQKGQKNSRERMKRIEEGIKELGSQILKEHPVENTQLQNEKLYLYYLQNGRDMYVDQELDINRLSDYDVDHIVPQSFLKDDSIDNKVLTRSDKARGKSDNVPSEEVVKKMKNYWRQLLNAKLITQRKFDNLTKAERGGLSELDKAGFIKRQLVETRQITKHVAQILDSRMNTKYDENDKLIREVKVITLKSKLVSDFRKDFQFYKVREINNYHHAHDAYLNAVVGTALIKKYPKLESEFVYGDYKVYDVRKMIAKSEQEIGKATAKYFFYSNIMNFFKTEITLANGEIRKRPLIETNGETGEIVWDKGRDFATVRKVLSMPQVNIVKKTEVQTGGFSKESILPKRNSDKLIARKKDWDPKKYGGFDSPTVAYSVLVVAKVEKGKSKKLKSVKELLGITIMERSSFEKNPIDFLEAKGYKEVKKDLIIKLPKYSLFELENGRKRMLASAGELQKGNELALPSKYVNFLYLASHYEKLKGSPEDNEQKQLFVEQHKHYLDEIIEQISEFSKRVILADANLDKVLSAYNKHRDKPIREQAENIIHLFTLTNLGAPAAFKYFDTTIDRKRYTSTKEVLDATLIHQSITGLYETRIDLSQLGGDGGGGGGGGGGMDPLQLLQPLEAEIKGTKLKAHWNSGATITCVPQAFLEEEVPIKNIWIKTIHGEKEQPVYYLTFKIQGRKVEAEVISSPYDYILVSPSDIPWLMKKPLQLTTLVPLQEYEERLLKQTMLTGSYKEKLQSLFLKYDALWQHWENQVGHRRIKPHHIATGTVNPRPQKQYPINPKAKASIQTVINDLLKQGVLIQQNSIMNTPVYPVPKPDGKWRMVLDYREVNKTIPLIAAQNQHSAGILSSIFRGKYKTTLDLSNGFWAHSITPESYWLTAFTWLGQQYCWTRLPQGFLNSPALFNADVVDLLKEVPNVQVYVDDIYISHDDPREHLEQLEKVFSLLLNAGYVVSLKKSEIAQHEVEFLGFNITKEGRGLTETFKQKLLNITPPRDLKQLQSILGLLNFARNFIPNFSELVKPLYNIIATAPGKYITWTTDNSQQLQNIISMLNSAENLEERNPEVRLIMKVNTSPSAGYIRFYNEFAKRPIMYLNYVYTKAEVKFTNTEKLLTTIHKGLIKALDLGMGQEILVYSPIVSMTKIQKTPLPERKALPIRWITWMSYLEDPRIQFHYDKTLPELQQVPTVTDDIIAKIKHPSEFSMVFYTDGSAIKHPNVNKSHNAGMGIAQVQFKPEFTVINTWSIPLGDHTAQLAEVAAVEFACKKALKIDGPVLIVTDSFYVAESVNKELPYWQSNGFFNNKKKPLKHVSKWKSIADCIQLKPDIIIIHEKGHQPTASTFHTEGNNLADKLATQGSYVVNAGKRTADGSEFEKRTADGSEFESPKKKAKVE

SEQ ID NO: 645 - protein, 2174 aa, synthetic construct
MPAAKRVKLDGGDKKYSIGLDIGTNSVGWAVITDEYKVPSKKFKVLGNTDRHSIKKNLIGALLFDSGETAEATRLKRTARRRYTRRKNRICYLQEIFSNEMAKVDDSFFHRLEESFLVEEDKKHERHPIFGNIVDEVAYHEKYPTIYHLRKKLVDSTDKADLRLIYLALAHMIKFRGHFLIEGDLNPDNSDVDKLFIQLVQTYNQLFEENPINASGVDAKAILSARLSKSRRLENLIAQLPGEKKNGLFGNLIALSLGLTPNFKSNFDLAEDAKLQLSKDTYDDDLDNLLAQIGDQYADLFLAAKNLSDAILLSDILRVNTEITKAPLSASMIKRYDEHHQDLTLLKALVRQQLPEKYKEIFFDQSKNGYAGYIDGGASQEEFYKFIKPILEKMDGTEELLVKLNREDLLRKQRTFDNGSIPHQIHLGELHAILRRQEDFYPFLKDNREKIEKILTFRIPYYVGPLARGNSRFAWMTRKSEETITPWNFEEVVDKGASAQSFIERMTNFDKNLPNEKVLPKHSLLYEYFTVYNELTKVKYVTEGMRKPAFLSGEQKKAIVDLLFKTNRKVTVKQLKEDYFKKIECFDSVEISGVEDRFNASLGTYHDLLKIIKDKDFLDNEENEDILEDIVLTLTLFEDREMIEERLKTYAHLFDDKVMKQLKRRRYTGWGRLSRKLINGIRDKQSGKTILDFLKSDGFANRNFMQLIHDDSLTFKEDIQKAQVSGQGDSLHEHIANLAGSPAIKKGILQTVKVVDELVKVMGRHKPENIVIEMARENQTTQKGQKNSRERMKRIEEGIKELGSQILKEHPVENTQLQNEKLYLYYLQNGRDMYVDQELDINRLSDYDVDHIVPQSFLKDDSIDNKVLTRSDKARGKSDNVPSEEVVKKMKNYWRQLLNAKLITQRKFDNLTKAERGGLSELDKAGFIKRQLVETRQITKHVAQILDSRMNTKYDENDKLIREVKVITLKSKLVSDFRKDFQFYKVREINNYHHAHDAYLNAVVGTALIKKYPKLESEFVYGDYKVYDVRKMIAKSEQEIGKATAKYFFYSNIMNFFKTEITLANGEIRKRPLIETNGETGEIVWDKGRDFATVRKVLSMPQVNIVKKTEVQTGGFSKESILPKRNSDKLIARKKDWDPKKYGGFDSPTVAYSVLVVAKVEKGKSKKLKSVKELLGITIMERSSFEKNPIDFLEAKGYKEVKKDLIIKLPKYSLFELENGRKRMLASAGELQKGNELALPSKYVNFLYLASHYEKLKGSPEDNEQKQLFVEQHKHYLDEIIEQISEFSKRVILADANLDKVLSAYNKHRDKPIREQAENIIHLFTLTNLGAPAAFKYFDTTIDRKRYTSTKEVLDATLIHQSITGLYETRIDLSQLGGDGGGGSGGGPAPGGMDPLQLLQPLEAEIKGTKLKAHWNSGATITCVPQAFLEEEVPIKNIWIKTIHGEKEQPVYYLTFKIQGRKVEAEVISSPYDYILVSPSDIPWLMKKPLQLTTLVPLQEYEERLLKQTMLTGSYKEKLQSLFLKYDALWQHWENQVGHRRIKPHHIATGTVNPRPQKQYPINPKAKASIQTVINDLLKQGVLIQQNSIMNTPVYPVPKPDGKWRMVLDYREVNKTIPLIAAQNQHSAGILSSIFRGKYKTTLDLSNGFWAHSITPESYWLTAFTWLGQQYCWTRLPQGFLNSPALFNADVVDLLKEVPNVQVYVDDIYISHDDPREHLEQLEKVFSLLLNAGYVVSLKKSEIAQHEVEFLGFNITKEGRGLTETFKQKLLNITPPRDLKQLQSILGLLNFARNFIPNFSELVKPLYNIIATAPGKYITWTTDNSQQLQNIISMLNSAENLEERNPEVRLIMKVNTSPSAGYIRFYNEFAKRPIMYLNYVYTKAEVKFTNTEKLLTTIHKGLIKALDLGMGQEILVYSPIVSMTKIQKTPLPERKALPIRWITWMSYLEDPRIQFHYDKTLPELQQVPTVTDDIIAKIKHPSEFSMVFYTDGSAIKHPNVNKSHNAGMGIAQVQFKPEFTVINTWSIPLGDHTAQLAEVAAVEFACKKALKIDGPVLIVTDSFYVAESVNKELPYWQSNGFFNNKKKPLKHVSKWKSIADCIQLKPDIIIIHEKGHQPTASTFHTEGNNLADKLATQGSYVVNAGKRTADGSEFEKRTADGSEFESPKKKAKVE

SEQ ID NO: 646 - protein, 2176 aa, synthetic construct
MPAAKRVKLDGGDKKYSIGLDIGTNSVGWAVITDEYKVPSKKFKVLGNTDRHSIKKNLIGALLFDSGETAEATRLKRTARRRYTRRKNRICYLQEIFSNEMAKVDDSFFHRLEESFLVEEDKKHERHPIFGNIVDEVAYHEKYPTIYHLRKKLVDSTDKADLRLIYLALAHMIKFRGHFLIEGDLNPDNSDVDKLFIQLVQTYNQLFEENPINASGVDAKAILSARLSKSRRLENLIAQLPGEKKNGLFGNLIALSLGLTPNFKSNFDLAEDAKLQLSKDTYDDDLDNLLAQIGDQYADLFLAAKNLSDAILLSDILRVNTEITKAPLSASMIKRYDEHHQDLTLLKALVRQQLPEKYKEIFFDQSKNGYAGYIDGGASQEEFYKFIKPILEKMDGTEELLVKLNREDLLRKQRTFDNGSIPHQIHLGELHAILRRQEDFYPFLKDNREKIEKILTFRIPYYVGPLARGNSRFAWMTRKSEETITPWNFEEVVDKGASAQSFIERMTNFDKNLPNEKVLPKHSLLYEYFTVYNELTKVKYVTEGMRKPAFLSGEQKKAIVDLLFKTNRKVTVKQLKEDYFKKIECFDSVEISGVEDRFNASLGTYHDLLKIIKDKDFLDNEENEDILEDIVLTLTLFEDREMIEERLKTYAHLFDDKVMKQLKRRRYTGWGRLSRKLINGIRDKQSGKTILDFLKSDGFANRNFMQLIHDDSLTFKEDIQKAQVSGQGDSLHEHIANLAGSPAIKKGILQTVKVVDELVKVMGRHKPENIVIEMARENQTTQKGQKNSRERMKRIEEGIKELGSQILKEHPVENTQLQNEKLYLYYLQNGRDMYVDQELDINRLSDYDVDHIVPQSFLKDDSIDNKVLTRSDKARGKSDNVPSEEVVKKMKNYWRQLLNAKLITQRKFDNLTKAERGGLSELDKAGFIKRQLVETRQITKHVAQILDSRMNTKYDENDKLIREVKVITLKSKLVSDFRKDFQFYKVREINNYHHAHDAYLNAVVGTALIKKYPKLESEFVYGDYKVYDVRKMIAKSEQEIGKATAKYFFYSNIMNFFKTEITLANGEIRKRPLIETNGETGEIVWDKGRDFATVRKVLSMPQVNIVKKTEVQTGGFSKESILPKRNSDKLIARKKDWDPKKYGGFDSPTVAYSVLVVAKVEKGKSKKLKSVKELLGITIMERSSFEKNPIDFLEAKGYKEVKKDLIIKLPKYSLFELENGRKRMLASAGELQKGNELALPSKYVNFLYLASHYEKLKGSPEDNEQKQLFVEQHKHYLDEIIEQISEFSKRVILADANLDKVLSAYNKHRDKPIREQAENIIHLFTLTNLGAPAAFKYFDTTIDRKRYTSTKEVLDATLIHQSITGLYETRIDLSQLGGDGGEAAAKGGSGGGGGMDPLQLLQPLEAEIKGTKLKAHWNSGATITCVPQAFLEEEVPIKNIWIKTIHGEKEQPVYYLTFKIQGRKVEAEVISSPYDYILVSPSDIPWLMKKPLQLTTLVPLQEYEERLLKQTMLTGSYKEKLQSLFLKYDALWQHWENQVGHRRIKPHHIATGTVNPRPQKQYPINPKAKASIQTVINDLLKQGVLIQQNSIMNTPVYPVPKPDGKWRMVLDYREVNKTIPLIAAQNQHSAGILSSIFRGKYKTTLDLSNGFWAHSITPESYWLTAFTWLGQQYCWTRLPQGFLNSPALFNADVVDLLKEVPNVQVYVDDIYISHDDPREHLEQLEKVFSLLLNAGYVVSLKKSEIAQHEVEFLGFNITKEGRGLTETFKQKLLNITPPRDLKQLQSILGLLNFARNFIPNFSELVKPLYNIIATAPGKYITWTTDNSQQLQNIISMLNSAENLEERNPEVRLIMKVNTSPSAGYIRFYNEFAKRPIMYLNYVYTKAEVKFTNTEKLLTTIHKGLIKALDLGMGQEILVYSPIVSMTKIQKTPLPERKALPIRWITWMSYLEDPRIQFHYDKTLPELQQVPTVTDDIIAKIKHPSEFSMVFYTDGSAIKHPNVNKSHNAGMGIAQVQFKPEFTVINTWSIPLGDHTAQLAEVAAVEFACKKALKIDGPVLIVTDSFYVAESVNKELPYWQSNGFFNNKKKPLKHVSKWKSIADCIQLKPDIIIIHEKGHQPTASTFHTEGNNLADKLATQGSYVVNAGKRTADGSEFEKRTADGSEFESPKKKAKVE

SEQ ID NO: 647 - protein, 2211 aa, synthetic construct
MPAAKRVKLDGGDKKYSIGLDIGTNSVGWAVITDEYKVPSKKFKVLGNTDRHSIKKNLIGALLFDSGETAEATRLKRTARRRYTRRKNRICYLQEIFSNEMAKVDDSFFHRLEESFLVEEDKKHERHPIFGNIVDEVAYHEKYPTIYHLRKKLVDSTDKADLRLIYLALAHMIKFRGHFLIEGDLNPDNSDVDKLFIQLVQTYNQLFEENPINASGVDAKAILSARLSKSRRLENLIAQLPGEKKNGLFGNLIALSLGLTPNFKSNFDLAEDAKLQLSKDTYDDDLDNLLAQIGDQYADLFLAAKNLSDAILLSDILRVNTEITKAPLSASMIKRYDEHHQDLTLLKALVRQQLPEKYKEIFFDQSKNGYAGYIDGGASQEEFYKFIKPILEKMDGTEELLVKLNREDLLRKQRTFDNGSIPHQIHLGELHAILRRQEDFYPFLKDNREKIEKILTFRIPYYVGPLARGNSRFAWMTRKSEETITPWNFEEVVDKGASAQSFIERMTNFDKNLPNEKVLPKHSLLYEYFTVYNELTKVKYVTEGMRKPAFLSGEQKKAIVDLLFKTNRKVTVKQLKEDYFKKIECFDSVEISGVEDRFNASLGTYHDLLKIIKDKDFLDNEENEDILEDIVLTLTLFEDREMIEERLKTYAHLFDDKVMKQLKRRRYTGWGRLSRKLINGIRDKQSGKTILDFLKSDGFANRNFMQLIHDDSLTFKEDIQKAQVSGQGDSLHEHIANLAGSPAIKKGILQTVKVVDELVKVMGRHKPENIVIEMARENQTTQKGQKNSRERMKRIEEGIKELGSQILKEHPVENTQLQNEKLYLYYLQNGRDMYVDQELDINRLSDYDVDHIVPQSFLKDDSIDNKVLTRSDKARGKSDNVPSEEVVKKMKNYWRQLLNAKLITQRKFDNLTKAERGGLSELDKAGFIKRQLVETRQITKHVAQILDSRMNTKYDENDKLIREVKVITLKSKLVSDFRKDFQFYKVREINNYHHAHDAYLNAVVGTALIKKYPKLESEFVYGDYKVYDVRKMIAKSEQEIGKATAKYFFYSNIMNFFKTEITLANGEIRKRPLIETNGETGEIVWDKGRDFATVRKVLSMPQVNIVKKTEVQTGGFSKESILPKRNSDKLIARKKDWDPKKYGGFDSPTVAYSVLVVAKVEKGKSKKLKSVKELLGITIMERSSFEKNPIDFLEAKGYKEVKKDLIIKLPKYSLFELENGRKRMLASAGELQKGNELALPSKYVNFLYLASHYEKLKGSPEDNEQKQLFVEQHKHYLDEIIEQISEFSKRVILADANLDKVLSAYNKHRDKPIREQAENIIHLFTLTNLGAPAAFKYFDTTIDRKRYTSTKEVLDATLIHQSITGLYETRIDLSQLGGDGGAEAAAKEAAAKEAAAKEAAAKALEAEAAAKEAAAKEAAAKEAAAKAGGMDPLQLLQPLEAEIKGTKLKAHWNSGATITCVPQAFLEEEVPIKNIWIKTIHGEKEQPVYYLTFKIQGRKVEAEVISSPYDYILVSPSDIPWLMKKPLQLTTLVPLQEYEERLLKQTMLTGSYKEKLQSLFLKYDALWQHWENQVGHRRIKPHHIATGTVNPRPQKQYPINPKAKASIQTVINDLLKQGVLIQQNSIMNTPVYPVPKPDGKWRMVLDYREVNKTIPLIAAQNQHSAGILSSIFRGKYKTTLDLSNGFWAHSITPESYWLTAFTWLGQQYCWTRLPQGFLNSPALFNADVVDLLKEVPNVQVYVDDIYISHDDPREHLEQLEKVFSLLLNAGYVVSLKKSEIAQHEVEFLGFNITKEGRGLTETFKQKLLNITPPRDLKQLQSILGKLNFARNFIPNFSELVKPLYNIIATAPGKYITWTTDNSQQLQNIISMLNSAENLEERNPEVRLIMKVNTSPSAGYIRFYNEFAKRPIMYLNYVYTKAEVKFTNTEKLLTTIHKGLIKALDLGMGQEILVYSPIVSMTKIQKTPLPERKALPIRWITWMSYLEDPRIQFHYDKTLPELQQVPTVTDDIIAKIKHPSEFSMVFYTDGSAIKHPNVNKSHNAGMGIAQVQFKPEFTVINTWSIPLGDHTAQLAEVAAVEFACKKALKIDGPVLIVTDSFYVAESVNKELPYWQSNGFFNNKKKPLKHVSKWKSIADCIQLKPDIIIIHEKGHQPTASTFHTEGNNLADKLATQGSYVVNAGKRTADGSEFEKRTADGSEFESPKKKAKVE

SEQ ID NO: 648 - protein, 2195 aa, synthetic construct
MPAAKRVKLDGGDKKYSIGLDIGTNSVGWAVITDEYKVPSKKFKVLGNTDRHSIKKNLIGALLFDSGETAEATRLKRTARRRYTRRKNRICYLQEIFSNEMAKVDDSFFHRLEESFLVEEDKKHERHPIFGNIVDEVAYHEKYPTIYHLRKKLVDSTDKADLRLIYLALAHMIKFRGHFLIEGDLNPDNSDVDKLFIQLVQTYNQLFEENPINASGVDAKAILSARLSKSRRLENLIAQLPGEKKNGLFGNLIALSLGLTPNFKSNFDLAEDAKLQLSKDTYDDDLDNLLAQIGDQYADLFLAAKNLSDAILLSDILRVNTEITKAPLSASMIKRYDEHHQDLTLLKALVRQQLPEKYKEIFFDQSKNGYAGYIDGGASQEEFYKFIKPILEKMDGTEELLVKLNREDLLRKQRTFDNGSIPHQIHLGELHAILRRQEDFYPFLKDNREKIEKILTFRIPYYVGPLARGNSRFAWMTRKSEETITPWNFEEVVDKGASAQSFIERMTNFDKNLPNEKVLPKHSLLYEYFTVYNELTKVKYVTEGMRKPAFLSGEQKKAIVDLLFKTNRKVTVKQLKEDYFKKIECFDSVEISGVEDRFNASLGTYHDLLKIIKDKDFLDNEENEDILEDIVLTLTLFEDREMIEERLKTYAHLFDDKVMKQLKRRRYTGWGRLSRKLINGIRDKQSGKTILDFLKSDGFANRNFMQLIHDDSLTFKEDIQKAQVSGQGDSLHEHIANLAGSPAIKKGILQTVKVVDELVKVMGRHKPENIVIEMARENQTTQKGQKNSRERMKRIEEGIKELGSQILKEHPVENTQLQNEKLYLYYLQNGRDMYVDQELDINRLSDYDVDHIVPQSFLKDDSIDNKVLTRSDKARGKSDNVPSEEVVKKMKNYWRQLLNAKLITQRKFDNLTKAERGGLSELDKAGFIKRQLVETRQITKHVAQILDSRMNTKYDENDKLIREVKVITLKSKLVSDFRKDFQFYKVREINNYHHAHDAYLNAVVGTALIKKYPKLESEFVYGDYKVYDVRKMIAKSEQEIGKATAKYFFYSNIMNFFKTEITLANGEIRKRPLIETNGETGEIVWDKGRDFATVRKVLSMPQVNIVKKTEVQTGGFSKESILPKRNSDKLIARKKDWDPKKYGGFDSPTVAYSVLVVAKVEKGKSKKLKSVKELLGITIMERSSFEKNPIDFLEAKGYKEVKKDLIIKLPKYSLFELENGRKRMLASAGELQKGNELALPSKYVNFLYLASHYEKLKGSPEDNEQKQLFVEQHKHYLDEIIEQISEFSKRVILADANLDKVLSAYNKHRDKPIREQAENIIHLFTLTNLGAPAAFKYFDTTIDRKRYTSTKEVLDATLIHQSITGLYETRIDLSQLGGDGGGGGGSGGGGSGGGGSGGGGSGGGGSGGGGSGGMDPLQLLQPLEAEIKGTKLKAHWNSGATITCVPQAFLEEEVPIKNIWIKTIHGEKEQPVYYLTFKIQGRKVEAEVISSPYDYILVSPSDIPWLMKKPLQLTTLVPLQEYEERLLKQTMLTGSYKEKLQSLFLKYDALWQHWENQVGHRRIKPHHIATGTVNPRPQKQYPINPKAKASIQTVINDLLKQGVLIQQNSIMNTPVYPVPKPDGKWRMVLDYREVNKTIPLIAAQNQHSAGILSSIFRGKYKTTLDLSNGFWAHSITPESYWLTAFTWLGQQYCWTRLPQGFLNSPALFNADVVDLLKEVPNVQVYVDDIYISHDDPREHLEQLEKVFSLLLNAGYVVSLKKSEIAQHEVEFLGFNITKEGRGLTETFKQKLLNITPPRDLKQLQSILGKLNFARNFIPNFSELVKPLYNIIATAPGKYITWTTDNSQQLQNIISMLNSAENLEERNPEVRLIMKVNTSPSAGYIRFYNEFAKRPIMYLNYVYTKAEVKFTNTEKLLTTIHKGLIKALDLGMGQEILVYSPIVSMTKIQKTPLPERKALPIRWITWMSYLEDPRIQFHYDKTLPELQQVPTVTDDIIAKIKHPSEFSMVFYTDGSAIKHPNVNKSHNAGMGIAQVQFKPEFTVINTWSIPLGDHTAQLAEVAAVEFACKKALKIDGPVLIVTDSFYVAESVNKELPYWQSNGFFNNKKKPLKHVSKWKSIADCIQLKPDIIIIHEKGHQPTASTFHTEGNNLADKLATQGSYVVNAGKRTADGSEFEKRTADGSEFESPKKKAKVE

SEQ ID NO: 649 - protein, 2190 aa, synthetic construct
MPAAKRVKLDGGDKKYSIGLDIGTNSVGWAVITDEYKVPSKKFKVLGNTDRHSIKKNLIGALLFDSGETAEATRLKRTARRRYTRRKNRICYLQEIFSNEMAKVDDSFFHRLEESFLVEEDKKHERHPIFGNIVDEVAYHEKYPTIYHLRKKLVDSTDKADLRLIYLALAHMIKFRGHFLIEGDLNPDNSDVDKLFIQLVQTYNQLFEENPINASGVDAKAILSARLSKSRRLENLIAQLPGEKKNGLFGNLIALSLGLTPNFKSNFDLAEDAKLQLSKDTYDDDLDNLLAQIGDQYADLFLAAKNLSDAILLSDILRVNTEITKAPLSASMIKRYDEHHQDLTLLKALVRQQLPEKYKEIFFDQSKNGYAGYIDGGASQEEFYKFIKPILEKMDGTEELLVKLNREDLLRKQRTFDNGSIPHQIHLGELHAILRRQEDFYPFLKDNREKIEKILTFRIPYYVGPLARGNSRFAWMTRKSEETITPWNFEEVVDKGASAQSFIERMTNFDKNLPNEKVLPKHSLLYEYFTVYNELTKVKYVTEGMRKPAFLSGEQKKAIVDLLFKTNRKVTVKQLKEDYFKKIECFDSVEISGVEDRFNASLGTYHDLLKIIKDKDFLDNEENEDILEDIVLTLTLFEDREMIEERLKTYAHLFDDKVMKQLKRRRYTGWGRLSRKLINGIRDKQSGKTILDFLKSDGFANRNFMQLIHDDSLTFKEDIQKAQVSGQGDSLHEHIANLAGSPAIKKGILQTVKVVDELVKVMGRHKPENIVIEMARENQTTQKGQKNSRERMKRIEEGIKELGSQILKEHPVENTQLQNEKLYLYYLQNGRDMYVDQELDINRLSDYDVDHIVPQSFLKDDSIDNKVLTRSDKARGKSDNVPSEEVVKKMKNYWRQLLNAKLITQRKFDNLTKAERGGLSELDKAGFIKRQLVETRQITKHVAQILDSRMNTKYDENDKLIREVKVITLKSKLVSDFRKDFQFYKVREINNYHHAHDAYLNAVVGTALIKKYPKLESEFVYGDYKVYDVRKMIAKSEQEIGKATAKYFFYSNIMNFFKTEITLANGEIRKRPLIETNGETGEIVWDKGRDFATVRKVLSMPQVNIVKKTEVQTGGFSKESILPKRNSDKLIARKKDWDPKKYGGFDSPTVAYSVLVVAKVEKGKSKKLKSVKELLGITIMERSSFEKNPIDFLEAKGYKEVKKDLIIKLPKYSLFELENGRKRMLASAGELQKGNELALPSKYVNFLYLASHYEKLKGSPEDNEQKQLFVEQHKHYLDEIIEQISEFSKRVILADANLDKVLSAYNKHRDKPIREQAENIIHLFTLTNLGAPAAFKYFDTTIDRKRYTSTKEVLDATLIHQSITGLYETRIDLSQLGGDGGEAAAKEAAAKEAAAKEAAAKEAAAKGGMDPLQLLQPLEAEIKGTKLKAHWNSGATITCVPQAFLEEEVPIKNIWIKTIHGEKEQPVYYLTFKIQGRKVEAEVISSPYDYILVSPSDIPWLMKKPLQLTTLVPLQEYEERLLKQTMLTGSYKEKLQSLFLKYDALWQHWENQVGHRRIKPHHIATGTVNPRPQKQYPINPKAKASIQTVINDLLKQGVLIQQNSIMNTPVYPVPKPDGKWRMVLDYREVNKTIPLIAAQNQHSAGILSSIFRGKYKTTLDLSNGFWAHSITPESYWLTAFTWLGQQYCWTRLPQGFLNSPALFNADVVDLLKEVPNVQVYVDDIYISHDDPREHLEQLEKVFSLLLNAGYVVSLKKSEIAQHEVEFLGFNITKEGRGLTETFKQKLLNITPPRDLKQLQSILGKLNFARNFIPNFSELVKPLYNIIATAPGKYITWTTDNSQQLQNIISMLNSAENLEERNPEVRLIMKVNTSPSAGYIRFYNEFAKRPIMYLNYVYTKAEVKFTNTEKLLTTIHKGLIKALDLGMGQEILVYSPIVSMTKIQKTPLPERKALPIRWITWMSYLEDPRIQFHYDKTLPELQQVPTVTDDIIAKIKHPSEFSMVFYTDGSAIKHPNVNKSHNAGMGIAQVQFKPEFTVINTWSIPLGDHTAQLAEVAAVEFACKKALKIDGPVLIVTDSFYVAESVNKELPYWQSNGFFNNKKKPLKHVSKWKSIADCIQLKPDIIIIHEKGHQPTASTFHTEGNNLADKLATQGSYVVNAGKRTADGSEFEKRTADGSEFESPKKKAKVE

SEQ ID NO: 650 - protein, 2176 aa, synthetic construct
MPAAKRVKLDGGDKKYSIGLDIGTNSVGWAVITDEYKVPSKKFKVLGNTDRHSIKKNLIGALLFDSGETAEATRLKRTARRRYTRRKNRICYLQEIFSNEMAKVDDSFFHRLEESFLVEEDKKHERHPIFGNIVDEVAYHEKYPTIYHLRKKLVDSTDKADLRLIYLALAHMIKFRGHFLIEGDLNPDNSDVDKLFIQLVQTYNQLFEENPINASGVDAKAILSARLSKSRRLENLIAQLPGEKKNGLFGNLIALSLGLTPNFKSNFDLAEDAKLQLSKDTYDDDLDNLLAQIGDQYADLFLAAKNLSDAILLSDILRVNTEITKAPLSASMIKRYDEHHQDLTLLKALVRQQLPEKYKEIFFDQSKNGYAGYIDGGASQEEFYKFIKPILEKMDGTEELLVKLNREDLLRKQRTFDNGSIPHQIHLGELHAILRRQEDFYPFLKDNREKIEKILTFRIPYYVGPLARGNSRFAWMTRKSEETITPWNFEEVVDKGASAQSFIERMTNFDKNLPNEKVLPKHSLLYEYFTVYNELTKVKYVTEGMRKPAFLSGEQKKAIVDLLFKTNRKVTVKQLKEDYFKKIECFDSVEISGVEDRFNASLGTYHDLLKIIKDKDFLDNEENEDILEDIVLTLTLFEDREMIEERLKTYAHLFDDKVMKQLKRRRYTGWGRLSRKLINGIRDKQSGKTILDFLKSDGFANRNFMQLIHDDSLTFKEDIQKAQVSGQGDSLHEHIANLAGSPAIKKGILQTVKVVDELVKVMGRHKPENIVIEMARENQTTQKGQKNSRERMKRIEEGIKELGSQILKEHPVENTQLQNEKLYLYYLQNGRDMYVDQELDINRLSDYDVDHIVPQSFLKDDSIDNKVLTRSDKARGKSDNVPSEEVVKKMKNYWRQLLNAKLITQRKFDNLTKAERGGLSELDKAGFIKRQLVETRQITKHVAQILDSRMNTKYDENDKLIREVKVITLKSKLVSDFRKDFQFYKVREINNYHHAHDAYLNAVVGTALIKKYPKLESEFVYGDYKVYDVRKMIAKSEQEIGKATAKYFFYSNIMNFFKTEITLANGEIRKRPLIETNGETGEIVWDKGRDFATVRKVLSMPQVNIVKKTEVQTGGFSKESILPKRNSDKLIARKKDWDPKKYGGFDSPTVAYSVLVVAKVEKGKSKKLKSVKELLGITIMERSSFEKNPIDFLEAKGYKEVKKDLIIKLPKYSLFELENGRKRMLASAGELQKGNELALPSKYVNFLYLASHYEKLKGSPEDNEQKQLFVEQHKHYLDEIIEQISEFSKRVILADANLDKVLSAYNKHRDKPIREQAENIIHLFTLTNLGAPAAFKYFDTTIDRKRYTSTKEVLDATLIHQSITGLYETRIDLSQLGGDGGPAPGSSEAAAKGGMDPLQLLQPLEAEIKGTKLKAHWNSGATITCVPQAFLEEEVPIKNIWIKTIHGEKEQPVYYLTFKIQGRKVEAEVISSPYDYILVSPSDIPWLMKKPLQLTTLVPLQEYEERLLKQTMLTGSYKEKLQSLFLKYDALWQHWENQVGHRRIKPHHIATGTVNPRPQKQYPINPKAKASIQTVINDLLKQGVLIQQNSIMNTPVYPVPKPDGKWRMVLDYREVNKTIPLIAAQNQHSAGILSSIFRGKYKTTLDLSNGFWAHSITPESYWLTAFTWLGQQYCWTRLPQGFLNSPALFNADVVDLLKEVPNVQVYVDDIYISHDDPREHLEQLEKVFSLLLNAGYVVSLKKSEIAQHEVEFLGFNITKEGRGLTETFKQKLLNITPPRDLKQLQSILGKLNFARNFIPNFSELVKPLYNIIATAPGKYITWTTDNSQQLQNIISMLNSAENLEERNPEVRLIMKVNTSPSAGYIRFYNEFAKRPIMYLNYVYTKAEVKFTNTEKLLTTIHKGLIKALDLGMGQEILVYSPIVSMTKIQKTPLPERKALPIRWITWMSYLEDPRIQFHYDKTLPELQQVPTVTDDIIAKIKHPSEFSMVFYTDGSAIKHPNVNKSHNAGMGIAQVQFKPEFTVINTWSIPLGDHTAQLAEVAAVEFACKKALKIDGPVLIVTDSFYVAESVNKELPYWQSNGFFNNKKKPLKHVSKWKSIADCIQLKPDIIIIHEKGHQPTASTFHTEGNNLADKLATQGSYVVNAGKRTADGSEFEKRTADGSEFESPKKKAKVE

SEQ ID NO: 651 - protein, 2195 aa, synthetic construct
MPAAKRVKLDGGDKKYSIGLDIGTNSVGWAVITDEYKVPSKKFKVLGNTDRHSIKKNLIGALLFDSGETAEATRLKRTARRRYTRRKNRICYLQEIFSNEMAKVDDSFFHRLEESFLVEEDKKHERHPIFGNIVDEVAYHEKYPTIYHLRKKLVDSTDKADLRLIYLALAHMIKFRGHFLIEGDLNPDNSDVDKLFIQLVQTYNQLFEENPINASGVDAKAILSARLSKSRRLENLIAQLPGEKKNGLFGNLIALSLGLTPNFKSNFDLAEDAKLQLSKDTYDDDLDNLLAQIGDQYADLFLAAKNLSDAILLSDILRVNTEITKAPLSASMIKRYDEHHQDLTLLKALVRQQLPEKYKEIFFDQSKNGYAGYIDGGASQEEFYKFIKPILEKMDGTEELLVKLNREDLLRKQRTFDNGSIPHQIHLGELHAILRRQEDFYPFLKDNREKIEKILTFRIPYYVGPLARGNSRFAWMTRKSEETITPWNFEEVVDKGASAQSFIERMTNFDKNLPNEKVLPKHSLLYEYFTVYNELTKVKYVTEGMRKPAFLSGEQKKAIVDLLFKTNRKVTVKQLKEDYFKKIECFDSVEISGVEDRFNASLGTYHDLLKIIKDKDFLDNEENEDILEDIVLTLTLFEDREMIEERLKTYAHLFDDKVMKQLKRRRYTGWGRLSRKLINGIRDKQSGKTILDFLKSDGFANRNFMQLIHDDSLTFKEDIQKAQVSGQGDSLHEHIANLAGSPAIKKGILQTVKVVDELVKVMGRHKPENIVIEMARENQTTQKGQKNSRERMKRIEEGIKELGSQILKEHPVENTQLQNEKLYLYYLQNGRDMYVDQELDINRLSDYDVDHIVPQSFLKDDSIDNKVLTRSDKARGKSDNVPSEEVVKKMKNYWRQLLNAKLITQRKFDNLTKAERGGLSELDKAGFIKRQLVETRQITKHVAQILDSRMNTKYDENDKLIREVKVITLKSKLVSDFRKDFQFYKVREINNYHHAHDAYLNAVVGTALIKKYPKLESEFVYGDYKVYDVRKMIAKSEQEIGKATAKYFFYSNIMNFFKTEITLANGEIRKRPLIETNGETGEIVWDKGRDFATVRKVLSMPQVNIVKKTEVQTGGFSKESILPKRNSDKLIARKKDWDPKKYGGFDSPTVAYSVLVVAKVEKGKSKKLKSVKELLGITIMERSSFEKNPIDFLEAKGYKEVKKDLIIKLPKYSLFELENGRKRMLASAGELQKGNELALPSKYVNFLYLASHYEKLKGSPEDNEQKQLFVEQHKHYLDEIIEQISEFSKRVILADANLDKVLSAYNKHRDKPIREQAENIIHLFTLTNLGAPAAFKYFDTTIDRKRYTSTKEVLDATLIHQSITGLYETRIDLSQLGGDGGEAAAKEAAAKEAAAKEAAAKEAAAKEAAAKGGMDPLQLLQPLEAEIKGTKLKAHWNSGATITCVPQAFLEEEVPIKNIWIKTIHGEKEQPVYYLTFKIQGRKVEAEVISSPYDYILVSPSDIPWLMKKPLQLTTLVPLQEYEERLLKQTMLTGSYKEKLQSLFLKYDALWQHWENQVGHRRIKPHHIATGTVNPRPQKQYPINPKAKASIQTVINDLLKQGVLIQQNSIMNTPVYPVPKPDGKWRMVLDYREVNKTIPLIAAQNQHSAGILSSIFRGKYKTTLDLSNGFWAHSITPESYWLTAFTWLGQQYCWTRLPQGFLNSPALFNADVVDLLKEVPNVQVYVDDIYISHDDPREHLEQLEKVFSLLLNAGYVVSLKKSEIAQHEVEFLGFNITKEGRGLTETFKQKLLNITPPRDLKQLQSILGKLNFARNFIPNFSELVKPLYNIIATAPGKYITWTTDNSQQLQNIISMLNSAENLEERNPEVRLIMKVNTSPSAGYIRFYNEFAKRPIMYLNYVYTKAEVKFTNTEKLLTTIHKGLIKALDLGMGQEILVYSPIVSMTKIQKTPLPERKALPIRWITWMSYLEDPRIQFHYDKTLPELQQVPTVTDDIIAKIKHPSEFSMVFYTDGSAIKHPNVNKSHNAGMGIAQVQFKPEFTVINTWSIPLGDHTAQLAEVAAVEFACKKALKIDGPVLIVTDSFYVAESVNKELPYWQSNGFFNNKKKPLKHVSKWKSIADCIQLKPDIIIIHEKGHQPTASTFHTEGNNLADKLATQGSYVVNAGKRTADGSEFEKRTADGSEFESPKKKAKVE

SEQ ID NO: 652 - protein, 2198 aa, synthetic construct
MPAAKRVKLDGGDKKYSIGLDIGTNSVGWAVITDEYKVPSKKFKVLGNTDRHSIKKNLIGALLFDSGETAEATRLKRTARRRYTRRKNRICYLQEIFSNEMAKVDDSFFHRLEESFLVEEDKKHERHPIFGNIVDEVAYHEKYPTIYHLRKKLVDSTDKADLRLIYLALAHMIKFRGHFLIEGDLNPDNSDVDKLFIQLVQTYNQLFEENPINASGVDAKAILSARLSKSRRLENLIAQLPGEKKNGLFGNLIALSLGLTPNFKSNFDLAEDAKLQLSKDTYDDDLDNLLAQIGDQYADLFLAAKNLSDAILLSDILRVNTEITKAPLSASMIKRYDEHHQDLTLLKALVRQQLPEKYKEIFFDQSKNGYAGYIDGGASQEEFYKFIKPILEKMDGTEELLVKLNREDLLRKQRTFDNGSIPHQIHLGELHAILRRQEDFYPFLKDNREKIEKILTFRIPYYVGPLARGNSRFAWMTRKSEETITPWNFEEVVDKGASAQSFIERMTNFDKNLPNEKVLPKHSLLYEYFTVYNELTKVKYVTEGMRKPAFLSGEQKKAIVDLLFKTNRKVTVKQLKEDYFKKIECFDSVEISGVEDRFNASLGTYHDLLKIIKDKDFLDNEENEDILEDIVLTLTLFEDREMIEERLKTYAHLFDDKVMKQLKRRRYTGWGRLSRKLINGIRDKQSGKTILDFLKSDGFANRNFMQLIHDDSLTFKEDIQKAQVSGQGDSLHEHIANLAGSPAIKKGILQTVKVVDELVKVMGRHKPENIVIEMARENQTTQKGQKNSRERMKRIEEGIKELGSQILKEHPVENTQLQNEKLYLYYLQNGRDMYVDQELDINRLSDYDVDHIVPQSFLKDDSIDNKVLTRSDKARGKSDNVPSEEVVKKMKNYWRQLLNAKLITQRKFDNLTKAERGGLSELDKAGFIKRQLVETRQITKHVAQILDSRMNTKYDENDKLIREVKVITLKSKLVSDFRKDFQFYKVREINNYHHAHDAYLNAVVGTALIKKYPKLESEFVYGDYKVYDVRKMIAKSEQEIGKATAKYFFYSNIMNFFKTEITLANGEIRKRPLIETNGETGEIVWDKGRDFATVRKVLSMPQVNIVKKTEVQTGGFSKESILPKRNSDKLIARKKDWDPKKYGGFDSPTVAYSVLVVAKVEKGKSKKLKSVKELLGITIMERSSFEKNPIDFLEAKGYKEVKKDLIIKLPKYSLFELENGRKRMLASAGELQKGNELALPSKYVNFLYLASHYEKLKGSPEDNEQKQLFVEQHKHYLDEIIEQISEFSKRVILADANLDKVLSAYNKHRDKPIREQAENIIHLFTLTNLGAPAAFKYFDTTIDRKRYTSTKEVLDATLIHQSITGLYETRIDLSQLGGDGGSGGSSGGSSGSETPGTSESATPESSGGSSGGSSGGMDPLQLLQPLEAEIKGTKLKAHWNSGATITCVPQAFLEEEVPIKNIWIKTIHGEKEQPVYYLTFKIQGRKVEAEVISSPYDYILVSPSDIPWLMKKPLQLTTLVPLQEYEERLLKQTMLTGSYKEKLQSLFLKYDALWQHWENQVGHRRIKPHHIATGTVNPRPQKQYPINPKAKASIQTVINDLLKQGVLIQQNSIMNTPVYPVPKPDGKWRMVLDYREVNKTIPLIAAQNQHSAGILSSIFRGKYKTTLDLSNGFWAHSITPESYWLTAFTWLGQQYCWTRLPQGFLNSPALFNADVVDLLKEVPNVQVYVDDIYISHDDPREHLEQLEKVFSLLLNAGYVVSLKKSEIAQHEVEFLGFNITKEGRGLTETFKQKLLNITPPRDLKQLQSILGKLNFARNFIPNFSELVKPLYNIIATAPGKYITWTTDNSQQLQNIISMLNSAENLEERNPEVRLIMKVNTSPSAGYIRFYNEFAKRPIMYLNYVYTKAEVKFTNTEKLLTTIHKGLIKALDLGMGQEILVYSPIVSMTKIQKTPLPERKALPIRWITWMSYLEDPRIQFHYDKTLPELQQVPTVTDDIIAKIKHPSEFSMVFYTDGSAIKHPNVNKSHNAGMGIAQVQFKPEFTVINTWSIPLGDHTAQLAEVAAVEFACKKALKIDGPVLIVTDSFYVAESVNKELPYWQSNGFFNNKKKPLKHVSKWKSIADCIQLKPDIIIIHEKGHQPTASTFHTEGNNLADKLATQGSYVVNAGKRTADGSEFEKRTADGSEFESPKKKAKVE

SEQ ID NO: 653 - protein, 2176 aa, synthetic construct
MPAAKRVKLDGGDKKYSIGLDIGTNSVGWAVITDEYKVPSKKFKVLGNTDRHSIKKNLIGALLFDSGETAEATRLKRTARRRYTRRKNRICYLQEIFSNEMAKVDDSFFHRLEESFLVEEDKKHERHPIFGNIVDEVAYHEKYPTIYHLRKKLVDSTDKADLRLIYLALAHMIKFRGHFLIEGDLNPDNSDVDKLFIQLVQTYNQLFEENPINASGVDAKAILSARLSKSRRLENLIAQLPGEKKNGLFGNLIALSLGLTPNFKSNFDLAEDAKLQLSKDTYDDDLDNLLAQIGDQYADLFLAAKNLSDAILLSDILRVNTEITKAPLSASMIKRYDEHHQDLTLLKALVRQQLPEKYKEIFFDQSKNGYAGYIDGGASQEEFYKFIKPILEKMDGTEELLVKLNREDLLRKQRTFDNGSIPHQIHLGELHAILRRQEDFYPFLKDNREKIEKILTFRIPYYVGPLARGNSRFAWMTRKSEETITPWNFEEVVDKGASAQSFIERMTNFDKNLPNEKVLPKHSLLYEYFTVYNELTKVKYVTEGMRKPAFLSGEQKKAIVDLLFKTNRKVTVKQLKEDYFKKIECFDSVEISGVEDRFNASLGTYHDLLKIIKDKDFLDNEENEDILEDIVLTLTLFEDREMIEERLKTYAHLFDDKVMKQLKRRRYTGWGRLSRKLINGIRDKQSGKTILDFLKSDGFANRNFMQLIHDDSLTFKEDIQKAQVSGQGDSLHEHIANLAGSPAIKKGILQTVKVVDELVKVMGRHKPENIVIEMARENQTTQKGQKNSRERMKRIEEGIKELGSQILKEHPVENTQLQNEKLYLYYLQNGRDMYVDQELDINRLSDYDVDHIVPQSFLKDDSIDNKVLTRSDKARGKSDNVPSEEVVKKMKNYWRQLLNAKLITQRKFDNLTKAERGGLSELDKAGFIKRQLVETRQITKHVAQILDSRMNTKYDENDKLIREVKVITLKSKLVSDFRKDFQFYKVREINNYHHAHDAYLNAVVGTALIKKYPKLESEFVYGDYKVYDVRKMIAKSEQEIGKATAKYFFYSNIMNFFKTEITLANGEIRKRPLIETNGETGEIVWDKGRDFATVRKVLSMPQVNIVKKTEVQTGGFSKESILPKRNSDKLIARKKDWDPKKYGGFDSPTVAYSVLVVAKVEKGKSKKLKSVKELLGITIMERSSFEKNPIDFLEAKGYKEVKKDLIIKLPKYSLFELENGRKRMLASAGELQKGNELALPSKYVNFLYLASHYEKLKGSPEDNEQKQLFVEQHKHYLDEIIEQISEFSKRVILADANLDKVLSAYNKHRDKPIREQAENIIHLFTLTNLGAPAAFKYFDTTIDRKRYTSTKEVLDATLIHQSITGLYETRIDLSQLGGDGGGGGGGSEAAAKGGMDPLQLLQPLEAEIKGTKLKAHWNSGATITCVPQAFLEEEVPIKNIWIKTIHGEKEQPVYYLTFKIQGRKVEAEVISSPYDYILVSPSDIPWLMKKPLQLTTLVPLQEYEERLLKQTMLTGSYKEKLQSLFLKYDALWQHWENQVGHRRIKPHHIATGTVNPRPQKQYPINPKAKASIQTVINDLLKQGVLIQQNSIMNTPVYPVPKPDGKWRMVLDYREVNKTIPLIAAQNQHSAGILSSIFRGKYKTTLDLSNGFWAHSITPESYWLTAFTWLGQQYCWTRLPQGFLNSPALFNADVVDLLKEVPNVQVYVDDIYISHDDPREHLEQLEKVFSLLLNAGYVVSLKKSEIAQHEVEFLGFNITKEGRGLTETFKQKLLNITPPRDLKQLQSILGKLNFARNFIPNFSELVKPLYNIIATAPGKYITWTTDNSQQLQNIISMLNSAENLEERNPEVRLIMKVNTSPSAGYIRFYNEFAKRPIMYLNYVYTKAEVKFTNTEKLLTTIHKGLIKALDLGMGQEILVYSPIVSMTKIQKTPLPERKALPIRWITWMSYLEDPRIQFHYDKTLPELQQVPTVTDDIIAKIKHPSEFSMVFYTDGSAIKHPNVNKSHNAGMGIAQVQFKPEFTVINTWSIPLGDHTAQLAEVAAVEFACKKALKIDGPVLIVTDSFYVAESVNKELPYWQSNGFFNNKKKPLKHVSKWKSIADCIQLKPDIIIIHEKGHQPTASTFHTEGNNLADKLATQGSYVVNAGKRTADGSEFEKRTADGSEFESPKKKAKVE

SEQ ID NO: 654 - protein, 2178 aa, synthetic construct
MPAAKRVKLDGGDKKYSIGLDIGTNSVGWAVITDEYKVPSKKFKVLGNTDRHSIKKNLIGALLFDSGETAEATRLKRTARRRYTRRKNRICYLQEIFSNEMAKVDDSFFHRLEESFLVEEDKKHERHPIFGNIVDEVAYHEKYPTIYHLRKKLVDSTDKADLRLIYLALAHMIKFRGHFLIEGDLNPDNSDVDKLFIQLVQTYNQLFEENPINASGVDAKAILSARLSKSRRLENLIAQLPGEKKNGLFGNLIALSLGLTPNFKSNFDLAEDAKLQLSKDTYDDDLDNLLAQIGDQYADLFLAAKNLSDAILLSDILRVNTEITKAPLSASMIKRYDEHHQDLTLLKALVRQQLPEKYKEIFFDQSKNGYAGYIDGGASQEEFYKFIKPILEKMDGTEELLVKLNREDLLRKQRTFDNGSIPHQIHLGELHAILRRQEDFYPFLKDNREKIEKILTFRIPYYVGPLARGNSRFAWMTRKSEETITPWNFEEVVDKGASAQSFIERMTNFDKNLPNEKVLPKHSLLYEYFTVYNELTKVKYVTEGMRKPAFLSGEQKKAIVDLLFKTNRKVTVKQLKEDYFKKIECFDSVEISGVEDRFNASLGTYHDLLKIIKDKDFLDNEENEDILEDIVLTLTLFEDREMIEERLKTYAHLFDDKVMKQLKRRRYTGWGRLSRKLINGIRDKQSGKTILDFLKSDGFANRNFMQLIHDDSLTFKEDIQKAQVSGQGDSLHEHIANLAGSPAIKKGILQTVKVVDELVKVMGRHKPENIVIEMARENQTTQKGQKNSRERMKRIEEGIKELGSQILKEHPVENTQLQNEKLYLYYLQNGRDMYVDQELDINRLSDYDVDHIVPQSFLKDDSIDNKVLTRSDKARGKSDNVPSEEVVKKMKNYWRQLLNAKLITQRKFDNLTKAERGGLSELDKAGFIKRQLVETRQITKHVAQILDSRMNTKYDENDKLIREVKVITLKSKLVSDFRKDFQFYKVREINNYHHAHDAYLNAVVGTALIKKYPKLESEFVYGDYKVYDVRKMIAKSEQEIGKATAKYFFYSNIMNFFKTEITLANGEIRKRPLIETNGETGEIVWDKGRDFATVRKVLSMPQVNIVKKTEVQTGGFSKESILPKRNSDKLIARKKDWDPKKYGGFDSPTVAYSVLVVAKVEKGKSKKLKSVKELLGITIMERSSFEKNPIDFLEAKGYKEVKKDLIIKLPKYSLFELENGRKRMLASAGELQKGNELALPSKYVNFLYLASHYEKLKGSPEDNEQKQLFVEQHKHYLDEIIEQISEFSKRVILADANLDKVLSAYNKHRDKPIREQAENIIHLFTLTNLGAPAAFKYFDTTIDRKRYTSTKEVLDATLIHQSITGLYETRIDLSQLGGDGGPAPAPAPAPAPAPGGMDPLQLLQPLEAEIKGTKLKAHWNSGATITCVPQAFLEEEVPIKNIWIKTIHGEKEQPVYYLTFKIQGRKVEAEVISSPYDYILVSPSDIPWLMKKPLQLTTLVPLQEYEERLLKQTMLTGSYKEKLQSLFLKYDALWQHWENQVGHRRIKPHHIATGTVNPRPQKQYPINPKAKASIQTVINDLLKQGVLIQQNSIMNTPVYPVPKPDGKWRMVLDYREVNKTIPLIAAQNQHSAGILSSIFRGKYKTTLDLSNGFWAHSITPESYWLTAFTWLGQQYCWTRLPQGFLNSPALFNADVVDLLKEVPNVQVYVDDIYISHDDPREHLEQLEKVFSLLLNAGYVVSLKKSEIAQHEVEFLGFNITKEGRGLTETFKQKLLNITPPRDLKQLQSILGKLNFARNFIPNFSELVKPLYNIIATAPGKYITWTTDNSQQLQNIISMLNSAENLEERNPEVRLIMKVNTSPSAGYIRFYNEFAKRPIMYLNYVYTKAEVKFTNTEKLLTTIHKGLIKALDLGMGQEILVYSPIVSMTKIQKTPLPERKALPIRWITWMSYLEDPRIQFHYDKTLPELQQVPTVTDDIIAKIKHPSEFSMVFYTDGSAIKHPNVNKSHNAGMGIAQVQFKPEFTVINTWSIPLGDHTAQLAEVAAVEFACKKALKIDGPVLIVTDSFYVAESVNKELPYWQSNGFFNNKKKPLKHVSKWKSIADCIQLKPDIIIIHEKGHQPTASTFHTEGNNLADKLATQGSYVVNAGKRTADGSEFEKRTADGSEFESPKKKAKVE

SEQ ID NO: 655 - protein, 2176 aa, synthetic construct
MPAAKRVKLDGGDKKYSIGLDIGTNSVGWAVITDEYKVPSKKFKVLGNTDRHSIKKNLIGALLFDSGETAEATRLKRTARRRYTRRKNRICYLQEIFSNEMAKVDDSFFHRLEESFLVEEDKKHERHPIFGNIVDEVAYHEKYPTIYHLRKKLVDSTDKADLRLIYLALAHMIKFRGHFLIEGDLNPDNSDVDKLFIQLVQTYNQLFEENPINASGVDAKAILSARLSKSRRLENLIAQLPGEKKNGLFGNLIALSLGLTPNFKSNFDLAEDAKLQLSKDTYDDDLDNLLAQIGDQYADLFLAAKNLSDAILLSDILRVNTEITKAPLSASMIKRYDEHHQDLTLLKALVRQQLPEKYKEIFFDQSKNGYAGYIDGGASQEEFYKFIKPILEKMDGTEELLVKLNREDLLRKQRTFDNGSIPHQIHLGELHAILRRQEDFYPFLKDNREKIEKILTFRIPYYVGPLARGNSRFAWMTRKSEETITPWNFEEVVDKGASAQSFIERMTNFDKNLPNEKVLPKHSLLYEYFTVYNELTKVKYVTEGMRKPAFLSGEQKKAIVDLLFKTNRKVTVKQLKEDYFKKIECFDSVEISGVEDRFNASLGTYHDLLKIIKDKDFLDNEENEDILEDIVLTLTLFEDREMIEERLKTYAHLFDDKVMKQLKRRRYTGWGRLSRKLINGIRDKQSGKTILDFLKSDGFANRNFMQLIHDDSLTFKEDIQKAQVSGQGDSLHEHIANLAGSPAIKKGILQTVKVVDELVKVMGRHKPENIVIEMARENQTTQKGQKNSRERMKRIEEGIKELGSQILKEHPVENTQLQNEKLYLYYLQNGRDMYVDQELDINRLSDYDVDHIVPQSFLKDDSIDNKVLTRSDKARGKSDNVPSEEVVKKMKNYWRQLLNAKLITQRKFDNLTKAERGGLSELDKAGFIKRQLVETRQITKHVAQILDSRMNTKYDENDKLIREVKVITLKSKLVSDFRKDFQFYKVREINNYHHAHDAYLNAVVGTALIKKYPKLESEFVYGDYKVYDVRKMIAKSEQEIGKATAKYFFYSNIMNFFKTEITLANGEIRKRPLIETNGETGEIVWDKGRDFATVRKVLSMPQVNIVKKTEVQTGGFSKESILPKRNSDKLIARKKDWDPKKYGGFDSPTVAYSVLVVAKVEKGKSKKLKSVKELLGITIMERSSFEKNPIDFLEAKGYKEVKKDLIIKLPKYSLFELENGRKRMLASAGELQKGNELALPSKYVNFLYLASHYEKLKGSPEDNEQKQLFVEQHKHYLDEIIEQISEFSKRVILADANLDKVLSAYNKHRDKPIREQAENIIHLFTLTNLGAPAAFKYFDTTIDRKRYTSTKEVLDATLIHQSITGLYETRIDLSQLGGDGGGGGGSSEAAAKGGMDPLQLLQPLEAEIKGTKLKAHWNSGATITCVPQAFLEEEVPIKNIWIKTIHGEKEQPVYYLTFKIQGRKVEAEVISSPYDYILVSPSDIPWLMKKPLQLTTLVPLQEYEERLLKQTMLTGSYKEKLQSLFLKYDALWQHWENQVGHRRIKPHHIATGTVNPRPQKQYPINPKAKASIQTVINDLLKQGVLIQQNSIMNTPVYPVPKPDGKWRMVLDYREVNKTIPLIAAQNQHSAGILSSIFRGKYKTTLDLSNGFWAHSITPESYWLTAFTWLGQQYCWTRLPQGFLNSPALFNADVVDLLKEVPNVQVYVDDIYISHDDPREHLEQLEKVFSLLLNAGYVVSLKKSEIAQHEVEFLGFNITKEGRGLTETFKQKLLNITPPRDLKQLQSILGKLNFARNFIPNFSELVKPLYNIIATAPGKYITWTTDNSQQLQNIISMLNSAENLEERNPEVRLIMKVNTSPSAGYIRFYNEFAKRPIMYLNYVYTKAEVKFTNTEKLLTTIHKGLIKALDLGMGQEILVYSPIVSMTKIQKTPLPERKALPIRWITWMSYLEDPRIQFHYDKTLPELQQVPTVTDDIIAKIKHPSEFSMVFYTDGSAIKHPNVNKSHNAGMGIAQVQFKPEFTVINTWSIPLGDHTAQLAEVAAVEFACKKALKIDGPVLIVTDSFYVAESVNKELPYWQSNGFFNNKKKPLKHVSKWKSIADCIQLKPDIIIIHEKGHQPTASTFHTEGNNLADKLATQGSYVVNAGKRTADGSEFEKRTADGSEFESPKKKAKVE

SEQ ID NO: 656 - protein, 2181 aa, synthetic construct
MPAAKRVKLDGGDKKYSIGLDIGTNSVGWAVITDEYKVPSKKFKVLGNTDRHSIKKNLIGALLFDSGETAEATRLKRTARRRYTRRKNRICYLQEIFSNEMAKVDDSFFHRLEESFLVEEDKKHERHPIFGNIVDEVAYHEKYPTIYHLRKKLVDSTDKADLRLIYLALAHMIKFRGHFLIEGDLNPDNSDVDKLFIQLVQTYNQLFEENPINASGVDAKAILSARLSKSRRLENLIAQLPGEKKNGLFGNLIALSLGLTPNFKSNFDLAEDAKLQLSKDTYDDDLDNLLAQIGDQYADLFLAAKNLSDAILLSDILRVNTEITKAPLSASMIKRYDEHHQDLTLLKALVRQQLPEKYKEIFFDQSKNGYAGYIDGGASQEEFYKFIKPILEKMDGTEELLVKLNREDLLRKQRTFDNGSIPHQIHLGELHAILRRQEDFYPFLKDNREKIEKILTFRIPYYVGPLARGNSRFAWMTRKSEETITPWNFEEVVDKGASAQSFIERMTNFDKNLPNEKVLPKHSLLYEYFTVYNELTKVKYVTEGMRKPAFLSGEQKKAIVDLLFKTNRKVTVKQLKEDYFKKIECFDSVEISGVEDRFNASLGTYHDLLKIIKDKDFLDNEENEDILEDIVLTLTLFEDREMIEERLKTYAHLFDDKVMKQLKRRRYTGWGRLSRKLINGIRDKQSGKTILDFLKSDGFANRNFMQLIHDDSLTFKEDIQKAQVSGQGDSLHEHIANLAGSPAIKKGILQTVKVVDELVKVMGRHKPENIVIEMARENQTTQKGQKNSRERMKRIEEGIKELGSQILKEHPVENTQLQNEKLYLYYLQNGRDMYVDQELDINRLSDYDVDHIVPQSFLKDDSIDNKVLTRSDKARGKSDNVPSEEVVKKMKNYWRQLLNAKLITQRKFDNLTKAERGGLSELDKAGFIKRQLVETRQITKHVAQILDSRMNTKYDENDKLIREVKVITLKSKLVSDFRKDFQFYKVREINNYHHAHDAYLNAVVGTALIKKYPKLESEFVYGDYKVYDVRKMIAKSEQEIGKATAKYFFYSNIMNFFKTEITLANGEIRKRPLIETNGETGEIVWDKGRDFATVRKVLSMPQVNIVKKTEVQTGGFSKESILPKRNSDKLIARKKDWDPKKYGGFDSPTVAYSVLVVAKVEKGKSKKLKSVKELLGITIMERSSFEKNPIDFLEAKGYKEVKKDLIIKLPKYSLFELENGRKRMLASAGELQKGNELALPSKYVNFLYLASHYEKLKGSPEDNEQKQLFVEQHKHYLDEIIEQISEFSKRVILADANLDKVLSAYNKHRDKPIREQAENIIHLFTLTNLGAPAAFKYFDTTIDRKRYTSTKEVLDATLIHQSITGLYETRIDLSQLGGDGGSGSETPGTSESATPESGGMDPLQLLQPLEAEIKGTKLKAHWNSGATITCVPQAFLEEEVPIKNIWIKTIHGEKEQPVYYLTFKIQGRKVEAEVISSPYDYILVSPSDIPWLMKKPLQLTTLVPLQEYEERLLKQTMLTGSYKEKLQSLFLKYDALWQHWENQVGHRRIKPHHIATGTVNPRPQKQYPINPKAKASIQTVINDLLKQGVLIQQNSIMNTPVYPVPKPDGKWRMVLDYREVNKTIPLIAAQNQHSAGILSSIFRGKYKTTLDLSNGFWAHSITPESYWLTAFTWLGQQYCWTRLPQGFLNSPALFNADVVDLLKEVPNVQVYVDDIYISHDDPREHLEQLEKVFSLLLNAGYVVSLKKSEIAQHEVEFLGFNITKEGRGLTETFKQKLLNITPPRDLKQLQSILGKLNFARNFIPNFSELVKPLYNIIATAPGKYITWTTDNSQQLQNIISMLNSAENLEERNPEVRLIMKVNTSPSAGYIRFYNEFAKRPIMYLNYVYTKAEVKFTNTEKLLTTIHKGLIKALDLGMGQEILVYSPIVSMTKIQKTPLPERKALPIRWITWMSYLEDPRIQFHYDKTLPELQQVPTVTDDIIAKIKHPSEFSMVFYTDGSAIKHPNVNKSHNAGMGIAQVQFKPEFTVINTWSIPLGDHTAQLAEVAAVEFACKKALKIDGPVLIVTDSFYVAESVNKELPYWQSNGFFNNKKKPLKHVSKWKSIADCIQLKPDIIIIHEKGHQPTASTFHTEGNNLADKLATQGSYVVNAGKRTADGSEFEKRTADGSEFESPKKKAKVE

SEQ ID NO: 657 - protein, 2177 aa, synthetic construct
MPAAKRVKLDGGDKKYSIGLDIGTNSVGWAVITDEYKVPSKKFKVLGNTDRHSIKKNLIGALLFDSGETAEATRLKRTARRRYTRRKNRICYLQEIFSNEMAKVDDSFFHRLEESFLVEEDKKHERHPIFGNIVDEVAYHEKYPTIYHLRKKLVDSTDKADLRLIYLALAHMIKFRGHFLIEGDLNPDNSDVDKLFIQLVQTYNQLFEENPINASGVDAKAILSARLSKSRRLENLIAQLPGEKKNGLFGNLIALSLGLTPNFKSNFDLAEDAKLQLSKDTYDDDLDNLLAQIGDQYADLFLAAKNLSDAILLSDILRVNTEITKAPLSASMIKRYDEHHQDLTLLKALVRQQLPEKYKEIFFDQSKNGYAGYIDGGASQEEFYKFIKPILEKMDGTEELLVKLNREDLLRKQRTFDNGSIPHQIHLGELHAILRRQEDFYPFLKDNREKIEKILTFRIPYYVGPLARGNSRFAWMTRKSEETITPWNFEEVVDKGASAQSFIERMTNFDKNLPNEKVLPKHSLLYEYFTVYNELTKVKYVTEGMRKPAFLSGEQKKAIVDLLFKTNRKVTVKQLKEDYFKKIECFDSVEISGVEDRFNASLGTYHDLLKIIKDKDFLDNEENEDILEDIVLTLTLFEDREMIEERLKTYAHLFDDKVMKQLKRRRYTGWGRLSRKLINGIRDKQSGKTILDFLKSDGFANRNFMQLIHDDSLTFKEDIQKAQVSGQGDSLHEHIANLAGSPAIKKGILQTVKVVDELVKVMGRHKPENIVIEMARENQTTQKGQKNSRERMKRIEEGIKELGSQILKEHPVENTQLQNEKLYLYYLQNGRDMYVDQELDINRLSDYDVDHIVPQSFLKDDSIDNKVLTRSDKARGKSDNVPSEEVVKKMKNYWRQLLNAKLITQRKFDNLTKAERGGLSELDKAGFIKRQLVETRQITKHVAQILDSRMNTKYDENDKLIREVKVITLKSKLVSDFRKDFQFYKVREINNYHHAHDAYLNAVVGTALIKKYPKLESEFVYGDYKVYDVRKMIAKSEQEIGKATAKYFFYSNIMNFFKTEITLANGEIRKRPLIETNGETGEIVWDKGRDFATVRKVLSMPQVNIVKKTEVQTGGFSKESILPKRNSDKLIARKKDWDPKKYGGFDSPTVAYSVLVVAKVEKGKSKKLKSVKELLGITIMERSSFEKNPIDFLEAKGYKEVKKDLIIKLPKYSLFELENGRKRMLASAGELQKGNELALPSKYVNFLYLASHYEKLKGSPEDNEQKQLFVEQHKHYLDEIIEQISEFSKRVILADANLDKVLSAYNKHRDKPIREQAENIIHLFTLTNLGAPAAFKYFDTTIDRKRYTSTKEVLDATLIHQSITGLYETRIDLSQLGGDGGGSAGSAAGSGEFGGMDPLQLLQPLEAEIKGTKLKAHWNSGATITCVPQAFLEEEVPIKNIWIKTIHGEKEQPVYYLTFKIQGRKVEAEVISSPYDYILVSPSDIPWLMKKPLQLTTLVPLQEYEERLLKQTMLTGSYKEKLQSLFLKYDALWQHWENQVGHRRIKPHHIATGTVNPRPQKQYPINPKAKASIQTVINDLLKQGVLIQQNSIMNTPVYPVPKPDGKWRMVLDYREVNKTIPLIAAQNQHSAGILSSIFRGKYKTTLDLSNGFWAHSITPESYWLTAFTWLGQQYCWTRLPQGFLNSPALFNADVVDLLKEVPNVQVYVDDIYISHDDPREHLEQLEKVFSLLLNAGYVVSLKKSEIAQHEVEFLGFNITKEGRGLTETFKQKLLNITPPRDLKQLQSILGKLNFARNFIPNFSELVKPLYNIIATAPGKYITWTTDNSQQLQNIISMLNSAENLEERNPEVRLIMKVNTSPSAGYIRFYNEFAKRPIMYLNYVYTKAEVKFTNTEKLLTTIHKGLIKALDLGMGQEILVYSPIVSMTKIQKTPLPERKALPIRWITWMSYLEDPRIQFHYDKTLPELQQVPTVTDDIIAKIKHPSEFSMVFYTDGSAIKHPNVNKSHNAGMGIAQVQFKPEFTVINTWSIPLGDHTAQLAEVAAVEFACKKALKIDGPVLIVTDSFYVAESVNKELPYWQSNGFFNNKKKPLKHVSKWKSIADCIQLKPDIIIIHEKGHQPTASTFHTEGNNLADKLATQGSYVVNAGKRTADGSEFEKRTADGSEFESPKKKAKVE

SEQ ID NO: 658 - protein, 2168 aa, synthetic construct
MPAAKRVKLDGGDKKYSIGLDIGTNSVGWAVITDEYKVPSKKFKVLGNTDRHSIKKNLIGALLFDSGETAEATRLKRTARRRYTRRKNRICYLQEIFSNEMAKVDDSFFHRLEESFLVEEDKKHERHPIFGNIVDEVAYHEKYPTIYHLRKKLVDSTDKADLRLIYLALAHMIKFRGHFLIEGDLNPDNSDVDKLFIQLVQTYNQLFEENPINASGVDAKAILSARLSKSRRLENLIAQLPGEKKNGLFGNLIALSLGLTPNFKSNFDLAEDAKLQLSKDTYDDDLDNLLAQIGDQYADLFLAAKNLSDAILLSDILRVNTEITKAPLSASMIKRYDEHHQDLTLLKALVRQQLPEKYKEIFFDQSKNGYAGYIDGGASQEEFYKFIKPILEKMDGTEELLVKLNREDLLRKQRTFDNGSIPHQIHLGELHAILRRQEDFYPFLKDNREKIEKILTFRIPYYVGPLARGNSRFAWMTRKSEETITPWNFEEVVDKGASAQSFIERMTNFDKNLPNEKVLPKHSLLYEYFTVYNELTKVKYVTEGMRKPAFLSGEQKKAIVDLLFKTNRKVTVKQLKEDYFKKIECFDSVEISGVEDRFNASLGTYHDLLKIIKDKDFLDNEENEDILEDIVLTLTLFEDREMIEERLKTYAHLFDDKVMKQLKRRRYTGWGRLSRKLINGIRDKQSGKTILDFLKSDGFANRNFMQLIHDDSLTFKEDIQKAQVSGQGDSLHEHIANLAGSPAIKKGILQTVKVVDELVKVMGRHKPENIVIEMARENQTTQKGQKNSRERMKRIEEGIKELGSQILKEHPVENTQLQNEKLYLYYLQNGRDMYVDQELDINRLSDYDVDHIVPQSFLKDDSIDNKVLTRSDKARGKSDNVPSEEVVKKMKNYWRQLLNAKLITQRKFDNLTKAERGGLSELDKAGFIKRQLVETRQITKHVAQILDSRMNTKYDENDKLIREVKVITLKSKLVSDFRKDFQFYKVREINNYHHAHDAYLNAVVGTALIKKYPKLESEFVYGDYKVYDVRKMIAKSEQEIGKATAKYFFYSNIMNFFKTEITLANGEIRKRPLIETNGETGEIVWDKGRDFATVRKVLSMPQVNIVKKTEVQTGGFSKESILPKRNSDKLIARKKDWDPKKYGGFDSPTVAYSVLVVAKVEKGKSKKLKSVKELLGITIMERSSFEKNPIDFLEAKGYKEVKKDLIIKLPKYSLFELENGRKRMLASAGELQKGNELALPSKYVNFLYLASHYEKLKGSPEDNEQKQLFVEQHKHYLDEIIEQISEFSKRVILADANLDKVLSAYNKHRDKPIREQAENIIHLFTLTNLGAPAAFKYFDTTIDRKRYTSTKEVLDATLIHQSITGLYETRIDLSQLGGDGGGGGGGMDPLQLLQPLEAEIKGTKLKAHWNSGATITCVPQAFLEEEVPIKNIWIKTIHGEKEQPVYYLTFKIQGRKVEAEVISSPYDYILVSPSDIPWLMKKPLQLTTLVPLQEYEERLLKQTMLTGSYKEKLQSLFLKYDALWQHWENQVGHRRIKPHHIATGTVNPRPQKQYPINPKAKASIQTVINDLLKQGVLIQQNSIMNTPVYPVPKPDGKWRMVLDYREVNKTIPLIAAQNQHSAGILSSIFRGKYKTTLDLSNGFWAHSITPESYWLTAFTWLGQQYCWTRLPQGFLNSPALFNADVVDLLKEVPNVQVYVDDIYISHDDPREHLEQLEKVFSLLLNAGYVVSLKKSEIAQHEVEFLGFNITKEGRGLTETFKQKLLNITPPRDLKQLQSILGKLNFARNFIPNFSELVKPLYNIIATAPGKYITWTTDNSQQLQNIISMLNSAENLEERNPEVRLIMKVNTSPSAGYIRFYNEFAKRPIMYLNYVYTKAEVKFTNTEKLLTTIHKGLIKALDLGMGQEILVYSPIVSMTKIQKTPLPERKALPIRWITWMSYLEDPRIQFHYDKTLPELQQVPTVTDDIIAKIKHPSEFSMVFYTDGSAIKHPNVNKSHNAGMGIAQVQFKPEFTVINTWSIPLGDHTAQLAEVAAVEFACKKALKIDGPVLIVTDSFYVAESVNKELPYWQSNGFFNNKKKPLKHVSKWKSIADCIQLKPDIIIIHEKGHQPTASTFHTEGNNLADKLATQGSYVVNAGKRTADGSEFEKRTADGSEFESPKKKAKVE

SEQ ID NO: 659 - protein, 2176 aa, synthetic construct
MPAAKRVKLDGGDKKYSIGLDIGTNSVGWAVITDEYKVPSKKFKVLGNTDRHSIKKNLIGALLFDSGETAEATRLKRTARRRYTRRKNRICYLQEIFSNEMAKVDDSFFHRLEESFLVEEDKKHERHPIFGNIVDEVAYHEKYPTIYHLRKKLVDSTDKADLRLIYLALAHMIKFRGHFLIEGDLNPDNSDVDKLFIQLVQTYNQLFEENPINASGVDAKAILSARLSKSRRLENLIAQLPGEKKNGLFGNLIALSLGLTPNFKSNFDLAEDAKLQLSKDTYDDDLDNLLAQIGDQYADLFLAAKNLSDAILLSDILRVNTEITKAPLSASMIKRYDEHHQDLTLLKALVRQQLPEKYKEIFFDQSKNGYAGYIDGGASQEEFYKFIKPILEKMDGTEELLVKLNREDLLRKQRTFDNGSIPHQIHLGELHAILRRQEDFYPFLKDNREKIEKILTFRIPYYVGPLARGNSRFAWMTRKSEETITPWNFEEVVDKGASAQSFIERMTNFDKNLPNEKVLPKHSLLYEYFTVYNELTKVKYVTEGMRKPAFLSGEQKKAIVDLLFKTNRKVTVKQLKEDYFKKIECFDSVEISGVEDRFNASLGTYHDLLKIIKDKDFLDNEENEDILEDIVLTLTLFEDREMIEERLKTYAHLFDDKVMKQLKRRRYTGWGRLSRKLINGIRDKQSGKTILDFLKSDGFANRNFMQLIHDDSLTFKEDIQKAQVSGQGDSLHEHIANLAGSPAIKKGILQTVKVVDELVKVMGRHKPENIVIEMARENQTTQKGQKNSRERMKRIEEGIKELGSQILKEHPVENTQLQNEKLYLYYLQNGRDMYVDQELDINRLSDYDVDHIVPQSFLKDDSIDNKVLTRSDKARGKSDNVPSEEVVKKMKNYWRQLLNAKLITQRKFDNLTKAERGGLSELDKAGFIKRQLVETRQITKHVAQILDSRMNTKYDENDKLIREVKVITLKSKLVSDFRKDFQFYKVREINNYHHAHDAYLNAVVGTALIKKYPKLESEFVYGDYKVYDVRKMIAKSEQEIGKATAKYFFYSNIMNFFKTEITLANGEIRKRPLIETNGETGEIVWDKGRDFATVRKVLSMPQVNIVKKTEVQTGGFSKESILPKRNSDKLIARKKDWDPKKYGGFDSPTVAYSVLVVAKVEKGKSKKLKSVKELLGITIMERSSFEKNPIDFLEAKGYKEVKKDLIIKLPKYSLFELENGRKRMLASAGELQKGNELALPSKYVNFLYLASHYEKLKGSPEDNEQKQLFVEQHKHYLDEIIEQISEFSKRVILADANLDKVLSAYNKHRDKPIREQAENIIHLFTLTNLGAPAAFKYFDTTIDRKRYTSTKEVLDATLIHQSITGLYETRIDLSQLGGDGGGGSGGGEAAAKGGMDPLQLLQPLEAEIKGTKLKAHWNSGATITCVPQAFLEEEVPIKNIWIKTIHGEKEQPVYYLTFKIQGRKVEAEVISSPYDYILVSPSDIPWLMKKPLQLTTLVPLQEYEERLLKQTMLTGSYKEKLQSLFLKYDALWQHWENQVGHRRIKPHHIATGTVNPRPQKQYPINPKAKASIQTVINDLLKQGVLIQQNSIMNTPVYPVPKPDGKWRMVLDYREVNKTIPLIAAQNQHSAGILSSIFRGKYKTTLDLSNGFWAHSITPESYWLTAFTWLGQQYCWTRLPQGFLNSPALFNADVVDLLKEVPNVQVYVDDIYISHDDPREHLEQLEKVFSLLLNAGYVVSLKKSEIAQHEVEFLGFNITKEGRGLTETFKQKLLNITPPRDLKQLQSILGKLNFARNFIPNFSELVKPLYNIIATAPGKYITWTTDNSQQLQNIISMLNSAENLEERNPEVRLIMKVNTSPSAGYIRFYNEFAKRPIMYLNYVYTKAEVKFTNTEKLLTTIHKGLIKALDLGMGQEILVYSPIVSMTKIQKTPLPERKALPIRWITWMSYLEDPRIQFHYDKTLPELQQVPTVTDDIIAKIKHPSEFSMVFYTDGSAIKHPNVNKSHNAGMGIAQVQFKPEFTVINTWSIPLGDHTAQLAEVAAVEFACKKALKIDGPVLIVTDSFYVAESVNKELPYWQSNGFFNNKKKPLKHVSKWKSIADCIQLKPDIIIIHEKGHQPTASTFHTEGNNLADKLATQGSYVVNAGKRTADGSEFEKRTADGSEFESPKKKAKVE

SEQ ID NO: 660 - protein, 2180 aa, synthetic construct
MPAAKRVKLDGGDKKYSIGLDIGTNSVGWAVITDEYKVPSKKFKVLGNTDRHSIKKNLIGALLFDSGETAEATRLKRTARRRYTRRKNRICYLQEIFSNEMAKVDDSFFHRLEESFLVEEDKKHERHPIFGNIVDEVAYHEKYPTIYHLRKKLVDSTDKADLRLIYLALAHMIKFRGHFLIEGDLNPDNSDVDKLFIQLVQTYNQLFEENPINASGVDAKAILSARLSKSRRLENLIAQLPGEKKNGLFGNLIALSLGLTPNFKSNFDLAEDAKLQLSKDTYDDDLDNLLAQIGDQYADLFLAAKNLSDAILLSDILRVNTEITKAPLSASMIKRYDEHHQDLTLLKALVRQQLPEKYKEIFFDQSKNGYAGYIDGGASQEEFYKFIKPILEKMDGTEELLVKLNREDLLRKQRTFDNGSIPHQIHLGELHAILRRQEDFYPFLKDNREKIEKILTFRIPYYVGPLARGNSRFAWMTRKSEETITPWNFEEVVDKGASAQSFIERMTNFDKNLPNEKVLPKHSLLYEYFTVYNELTKVKYVTEGMRKPAFLSGEQKKAIVDLLFKTNRKVTVKQLKEDYFKKIECFDSVEISGVEDRFNASLGTYHDLLKIIKDKDFLDNEENEDILEDIVLTLTLFEDREMIEERLKTYAHLFDDKVMKQLKRRRYTGWGRLSRKLINGIRDKQSGKTILDFLKSDGFANRNFMQLIHDDSLTFKEDIQKAQVSGQGDSLHEHIANLAGSPAIKKGILQTVKVVDELVKVMGRHKPENIVIEMARENQTTQKGQKNSRERMKRIEEGIKELGSQILKEHPVENTQLQNEKLYLYYLQNGRDMYVDQELDINRLSDYDVDHIVPQSFLKDDSIDNKVLTRSDKARGKSDNVPSEEVVKKMKNYWRQLLNAKLITQRKFDNLTKAERGGLSELDKAGFIKRQLVETRQITKHVAQILDSRMNTKYDENDKLIREVKVITLKSKLVSDFRKDFQFYKVREINNYHHAHDAYLNAVVGTALIKKYPKLESEFVYGDYKVYDVRKMIAKSEQEIGKATAKYFFYSNIMNFFKTEITLANGEIRKRPLIETNGETGEIVWDKGRDFATVRKVLSMPQVNIVKKTEVQTGGFSKESILPKRNSDKLIARKKDWDPKKYGGFDSPTVAYSVLVVAKVEKGKSKKLKSVKELLGITIMERSSFEKNPIDFLEAKGYKEVKKDLIIKLPKYSLFELENGRKRMLASAGELQKGNELALPSKYVNFLYLASHYEKLKGSPEDNEQKQLFVEQHKHYLDEIIEQISEFSKRVILADANLDKVLSAYNKHRDKPIREQAENIIHLFTLTNLGAPAAFKYFDTTIDRKRYTSTKEVLDATLIHQSITGLYETRIDLSQLGGDGGEAAAKGGGGSEAAAKGGMDPLQLLQPLEAEIKGTKLKAHWNSGATITCVPQAFLEEEVPIKNIWIKTIHGEKEQPVYYLTFKIQGRKVEAEVISSPYDYILVSPSDIPWLMKKPLQLTTLVPLQEYEERLLKQTMLTGSYKEKLQSLFLKYDALWQHWENQVGHRRIKPHHIATGTVNPRPQKQYPINPKAKASIQTVINDLLKQGVLIQQNSIMNTPVYPVPKPDGKWRMVLDYREVNKTIPLIAAQNQHSAGILSSIFRGKYKTTLDLSNGFWAHSITPESYWLTAFTWLGQQYCWTRLPQGFLNSPALFNADVVDLLKEVPNVQVYVDDIYISHDDPREHLEQLEKVFSLLLNAGYVVSLKKSEIAQHEVEFLGFNITKEGRGLTETFKQKLLNITPPRDLKQLQSILGKLNFARNFIPNFSELVKPLYNIIATAPGKYITWTTDNSQQLQNIISMLNSAENLEERNPEVRLIMKVNTSPSAGYIRFYNEFAKRPIMYLNYVYTKAEVKFTNTEKLLTTIHKGLIKALDLGMGQEILVYSPIVSMTKIQKTPLPERKALPIRWITWMSYLEDPRIQFHYDKTLPELQQVPTVTDDIIAKIKHPSEFSMVFYTDGSAIKHPNVNKSHNAGMGIAQVQFKPEFTVINTWSIPLGDHTAQLAEVAAVEFACKKALKIDGPVLIVTDSFYVAESVNKELPYWQSNGFFNNKKKPLKHVSKWKSIADCIQLKPDIIIIHEKGHQPTASTFHTEGNNLADKLATQGSYVVNAGKRTADGSEFEKRTADGSEFESPKKKAKVE

SEQ ID NO: 661 - protein, 2176 aa, synthetic construct
MPAAKRVKLDGGDKKYSIGLDIGTNSVGWAVITDEYKVPSKKFKVLGNTDRHSIKKNLIGALLFDSGETAEATRLKRTARRRYTRRKNRICYLQEIFSNEMAKVDDSFFHRLEESFLVEEDKKHERHPIFGNIVDEVAYHEKYPTIYHLRKKLVDSTDKADLRLIYLALAHMIKFRGHFLIEGDLNPDNSDVDKLFIQLVQTYNQLFEENPINASGVDAKAILSARLSKSRRLENLIAQLPGEKKNGLFGNLIALSLGLTPNFKSNFDLAEDAKLQLSKDTYDDDLDNLLAQIGDQYADLFLAAKNLSDAILLSDILRVNTEITKAPLSASMIKRYDEHHQDLTLLKALVRQQLPEKYKEIFFDQSKNGYAGYIDGGASQEEFYKFIKPILEKMDGTEELLVKLNREDLLRKQRTFDNGSIPHQIHLGELHAILRRQEDFYPFLKDNREKIEKILTFRIPYYVGPLARGNSRFAWMTRKSEETITPWNFEEVVDKGASAQSFIERMTNFDKNLPNEKVLPKHSLLYEYFTVYNELTKVKYVTEGMRKPAFLSGEQKKAIVDLLFKTNRKVTVKQLKEDYFKKIECFDSVEISGVEDRFNASLGTYHDLLKIIKDKDFLDNEENEDILEDIVLTLTLFEDREMIEERLKTYAHLFDDKVMKQLKRRRYTGWGRLSRKLINGIRDKQSGKTILDFLKSDGFANRNFMQLIHDDSLTFKEDIQKAQVSGQGDSLHEHIANLAGSPAIKKGILQTVKVVDELVKVMGRHKPENIVIEMARENQTTQKGQKNSRERMKRIEEGIKELGSQILKEHPVENTQLQNEKLYLYYLQNGRDMYVDQELDINRLSDYDVDHIVPQSFLKDDSIDNKVLTRSDKARGKSDNVPSEEVVKKMKNYWRQLLNAKLITQRKFDNLTKAERGGLSELDKAGFIKRQLVETRQITKHVAQILDSRMNTKYDENDKLIREVKVITLKSKLVSDFRKDFQFYKVREINNYHHAHDAYLNAVVGTALIKKYPKLESEFVYGDYKVYDVRKMIAKSEQEIGKATAKYFFYSNIMNFFKTEITLANGEIRKRPLIETNGETGEIVWDKGRDFATVRKVLSMPQVNIVKKTEVQTGGFSKESILPKRNSDKLIARKKDWDPKKYGGFDSPTVAYSVLVVAKVEKGKSKKLKSVKELLGITIMERSSFEKNPIDFLEAKGYKEVKKDLIIKLPKYSLFELENGRKRMLASAGELQKGNELALPSKYVNFLYLASHYEKLKGSPEDNEQKQLFVEQHKHYLDEIIEQISEFSKRVILADANLDKVLSAYNKHRDKPIREQAENIIHLFTLTNLGAPAAFKYFDTTIDRKRYTSTKEVLDATLIHQSITGLYETRIDLSQLGGDGGGGSEAAAKGGGGGMDPLQLLQPLEAEIKGTKLKAHWNSGATITCVPQAFLEEEVPIKNIWIKTIHGEKEQPVYYLTFKIQGRKVEAEVISSPYDYILVSPSDIPWLMKKPLQLTTLVPLQEYEERLLKQTMLTGSYKEKLQSLFLKYDALWQHWENQVGHRRIKPHHIATGTVNPRPQKQYPINPKAKASIQTVINDLLKQGVLIQQNSIMNTPVYPVPKPDGKWRMVLDYREVNKTIPLIAAQNQHSAGILSSIFRGKYKTTLDLSNGFWAHSITPESYWLTAFTWLGQQYCWTRLPQGFLNSPALFNADVVDLLKEVPNVQVYVDDIYISHDDPREHLEQLEKVFSLLLNAGYVVSLKKSEIAQHEVEFLGFNITKEGRGLTETFKQKLLNITPPRDLKQLQSILGKLNFARNFIPNFSELVKPLYNIIATAPGKYITWTTDNSQQLQNIISMLNSAENLEERNPEVRLIMKVNTSPSAGYIRFYNEFAKRPIMYLNYVYTKAEVKFTNTEKLLTTIHKGLIKALDLGMGQEILVYSPIVSMTKIQKTPLPERKALPIRWITWMSYLEDPRIQFHYDKTLPELQQVPTVTDDIIAKIKHPSEFSMVFYTDGSAIKHPNVNKSHNAGMGIAQVQFKPEFTVINTWSIPLGDHTAQLAEVAAVEFACKKALKIDGPVLIVTDSFYVAESVNKELPYWQSNGFFNNKKKPLKHVSKWKSIADCIQLKPDIIIIHEKGHQPTASTFHTEGNNLADKLATQGSYVVNAGKRTADGSEFEKRTADGSEFESPKKKAKVE

SEQ ID NO: 662 - protein, 2183 aa, synthetic construct
MPAAKRVKLDGGDKKYSIGLDIGTNSVGWAVITDEYKVPSKKFKVLGNTDRHSIKKNLIGALLFDSGETAEATRLKRTARRRYTRRKNRICYLQEIFSNEMAKVDDSFFHRLEESFLVEEDKKHERHPIFGNIVDEVAYHEKYPTIYHLRKKLVDSTDKADLRLIYLALAHMIKFRGHFLIEGDLNPDNSDVDKLFIQLVQTYNQLFEENPINASGVDAKAILSARLSKSRRLENLIAQLPGEKKNGLFGNLIALSLGLTPNFKSNFDLAEDAKLQLSKDTYDDDLDNLLAQIGDQYADLFLAAKNLSDAILLSDILRVNTEITKAPLSASMIKRYDEHHQDLTLLKALVRQQLPEKYKEIFFDQSKNGYAGYIDGGASQEEFYKFIKPILEKMDGTEELLVKLNREDLLRKQRTFDNGSIPHQIHLGELHAILRRQEDFYPFLKDNREKIEKILTFRIPYYVGPLARGNSRFAWMTRKSEETITPWNFEEVVDKGASAQSFIERMTNFDKNLPNEKVLPKHSLLYEYFTVYNELTKVKYVTEGMRKPAFLSGEQKKAIVDLLFKTNRKVTVKQLKEDYFKKIECFDSVEISGVEDRFNASLGTYHDLLKIIKDKDFLDNEENEDILEDIVLTLTLFEDREMIEERLKTYAHLFDDKVMKQLKRRRYTGWGRLSRKLINGIRDKQSGKTILDFLKSDGFANRNFMQLIHDDSLTFKEDIQKAQVSGQGDSLHEHIANLAGSPAIKKGILQTVKVVDELVKVMGRHKPENIVIEMARENQTTQKGQKNSRERMKRIEEGIKELGSQILKEHPVENTQLQNEKLYLYYLQNGRDMYVDQELDINRLSDYDVDHIVPQSFLKDDSIDNKVLTRSDKARGKSDNVPSEEVVKKMKNYWRQLLNAKLITQRKFDNLTKAERGGLSELDKAGFIKRQLVETRQITKHVAQILDSRMNTKYDENDKLIREVKVITLKSKLVSDFRKDFQFYKVREINNYHHAHDAYLNAVVGTALIKKYPKLESEFVYGDYKVYDVRKMIAKSEQEIGKATAKYFFYSNIMNFFKTEITLANGEIRKRPLIETNGETGEIVWDKGRDFATVRKVLSMPQVNIVKKTEVQTGGFSKESILPKRNSDKLIARKKDWDPKKYGGFDSPTVAYSVLVVAKVEKGKSKKLKSVKELLGITIMERSSFEKNPIDFLEAKGYKEVKKDLIIKLPKYSLFELENGRKRMLASAGELQKGNELALPSKYVNFLYLASHYEKLKGSPEDNEQKQLFVEQHKHYLDEIIEQISEFSKRVILADANLDKVLSAYNKHRDKPIREQAENIIHLFTLTNLGAPAAFKYFDTTIDRKRYTSTKEVLDATLIHQSITGLYETRIDLSQLGGDGGGSSGSSGSSGSSGSSGSSGGMDPLQLLQPLEAEIKGTKLKAHWNSGATITCVPQAFLEEEVPIKNIWIKTIHGEKEQPVYYLTFKIQGRKVEAEVISSPYDYILVSPSDIPWLMKKPLQLTTLVPLQEYEERLLKQTMLTGSYKEKLQSLFLKYDALWQHWENQVGHRRIKPHHIATGTVNPRPQKQYPINPKAKASIQTVINDLLKQGVLIQQNSIMNTPVYPVPKPDGKWRMVLDYREVNKTIPLIAAQNQHSAGILSSIFRGKYKTTLDLSNGFWAHSITPESYWLTAFTWLGQQYCWTRLPQGFLNSPALFNADVVDLLKEVPNVQVYVDDIYISHDDPREHLEQLEKVFSLLLNAGYVVSLKKSEIAQHEVEFLGFNITKEGRGLTETFKQKLLNITPPRDLKQLQSILGKLNFARNFIPNFSELVKPLYNIIATAPGKYITWTTDNSQQLQNIISMLNSAENLEERNPEVRLIMKVNTSPSAGYIRFYNEFAKRPIMYLNYVYTKAEVKFTNTEKLLTTIHKGLIKALDLGMGQEILVYSPIVSMTKIQKTPLPERKALPIRWITWMSYLEDPRIQFHYDKTLPELQQVPTVTDDIIAKIKHPSEFSMVFYTDGSAIKHPNVNKSHNAGMGIAQVQFKPEFTVINTWSIPLGDHTAQLAEVAAVEFACKKALKIDGPVLIVTDSFYVAESVNKELPYWQSNGFFNNKKKPLKHVSKWKSIADCIQLKPDIIIIHEKGHQPTASTFHTEGNNLADKLATQGSYVVNAGKRTADGSEFEKRTADGSEFESPKKKAKVE

SEQ ID NO: 663 - protein, 2176 aa, synthetic construct
MPAAKRVKLDGGDKKYSIGLDIGTNSVGWAVITDEYKVPSKKFKVLGNTDRHSIKKNLIGALLFDSGETAEATRLKRTARRRYTRRKNRICYLQEIFSNEMAKVDDSFFHRLEESFLVEEDKKHERHPIFGNIVDEVAYHEKYPTIYHLRKKLVDSTDKADLRLIYLALAHMIKFRGHFLIEGDLNPDNSDVDKLFIQLVQTYNQLFEENPINASGVDAKAILSARLSKSRRLENLIAQLPGEKKNGLFGNLIALSLGLTPNFKSNFDLAEDAKLQLSKDTYDDDLDNLLAQIGDQYADLFLAAKNLSDAILLSDILRVNTEITKAPLSASMIKRYDEHHQDLTLLKALVRQQLPEKYKEIFFDQSKNGYAGYIDGGASQEEFYKFIKPILEKMDGTEELLVKLNREDLLRKQRTFDNGSIPHQIHLGELHAILRRQEDFYPFLKDNREKIEKILTFRIPYYVGPLARGNSRFAWMTRKSEETITPWNFEEVVDKGASAQSFIERMTNFDKNLPNEKVLPKHSLLYEYFTVYNELTKVKYVTEGMRKPAFLSGEQKKAIVDLLFKTNRKVTVKQLKEDYFKKIECFDSVEISGVEDRFNASLGTYHDLLKIIKDKDFLDNEENEDILEDIVLTLTLFEDREMIEERLKTYAHLFDDKVMKQLKRRRYTGWGRLSRKLINGIRDKQSGKTILDFLKSDGFANRNFMQLIHDDSLTFKEDIQKAQVSGQGDSLHEHIANLAGSPAIKKGILQTVKVVDELVKVMGRHKPENIVIEMARENQTTQKGQKNSRERMKRIEEGIKELGSQILKEHPVENTQLQNEKLYLYYLQNGRDMYVDQELDINRLSDYDVDHIVPQSFLKDDSIDNKVLTRSDKARGKSDNVPSEEVVKKMKNYWRQLLNAKLITQRKFDNLTKAERGGLSELDKAGFIKRQLVETRQITKHVAQILDSRMNTKYDENDKLIREVKVITLKSKLVSDFRKDFQFYKVREINNYHHAHDAYLNAVVGTALIKKYPKLESEFVYGDYKVYDVRKMIAKSEQEIGKATAKYFFYSNIMNFFKTEITLANGEIRKRPLIETNGETGEIVWDKGRDFATVRKVLSMPQVNIVKKTEVQTGGFSKESILPKRNSDKLIARKKDWDPKKYGGFDSPTVAYSVLVVAKVEKGKSKKLKSVKELLGITIMERSSFEKNPIDFLEAKGYKEVKKDLIIKLPKYSLFELENGRKRMLASAGELQKGNELALPSKYVNFLYLASHYEKLKGSPEDNEQKQLFVEQHKHYLDEIIEQISEFSKRVILADANLDKVLSAYNKHRDKPIREQAENIIHLFTLTNLGAPAAFKYFDTTIDRKRYTSTKEVLDATLIHQSITGLYETRIDLSQLGGDGGGGGPAPEAAAKGGMDPLQLLQPLEAEIKGTKLKAHWNSGATITCVPQAFLEEEVPIKNIWIKTIHGEKEQPVYYLTFKIQGRKVEAEVISSPYDYILVSPSDIPWLMKKPLQLTTLVPLQEYEERLLKQTMLTGSYKEKLQSLFLKYDALWQHWENQVGHRRIKPHHIATGTVNPRPQKQYPINPKAKASIQTVINDLLKQGVLIQQNSIMNTPVYPVPKPDGKWRMVLDYREVNKTIPLIAAQNQHSAGILSSIFRGKYKTTLDLSNGFWAHSITPESYWLTAFTWLGQQYCWTRLPQGFLNSPALFNADVVDLLKEVPNVQVYVDDIYISHDDPREHLEQLEKVFSLLLNAGYVVSLKKSEIAQHEVEFLGFNITKEGRGLTETFKQKLLNITPPRDLKQLQSILGKLNFARNFIPNFSELVKPLYNIIATAPGKYITWTTDNSQQLQNIISMLNSAENLEERNPEVRLIMKVNTSPSAGYIRFYNEFAKRPIMYLNYVYTKAEVKFTNTEKLLTTIHKGLIKALDLGMGQEILVYSPIVSMTKIQKTPLPERKALPIRWITWMSYLEDPRIQFHYDKTLPELQQVPTVTDDIIAKIKHPSEFSMVFYTDGSAIKHPNVNKSHNAGMGIAQVQFKPEFTVINTWSIPLGDHTAQLAEVAAVEFACKKALKIDGPVLIVTDSFYVAESVNKELPYWQSNGFFNNKKKPLKHVSKWKSIADCIQLKPDIIIIHEKGHQPTASTFHTEGNNLADKLATQGSYVVNAGKRTADGSEFEKRTADGSEFESPKKKAKVE

SEQ ID NO: 664 - protein, 2176 aa, synthetic construct
MPAAKRVKLDGGDKKYSIGLDIGTNSVGWAVITDEYKVPSKKFKVLGNTDRHSIKKNLIGALLFDSGETAEATRLKRTARRRYTRRKNRICYLQEIFSNEMAKVDDSFFHRLEESFLVEEDKKHERHPIFGNIVDEVAYHEKYPTIYHLRKKLVDSTDKADLRLIYLALAHMIKFRGHFLIEGDLNPDNSDVDKLFIQLVQTYNQLFEENPINASGVDAKAILSARLSKSRRLENLIAQLPGEKKNGLFGNLIALSLGLTPNFKSNFDLAEDAKLQLSKDTYDDDLDNLLAQIGDQYADLFLAAKNLSDAILLSDILRVNTEITKAPLSASMIKRYDEHHQDLTLLKALVRQQLPEKYKEIFFDQSKNGYAGYIDGGASQEEFYKFIKPILEKMDGTEELLVKLNREDLLRKQRTFDNGSIPHQIHLGELHAILRRQEDFYPFLKDNREKIEKILTFRIPYYVGPLARGNSRFAWMTRKSEETITPWNFEEVVDKGASAQSFIERMTNFDKNLPNEKVLPKHSLLYEYFTVYNELTKVKYVTEGMRKPAFLSGEQKKAIVDLLFKTNRKVTVKQLKEDYFKKIECFDSVEISGVEDRFNASLGTYHDLLKIIKDKDFLDNEENEDILEDIVLTLTLFEDREMIEERLKTYAHLFDDKVMKQLKRRRYTGWGRLSRKLINGIRDKQSGKTILDFLKSDGFANRNFMQLIHDDSLTFKEDIQKAQVSGQGDSLHEHIANLAGSPAIKKGILQTVKVVDELVKVMGRHKPENIVIEMARENQTTQKGQKNSRERMKRIEEGIKELGSQILKEHPVENTQLQNEKLYLYYLQNGRDMYVDQELDINRLSDYDVDHIVPQSFLKDDSIDNKVLTRSDKARGKSDNVPSEEVVKKMKNYWRQLLNAKLITQRKFDNLTKAERGGLSELDKAGFIKRQLVETRQITKHVAQILDSRMNTKYDENDKLIREVKVITLKSKLVSDFRKDFQFYKVREINNYHHAHDAYLNAVVGTALIKKYPKLESEFVYGDYKVYDVRKMIAKSEQEIGKATAKYFFYSNIMNFFKTEITLANGEIRKRPLIETNGETGEIVWDKGRDFATVRKVLSMPQVNIVKKTEVQTGGFSKESILPKRNSDKLIARKKDWDPKKYGGFDSPTVAYSVLVVAKVEKGKSKKLKSVKELLGITIMERSSFEKNPIDFLEAKGYKEVKKDLIIKLPKYSLFELENGRKRMLASAGELQKGNELALPSKYVNFLYLASHYEKLKGSPEDNEQKQLFVEQHKHYLDEIIEQISEFSKRVILADANLDKVLSAYNKHRDKPIREQAENIIHLFTLTNLGAPAAFKYFDTTIDRKRYTSTKEVLDATLIHQSITGLYETRIDLSQLGGDGGEAAAKPAPGGGGGMDPLQLLQPLEAEIKGTKLKAHWNSGATITCVPQAFLEEEVPIKNIWIKTIHGEKEQPVYYLTFKIQGRKVEAEVISSPYDYILVSPSDIPWLMKKPLQLTTLVPLQEYEERLLKQTMLTGSYKEKLQSLFLKYDALWQHWENQVGHRRIKPHHIATGTVNPRPQKQYPINPKAKASIQTVINDLLKQGVLIQQNSIMNTPVYPVPKPDGKWRMVLDYREVNKTIPLIAAQNQHSAGILSSIFRGKYKTTLDLSNGFWAHSITPESYWLTAFTWLGQQYCWTRLPQGFLNSPALFNADVVDLLKEVPNVQVYVDDIYISHDDPREHLEQLEKVFSLLLNAGYVVSLKKSEIAQHEVEFLGFNITKEGRGLTETFKQKLLNITPPRDLKQLQSILGKLNFARNFIPNFSELVKPLYNIIATAPGKYITWTTDNSQQLQNIISMLNSAENLEERNPEVRLIMKVNTSPSAGYIRFYNEFAKRPIMYLNYVYTKAEVKFTNTEKLLTTIHKGLIKALDLGMGQEILVYSPIVSMTKIQKTPLPERKALPIRWITWMSYLEDPRIQFHYDKTLPELQQVPTVTDDIIAKIKHPSEFSMVFYTDGSAIKHPNVNKSHNAGMGIAQVQFKPEFTVINTWSIPLGDHTAQLAEVAAVEFACKKALKIDGPVLIVTDSFYVAESVNKELPYWQSNGFFNNKKKPLKHVSKWKSIADCIQLKPDIIIIHEKGHQPTASTFHTEGNNLADKLATQGSYVVNAGKRTADGSEFEKRTADGSEFESPKKKAKVE

SEQ ID NO: 665 - protein, 2176 aa, synthetic construct
MPAAKRVKLDGGDKKYSIGLDIGTNSVGWAVITDEYKVPSKKFKVLGNTDRHSIKKNLIGALLFDSGETAEATRLKRTARRRYTRRKNRICYLQEIFSNEMAKVDDSFFHRLEESFLVEEDKKHERHPIFGNIVDEVAYHEKYPTIYHLRKKLVDSTDKADLRLIYLALAHMIKFRGHFLIEGDLNPDNSDVDKLFIQLVQTYNQLFEENPINASGVDAKAILSARLSKSRRLENLIAQLPGEKKNGLFGNLIALSLGLTPNFKSNFDLAEDAKLQLSKDTYDDDLDNLLAQIGDQYADLFLAAKNLSDAILLSDILRVNTEITKAPLSASMIKRYDEHHQDLTLLKALVRQQLPEKYKEIFFDQSKNGYAGYIDGGASQEEFYKFIKPILEKMDGTEELLVKLNREDLLRKQRTFDNGSIPHQIHLGELHAILRRQEDFYPFLKDNREKIEKILTFRIPYYVGPLARGNSRFAWMTRKSEETITPWNFEEVVDKGASAQSFIERMTNFDKNLPNEKVLPKHSLLYEYFTVYNELTKVKYVTEGMRKPAFLSGEQKKAIVDLLFKTNRKVTVKQLKEDYFKKIECFDSVEISGVEDRFNASLGTYHDLLKIIKDKDFLDNEENEDILEDIVLTLTLFEDREMIEERLKTYAHLFDDKVMKQLKRRRYTGWGRLSRKLINGIRDKQSGKTILDFLKSDGFANRNFMQLIHDDSLTFKEDIQKAQVSGQGDSLHEHIANLAGSPAIKKGILQTVKVVDELVKVMGRHKPENIVIEMARENQTTQKGQKNSRERMKRIEEGIKELGSQILKEHPVENTQLQNEKLYLYYLQNGRDMYVDQELDINRLSDYDVDHIVPQSFLKDDSIDNKVLTRSDKARGKSDNVPSEEVVKKMKNYWRQLLNAKLITQRKFDNLTKAERGGLSELDKAGFIKRQLVETRQITKHVAQILDSRMNTKYDENDKLIREVKVITLKSKLVSDFRKDFQFYKVREINNYHHAHDAYLNAVVGTALIKKYPKLESEFVYGDYKVYDVRKMIAKSEQEIGKATAKYFFYSNIMNFFKTEITLANGEIRKRPLIETNGETGEIVWDKGRDFATVRKVLSMPQVNIVKKTEVQTGGFSKESILPKRNSDKLIARKKDWDPKKYGGFDSPTVAYSVLVVAKVEKGKSKKLKSVKELLGITIMERSSFEKNPIDFLEAKGYKEVKKDLIIKLPKYSLFELENGRKRMLASAGELQKGNELALPSKYVNFLYLASHYEKLKGSPEDNEQKQLFVEQHKHYLDEIIEQISEFSKRVILADANLDKVLSAYNKHRDKPIREQAENIIHLFTLTNLGAPAAFKYFDTTIDRKRYTSTKEVLDATLIHQSITGLYETRIDLSQLGGDGGEAAAKGGSGSSGGMDPLQLLQPLEAEIKGTKLKAHWNSGATITCVPQAFLEEEVPIKNIWIKTIHGEKEQPVYYLTFKIQGRKVEAEVISSPYDYILVSPSDIPWLMKKPLQLTTLVPLQEYEERLLKQTMLTGSYKEKLQSLFLKYDALWQHWENQVGHRRIKPHHIATGTVNPRPQKQYPINPKAKASIQTVINDLLKQGVLIQQNSIMNTPVYPVPKPDGKWRMVLDYREVNKTIPLIAAQNQHSAGILSSIFRGKYKTTLDLSNGFWAHSITPESYWLTAFTWLGQQYCWTRLPQGFLNSPALFNADVVDLLKEVPNVQVYVDDIYISHDDPREHLEQLEKVFSLLLNAGYVVSLKKSEIAQHEVEFLGFNITKEGRGLTETFKQKLLNITPPRDLKQLQSILGKLNFARNFIPNFSELVKPLYNIIATAPGKYITWTTDNSQQLQNIISMLNSAENLEERNPEVRLIMKVNTSPSAGYIRFYNEFAKRPIMYLNYVYTKAEVKFTNTEKLLTTIHKGLIKALDLGMGQEILVYSPIVSMTKIQKTPLPERKALPIRWITWMSYLEDPRIQFHYDKTLPELQQVPTVTDDIIAKIKHPSEFSMVFYTDGSAIKHPNVNKSHNAGMGIAQVQFKPEFTVINTWSIPLGDHTAQLAEVAAVEFACKKALKIDGPVLIVTDSFYVAESVNKELPYWQSNGFFNNKKKPLKHVSKWKSIADCIQLKPDIIIIHEKGHQPTASTFHTEGNNLADKLATQGSYVVNAGKRTADGSEFEKRTADGSEFESPKKKAKVE

SEQ ID NO: 666 - protein, 2174 aa, synthetic construct
MPAAKRVKLDGGDKKYSIGLDIGTNSVGWAVITDEYKVPSKKFKVLGNTDRHSIKKNLIGALLFDSGETAEATRLKRTARRRYTRRKNRICYLQEIFSNEMAKVDDSFFHRLEESFLVEEDKKHERHPIFGNIVDEVAYHEKYPTIYHLRKKLVDSTDKADLRLIYLALAHMIKFRGHFLIEGDLNPDNSDVDKLFIQLVQTYNQLFEENPINASGVDAKAILSARLSKSRRLENLIAQLPGEKKNGLFGNLIALSLGLTPNFKSNFDLAEDAKLQLSKDTYDDDLDNLLAQIGDQYADLFLAAKNLSDAILLSDILRVNTEITKAPLSASMIKRYDEHHQDLTLLKALVRQQLPEKYKEIFFDQSKNGYAGYIDGGASQEEFYKFIKPILEKMDGTEELLVKLNREDLLRKQRTFDNGSIPHQIHLGELHAILRRQEDFYPFLKDNREKIEKILTFRIPYYVGPLARGNSRFAWMTRKSEETITPWNFEEVVDKGASAQSFIERMTNFDKNLPNEKVLPKHSLLYEYFTVYNELTKVKYVTEGMRKPAFLSGEQKKAIVDLLFKTNRKVTVKQLKEDYFKKIECFDSVEISGVEDRFNASLGTYHDLLKIIKDKDFLDNEENEDILEDIVLTLTLFEDREMIEERLKTYAHLFDDKVMKQLKRRRYTGWGRLSRKLINGIRDKQSGKTILDFLKSDGFANRNFMQLIHDDSLTFKEDIQKAQVSGQGDSLHEHIANLAGSPAIKKGILQTVKVVDELVKVMGRHKPENIVIEMARENQTTQKGQKNSRERMKRIEEGIKELGSQILKEHPVENTQLQNEKLYLYYLQNGRDMYVDQELDINRLSDYDVDHIVPQSFLKDDSIDNKVLTRSDKARGKSDNVPSEEVVKKMKNYWRQLLNAKLITQRKFDNLTKAERGGLSELDKAGFIKRQLVETRQITKHVAQILDSRMNTKYDENDKLIREVKVITLKSKLVSDFRKDFQFYKVREINNYHHAHDAYLNAVVGTALIKKYPKLESEFVYGDYKVYDVRKMIAKSEQEIGKATAKYFFYSNIMNFFKTEITLANGEIRKRPLIETNGETGEIVWDKGRDFATVRKVLSMPQVNIVKKTEVQTGGFSKESILPKRNSDKLIARKKDWDPKKYGGFDSPTVAYSVLVVAKVEKGKSKKLKSVKELLGITIMERSSFEKNPIDFLEAKGYKEVKKDLIIKLPKYSLFELENGRKRMLASAGELQKGNELALPSKYVNFLYLASHYEKLKGSPEDNEQKQLFVEQHKHYLDEIIEQISEFSKRVILADANLDKVLSAYNKHRDKPIREQAENIIHLFTLTNLGAPAAFKYFDTTIDRKRYTSTKEVLDATLIHQSITGLYETRIDLSQLGGDGGPAPAPAPAPGGMDPLQLLQPLEAEIKGTKLKAHWNSGATITCVPQAFLEEEVPIKNIWIKTIHGEKEQPVYYLTFKIQGRKVEAEVISSPYDYILVSPSDIPWLMKKPLQLTTLVPLQEYEERLLKQTMLTGSYKEKLQSLFLKYDALWQHWENQVGHRRIKPHHIATGTVNPRPQKQYPINPKAKASIQTVINDLLKQGVLIQQNSIMNTPVYPVPKPDGKWRMVLDYREVNKTIPLIAAQNQHSAGILSSIFRGKYKTTLDLSNGFWAHSITPESYWLTAFTWLGQQYCWTRLPQGFLNSPALFNADVVDLLKEVPNVQVYVDDIYISHDDPREHLEQLEKVFSLLLNAGYVVSLKKSEIAQHEVEFLGFNITKEGRGLTETFKQKLLNITPPRDLKQLQSILGKLNFARNFIPNFSELVKPLYNIIATAPGKYITWTTDNSQQLQNIISMLNSAENLEERNPEVRLIMKVNTSPSAGYIRFYNEFAKRPIMYLNYVYTKAEVKFTNTEKLLTTIHKGLIKALDLGMGQEILVYSPIVSMTKIQKTPLPERKALPIRWITWMSYLEDPRIQFHYDKTLPELQQVPTVTDDIIAKIKHPSEFSMVFYTDGSAIKHPNVNKSHNAGMGIAQVQFKPEFTVINTWSIPLGDHTAQLAEVAAVEFACKKALKIDGPVLIVTDSFYVAESVNKELPYWQSNGFFNNKKKPLKHVSKWKSIADCIQLKPDIIIIHEKGHQPTASTFHTEGNNLADKLATQGSYVVNAGKRTADGSEFEKRTADGSEFESPKKKAKVE

SEQ ID NO: 667 - protein, 2176 aa, synthetic construct
MPAAKRVKLDGGDKKYSIGLDIGTNSVGWAVITDEYKVPSKKFKVLGNTDRHSIKKNLIGALLFDSGETAEATRLKRTARRRYTRRKNRICYLQEIFSNEMAKVDDSFFHRLEESFLVEEDKKHERHPIFGNIVDEVAYHEKYPTIYHLRKKLVDSTDKADLRLIYLALAHMIKFRGHFLIEGDLNPDNSDVDKLFIQLVQTYNQLFEENPINASGVDAKAILSARLSKSRRLENLIAQLPGEKKNGLFGNLIALSLGLTPNFKSNFDLAEDAKLQLSKDTYDDDLDNLLAQIGDQYADLFLAAKNLSDAILLSDILRVNTEITKAPLSASMIKRYDEHHQDLTLLKALVRQQLPEKYKEIFFDQSKNGYAGYIDGGASQEEFYKFIKPILEKMDGTEELLVKLNREDLLRKQRTFDNGSIPHQIHLGELHAILRRQEDFYPFLKDNREKIEKILTFRIPYYVGPLARGNSRFAWMTRKSEETITPWNFEEVVDKGASAQSFIERMTNFDKNLPNEKVLPKHSLLYEYFTVYNELTKVKYVTEGMRKPAFLSGEQKKAIVDLLFKTNRKVTVKQLKEDYFKKIECFDSVEISGVEDRFNASLGTYHDLLKIIKDKDFLDNEENEDILEDIVLTLTLFEDREMIEERLKTYAHLFDDKVMKQLKRRRYTGWGRLSRKLINGIRDKQSGKTILDFLKSDGFANRNFMQLIHDDSLTFKEDIQKAQVSGQGDSLHEHIANLAGSPAIKKGILQTVKVVDELVKVMGRHKPENIVIEMARENQTTQKGQKNSRERMKRIEEGIKELGSQILKEHPVENTQLQNEKLYLYYLQNGRDMYVDQELDINRLSDYDVDHIVPQSFLKDDSIDNKVLTRSDKARGKSDNVPSEEVVKKMKNYWRQLLNAKLITQRKFDNLTKAERGGLSELDKAGFIKRQLVETRQITKHVAQILDSRMNTKYDENDKLIREVKVITLKSKLVSDFRKDFQFYKVREINNYHHAHDAYLNAVVGTALIKKYPKLESEFVYGDYKVYDVRKMIAKSEQEIGKATAKYFFYSNIMNFFKTEITLANGEIRKRPLIETNGETGEIVWDKGRDFATVRKVLSMPQVNIVKKTEVQTGGFSKESILPKRNSDKLIARKKDWDPKKYGGFDSPTVAYSVLVVAKVEKGKSKKLKSVKELLGITIMERSSFEKNPIDFLEAKGYKEVKKDLIIKLPKYSLFELENGRKRMLASAGELQKGNELALPSKYVNFLYLASHYEKLKGSPEDNEQKQLFVEQHKHYLDEIIEQISEFSKRVILADANLDKVLSAYNKHRDKPIREQAENIIHLFTLTNLGAPAAFKYFDTTIDRKRYTSTKEVLDATLIHQSITGLYETRIDLSQLGGDGGGSSGGGEAAAKGGMDPLQLLQPLEAEIKGTKLKAHWNSGATITCVPQAFLEEEVPIKNIWIKTIHGEKEQPVYYLTFKIQGRKVEAEVISSPYDYILVSPSDIPWLMKKPLQLTTLVPLQEYEERLLKQTMLTGSYKEKLQSLFLKYDALWQHWENQVGHRRIKPHHIATGTVNPRPQKQYPINPKAKASIQTVINDLLKQGVLIQQNSIMNTPVYPVPKPDGKWRMVLDYREVNKTIPLIAAQNQHSAGILSSIFRGKYKTTLDLSNGFWAHSITPESYWLTAFTWLGQQYCWTRLPQGFLNSPALFNADVVDLLKEVPNVQVYVDDIYISHDDPREHLEQLEKVFSLLLNAGYVVSLKKSEIAQHEVEFLGFNITKEGRGLTETFKQKLLNITPPRDLKQLQSILGKLNFARNFIPNFSELVKPLYNIIATAPGKYITWTTDNSQQLQNIISMLNSAENLEERNPEVRLIMKVNTSPSAGYIRFYNEFAKRPIMYLNYVYTKAEVKFTNTEKLLTTIHKGLIKALDLGMGQEILVYSPIVSMTKIQKTPLPERKALPIRWITWMSYLEDPRIQFHYDKTLPELQQVPTVTDDIIAKIKHPSEFSMVFYTDGSAIKHPNVNKSHNAGMGIAQVQFKPEFTVINTWSIPLGDHTAQLAEVAAVEFACKKALKIDGPVLIVTDSFYVAESVNKELPYWQSNGFFNNKKKPLKHVSKWKSIADCIQLKPDIIIIHEKGHQPTASTFHTEGNNLADKLATQGSYVVNAGKRTADGSEFEKRTADGSEFESPKKKAKVE

SEQ ID NO: 668 - protein, 2176 aa, synthetic construct
MPAAKRVKLDGGDKKYSIGLDIGTNSVGWAVITDEYKVPSKKFKVLGNTDRHSIKKNLIGALLFDSGETAEATRLKRTARRRYTRRKNRICYLQEIFSNEMAKVDDSFFHRLEESFLVEEDKKHERHPIFGNIVDEVAYHEKYPTIYHLRKKLVDSTDKADLRLIYLALAHMIKFRGHFLIEGDLNPDNSDVDKLFIQLVQTYNQLFEENPINASGVDAKAILSARLSKSRRLENLIAQLPGEKKNGLFGNLIALSLGLTPNFKSNFDLAEDAKLQLSKDTYDDDLDNLLAQIGDQYADLFLAAKNLSDAILLSDILRVNTEITKAPLSASMIKRYDEHHQDLTLLKALVRQQLPEKYKEIFFDQSKNGYAGYIDGGASQEEFYKFIKPILEKMDGTEELLVKLNREDLLRKQRTFDNGSIPHQIHLGELHAILRRQEDFYPFLKDNREKIEKILTFRIPYYVGPLARGNSRFAWMTRKSEETITPWNFEEVVDKGASAQSFIERMTNFDKNLPNEKVLPKHSLLYEYFTVYNELTKVKYVTEGMRKPAFLSGEQKKAIVDLLFKTNRKVTVKQLKEDYFKKIECFDSVEISGVEDRFNASLGTYHDLLKIIKDKDFLDNEENEDILEDIVLTLTLFEDREMIEERLKTYAHLFDDKVMKQLKRRRYTGWGRLSRKLINGIRDKQSGKTILDFLKSDGFANRNFMQLIHDDSLTFKEDIQKAQVSGQGDSLHEHIANLAGSPAIKKGILQTVKVVDELVKVMGRHKPENIVIEMARENQTTQKGQKNSRERMKRIEEGIKELGSQILKEHPVENTQLQNEKLYLYYLQNGRDMYVDQELDINRLSDYDVDHIVPQSFLKDDSIDNKVLTRSDKARGKSDNVPSEEVVKKMKNYWRQLLNAKLITQRKFDNLTKAERGGLSELDKAGFIKRQLVETRQITKHVAQILDSRMNTKYDENDKLIREVKVITLKSKLVSDFRKDFQFYKVREINNYHHAHDAYLNAVVGTALIKKYPKLESEFVYGDYKVYDVRKMIAKSEQEIGKATAKYFFYSNIMNFFKTEITLANGEIRKRPLIETNGETGEIVWDKGRDFATVRKVLSMPQVNIVKKTEVQTGGFSKESILPKRNSDKLIARKKDWDPKKYGGFDSPTVAYSVLVVAKVEKGKSKKLKSVKELLGITIMERSSFEKNPIDFLEAKGYKEVKKDLIIKLPKYSLFELENGRKRMLASAGELQKGNELALPSKYVNFLYLASHYEKLKGSPEDNEQKQLFVEQHKHYLDEIIEQISEFSKRVILADANLDKVLSAYNKHRDKPIREQAENIIHLFTLTNLGAPAAFKYFDTTIDRKRYTSTKEVLDATLIHQSITGLYETRIDLSQLGGDGGGGSEAAAKPAPGGMDPLQLLQPLEAEIKGTKLKAHWNSGATITCVPQAFLEEEVPIKNIWIKTIHGEKEQPVYYLTFKIQGRKVEAEVISSPYDYILVSPSDIPWLMKKPLQLTTLVPLQEYEERLLKQTMLTGSYKEKLQSLFLKYDALWQHWENQVGHRRIKPHHIATGTVNPRPQKQYPINPKAKASIQTVINDLLKQGVLIQQNSIMNTPVYPVPKPDGKWRMVLDYREVNKTIPLIAAQNQHSAGILSSIFRGKYKTTLDLSNGFWAHSITPESYWLTAFTWLGQQYCWTRLPQGFLNSPALFNADVVDLLKEVPNVQVYVDDIYISHDDPREHLEQLEKVFSLLLNAGYVVSLKKSEIAQHEVEFLGFNITKEGRGLTETFKQKLLNITPPRDLKQLQSILGKLNFARNFIPNFSELVKPLYNIIATAPGKYITWTTDNSQQLQNIISMLNSAENLEERNPEVRLIMKVNTSPSAGYIRFYNEFAKRPIMYLNYVYTKAEVKFTNTEKLLTTIHKGLIKALDLGMGQEILVYSPIVSMTKIQKTPLPERKALPIRWITWMSYLEDPRIQFHYDKTLPELQQVPTVTDDIIAKIKHPSEFSMVFYTDGSAIKHPNVNKSHNAGMGIAQVQFKPEFTVINTWSIPLGDHTAQLAEVAAVEFACKKALKIDGPVLIVTDSFYVAESVNKELPYWQSNGFFNNKKKPLKHVSKWKSIADCIQLKPDIIIIHEKGHQPTASTFHTEGNNLADKLATQGSYVVNAGKRTADGSEFEKRTADGSEFESPKKKAKVE

SEQ ID NO: 669 - protein, 2174 aa, synthetic construct
MPAAKRVKLDGGDKKYSIGLDIGTNSVGWAVITDEYKVPSKKFKVLGNTDRHSIKKNLIGALLFDSGETAEATRLKRTARRRYTRRKNRICYLQEIFSNEMAKVDDSFFHRLEESFLVEEDKKHERHPIFGNIVDEVAYHEKYPTIYHLRKKLVDSTDKADLRLIYLALAHMIKFRGHFLIEGDLNPDNSDVDKLFIQLVQTYNQLFEENPINASGVDAKAILSARLSKSRRLENLIAQLPGEKKNGLFGNLIALSLGLTPNFKSNFDLAEDAKLQLSKDTYDDDLDNLLAQIGDQYADLFLAAKNLSDAILLSDILRVNTEITKAPLSASMIKRYDEHHQDLTLLKALVRQQLPEKYKEIFFDQSKNGYAGYIDGGASQEEFYKFIKPILEKMDGTEELLVKLNREDLLRKQRTFDNGSIPHQIHLGELHAILRRQEDFYPFLKDNREKIEKILTFRIPYYVGPLARGNSRFAWMTRKSEETITPWNFEEVVDKGASAQSFIERMTNFDKNLPNEKVLPKHSLLYEYFTVYNELTKVKYVTEGMRKPAFLSGEQKKAIVDLLFKTNRKVTVKQLKEDYFKKIECFDSVEISGVEDRFNASLGTYHDLLKIIKDKDFLDNEENEDILEDIVLTLTLFEDREMIEERLKTYAHLFDDKVMKQLKRRRYTGWGRLSRKLINGIRDKQSGKTILDFLKSDGFANRNFMQLIHDDSLTFKEDIQKAQVSGQGDSLHEHIANLAGSPAIKKGILQTVKVVDELVKVMGRHKPENIVIEMARENQTTQKGQKNSRERMKRIEEGIKELGSQILKEHPVENTQLQNEKLYLYYLQNGRDMYVDQELDINRLSDYDVDHIVPQSFLKDDSIDNKVLTRSDKARGKSDNVPSEEVVKKMKNYWRQLLNAKLITQRKFDNLTKAERGGLSELDKAGFIKRQLVETRQITKHVAQILDSRMNTKYDENDKLIREVKVITLKSKLVSDFRKDFQFYKVREINNYHHAHDAYLNAVVGTALIKKYPKLESEFVYGDYKVYDVRKMIAKSEQEIGKATAKYFFYSNIMNFFKTEITLANGEIRKRPLIETNGETGEIVWDKGRDFATVRKVLSMPQVNIVKKTEVQTGGFSKESILPKRNSDKLIARKKDWDPKKYGGFDSPTVAYSVLVVAKVEKGKSKKLKSVKELLGITIMERSSFEKNPIDFLEAKGYKEVKKDLIIKLPKYSLFELENGRKRMLASAGELQKGNELALPSKYVNFLYLASHYEKLKGSPEDNEQKQLFVEQHKHYLDEIIEQISEFSKRVILADANLDKVLSAYNKHRDKPIREQAENIIHLFTLTNLGAPAAFKYFDTTIDRKRYTSTKEVLDATLIHQSITGLYETRIDLSQLGGDGGGGGGSSPAPGGMDPLQLLQPLEAEIKGTKLKAHWNSGATITCVPQAFLEEEVPIKNIWIKTIHGEKEQPVYYLTFKIQGRKVEAEVISSPYDYILVSPSDIPWLMKKPLQLTTLVPLQEYEERLLKQTMLTGSYKEKLQSLFLKYDALWQHWENQVGHRRIKPHHIATGTVNPRPQKQYPINPKAKASIQTVINDLLKQGVLIQQNSIMNTPVYPVPKPDGKWRMVLDYREVNKTIPLIAAQNQHSAGILSSIFRGKYKTTLDLSNGFWAHSITPESYWLTAFTWLGQQYCWTRLPQGFLNSPALFNADVVDLLKEVPNVQVYVDDIYISHDDPREHLEQLEKVFSLLLNAGYVVSLKKSEIAQHEVEFLGFNITKEGRGLTETFKQKLLNITPPRDLKQLQSILGKLNFARNFIPNFSELVKPLYNIIATAPGKYITWTTDNSQQLQNIISMLNSAENLEERNPEVRLIMKVNTSPSAGYIRFYNEFAKRPIMYLNYVYTKAEVKFTNTEKLLTTIHKGLIKALDLGMGQEILVYSPIVSMTKIQKTPLPERKALPIRWITWMSYLEDPRIQFHYDKTLPELQQVPTVTDDIIAKIKHPSEFSMVFYTDGSAIKHPNVNKSHNAGMGIAQVQFKPEFTVINTWSIPLGDHTAQLAEVAAVEFACKKALKIDGPVLIVTDSFYVAESVNKELPYWQSNGFFNNKKKPLKHVSKWKSIADCIQLKPDIIIIHEKGHQPTASTFHTEGNNLADKLATQGSYVVNAGKRTADGSEFEKRTADGSEFESPKKKAKVE

SEQ ID NO: 670 - protein, 2176 aa, synthetic construct
MPAAKRVKLDGGDKKYSIGLDIGTNSVGWAVITDEYKVPSKKFKVLGNTDRHSIKKNLIGALLFDSGETAEATRLKRTARRRYTRRKNRICYLQEIFSNEMAKVDDSFFHRLEESFLVEEDKKHERHPIFGNIVDEVAYHEKYPTIYHLRKKLVDSTDKADLRLIYLALAHMIKFRGHFLIEGDLNPDNSDVDKLFIQLVQTYNQLFEENPINASGVDAKAILSARLSKSRRLENLIAQLPGEKKNGLFGNLIALSLGLTPNFKSNFDLAEDAKLQLSKDTYDDDLDNLLAQIGDQYADLFLAAKNLSDAILLSDILRVNTEITKAPLSASMIKRYDEHHQDLTLLKALVRQQLPEKYKEIFFDQSKNGYAGYIDGGASQEEFYKFIKPILEKMDGTEELLVKLNREDLLRKQRTFDNGSIPHQIHLGELHAILRRQEDFYPFLKDNREKIEKILTFRIPYYVGPLARGNSRFAWMTRKSEETITPWNFEEVVDKGASAQSFIERMTNFDKNLPNEKVLPKHSLLYEYFTVYNELTKVKYVTEGMRKPAFLSGEQKKAIVDLLFKTNRKVTVKQLKEDYFKKIECFDSVEISGVEDRFNASLGTYHDLLKIIKDKDFLDNEENEDILEDIVLTLTLFEDREMIEERLKTYAHLFDDKVMKQLKRRRYTGWGRLSRKLINGIRDKQSGKTILDFLKSDGFANRNFMQLIHDDSLTFKEDIQKAQVSGQGDSLHEHIANLAGSPAIKKGILQTVKVVDELVKVMGRHKPENIVIEMARENQTTQKGQKNSRERMKRIEEGIKELGSQILKEHPVENTQLQNEKLYLYYLQNGRDMYVDQELDINRLSDYDVDHIVPQSFLKDDSIDNKVLTRSDKARGKSDNVPSEEVVKKMKNYWRQLLNAKLITQRKFDNLTKAERGGLSELDKAGFIKRQLVETRQITKHVAQILDSRMNTKYDENDKLIREVKVITLKSKLVSDFRKDFQFYKVREINNYHHAHDAYLNAVVGTALIKKYPKLESEFVYGDYKVYDVRKMIAKSEQEIGKATAKYFFYSNIMNFFKTEITLANGEIRKRPLIETNGETGEIVWDKGRDFATVRKVLSMPQVNIVKKTEVQTGGFSKESILPKRNSDKLIARKKDWDPKKYGGFDSPTVAYSVLVVAKVEKGKSKKLKSVKELLGITIMERSSFEKNPIDFLEAKGYKEVKKDLIIKLPKYSLFELENGRKRMLASAGELQKGNELALPSKYVNFLYLASHYEKLKGSPEDNEQKQLFVEQHKHYLDEIIEQISEFSKRVILADANLDKVLSAYNKHRDKPIREQAENIIHLFTLTNLGAPAAFKYFDTTIDRKRYTSTKEVLDATLIHQSITGLYETRIDLSQLGGDGGGSSGGSEAAAKGGMDPLQLLQPLEAEIKGTKLKAHWNSGATITCVPQAFLEEEVPIKNIWIKTIHGEKEQPVYYLTFKIQGRKVEAEVISSPYDYILVSPSDIPWLMKKPLQLTTLVPLQEYEERLLKQTMLTGSYKEKLQSLFLKYDALWQHWENQVGHRRIKPHHIATGTVNPRPQKQYPINPKAKASIQTVINDLLKQGVLIQQNSIMNTPVYPVPKPDGKWRMVLDYREVNKTIPLIAAQNQHSAGILSSIFRGKYKTTLDLSNGFWAHSITPESYWLTAFTWLGQQYCWTRLPQGFLNSPALFNADVVDLLKEVPNVQVYVDDIYISHDDPREHLEQLEKVFSLLLNAGYVVSLKKSEIAQHEVEFLGFNITKEGRGLTETFKQKLLNITPPRDLKQLQSILGKLNFARNFIPNFSELVKPLYNIIATAPGKYITWTTDNSQQLQNIISMLNSAENLEERNPEVRLIMKVNTSPSAGYIRFYNEFAKRPIMYLNYVYTKAEVKFTNTEKLLTTIHKGLIKALDLGMGQEILVYSPIVSMTKIQKTPLPERKALPIRWITWMSYLEDPRIQFHYDKTLPELQQVPTVTDDIIAKIKHPSEFSMVFYTDGSAIKHPNVNKSHNAGMGIAQVQFKPEFTVINTWSIPLGDHTAQLAEVAAVEFACKKALKIDGPVLIVTDSFYVAESVNKELPYWQSNGFFNNKKKPLKHVSKWKSIADCIQLKPDIIIIHEKGHQPTASTFHTEGNNLADKLATQGSYVVNAGKRTADGSEFEKRTADGSEFESPKKKAKVE

SEQ ID NO: 671 - protein, 2176 aa, synthetic construct
MPAAKRVKLDGGDKKYSIGLDIGTNSVGWAVITDEYKVPSKKFKVLGNTDRHSIKKNLIGALLFDSGETAEATRLKRTARRRYTRRKNRICYLQEIFSNEMAKVDDSFFHRLEESFLVEEDKKHERHPIFGNIVDEVAYHEKYPTIYHLRKKLVDSTDKADLRLIYLALAHMIKFRGHFLIEGDLNPDNSDVDKLFIQLVQTYNQLFEENPINASGVDAKAILSARLSKSRRLENLIAQLPGEKKNGLFGNLIALSLGLTPNFKSNFDLAEDAKLQLSKDTYDDDLDNLLAQIGDQYADLFLAAKNLSDAILLSDILRVNTEITKAPLSASMIKRYDEHHQDLTLLKALVRQQLPEKYKEIFFDQSKNGYAGYIDGGASQEEFYKFIKPILEKMDGTEELLVKLNREDLLRKQRTFDNGSIPHQIHLGELHAILRRQEDFYPFLKDNREKIEKILTFRIPYYVGPLARGNSRFAWMTRKSEETITPWNFEEVVDKGASAQSFIERMTNFDKNLPNEKVLPKHSLLYEYFTVYNELTKVKYVTEGMRKPAFLSGEQKKAIVDLLFKTNRKVTVKQLKEDYFKKIECFDSVEISGVEDRFNASLGTYHDLLKIIKDKDFLDNEENEDILEDIVLTLTLFEDREMIEERLKTYAHLFDDKVMKQLKRRRYTGWGRLSRKLINGIRDKQSGKTILDFLKSDGFANRNFMQLIHDDSLTFKEDIQKAQVSGQGDSLHEHIANLAGSPAIKKGILQTVKVVDELVKVMGRHKPENIVIEMARENQTTQKGQKNSRERMKRIEEGIKELGSQILKEHPVENTQLQNEKLYLYYLQNGRDMYVDQELDINRLSDYDVDHIVPQSFLKDDSIDNKVLTRSDKARGKSDNVPSEEVVKKMKNYWRQLLNAKLITQRKFDNLTKAERGGLSELDKAGFIKRQLVETRQITKHVAQILDSRMNTKYDENDKLIREVKVITLKSKLVSDFRKDFQFYKVREINNYHHAHDAYLNAVVGTALIKKYPKLESEFVYGDYKVYDVRKMIAKSEQEIGKATAKYFFYSNIMNFFKTEITLANGEIRKRPLIETNGETGEIVWDKGRDFATVRKVLSMPQVNIVKKTEVQTGGFSKESILPKRNSDKLIARKKDWDPKKYGGFDSPTVAYSVLVVAKVEKGKSKKLKSVKELLGITIMERSSFEKNPIDFLEAKGYKEVKKDLIIKLPKYSLFELENGRKRMLASAGELQKGNELALPSKYVNFLYLASHYEKLKGSPEDNEQKQLFVEQHKHYLDEIIEQISEFSKRVILADANLDKVLSAYNKHRDKPIREQAENIIHLFTLTNLGAPAAFKYFDTTIDRKRYTSTKEVLDATLIHQSITGLYETRIDLSQLGGDGGEAAAKGSSGGGGGMDPLQLLQPLEAEIKGTKLKAHWNSGATITCVPQAFLEEEVPIKNIWIKTIHGEKEQPVYYLTFKIQGRKVEAEVISSPYDYILVSPSDIPWLMKKPLQLTTLVPLQEYEERLLKQTMLTGSYKEKLQSLFLKYDALWQHWENQVGHRRIKPHHIATGTVNPRPQKQYPINPKAKASIQTVINDLLKQGVLIQQNSIMNTPVYPVPKPDGKWRMVLDYREVNKTIPLIAAQNQHSAGILSSIFRGKYKTTLDLSNGFWAHSITPESYWLTAFTWLGQQYCWTRLPQGFLNSPALFNADVVDLLKEVPNVQVYVDDIYISHDDPREHLEQLEKVFSLLLNAGYVVSLKKSEIAQHEVEFLGFNITKEGRGLTETFKQKLLNITPPRDLKQLQSILGKLNFARNFIPNFSELVKPLYNIIATAPGKYITWTTDNSQQLQNIISMLNSAENLEERNPEVRLIMKVNTSPSAGYIRFYNEFAKRPIMYLNYVYTKAEVKFTNTEKLLTTIHKGLIKALDLGMGQEILVYSPIVSMTKIQKTPLPERKALPIRWITWMSYLEDPRIQFHYDKTLPELQQVPTVTDDIIAKIKHPSEFSMVFYTDGSAIKHPNVNKSHNAGMGIAQVQFKPEFTVINTWSIPLGDHTAQLAEVAAVEFACKKALKIDGPVLIVTDSFYVAESVNKELPYWQSNGFFNNKKKPLKHVSKWKSIADCIQLKPDIIIIHEKGHQPTASTFHTEGNNLADKLATQGSYVVNAGKRTADGSEFEKRTADGSEFESPKKKAKVE

SEQ ID NO: 672 - protein, 2171 aa, synthetic construct
MPAAKRVKLDGGDKKYSIGLDIGTNSVGWAVITDEYKVPSKKFKVLGNTDRHSIKKNLIGALLFDSGETAEATRLKRTARRRYTRRKNRICYLQEIFSNEMAKVDDSFFHRLEESFLVEEDKKHERHPIFGNIVDEVAYHEKYPTIYHLRKKLVDSTDKADLRLIYLALAHMIKFRGHFLIEGDLNPDNSDVDKLFIQLVQTYNQLFEENPINASGVDAKAILSARLSKSRRLENLIAQLPGEKKNGLFGNLIALSLGLTPNFKSNFDLAEDAKLQLSKDTYDDDLDNLLAQIGDQYADLFLAAKNLSDAILLSDILRVNTEITKAPLSASMIKRYDEHHQDLTLLKALVRQQLPEKYKEIFFDQSKNGYAGYIDGGASQEEFYKFIKPILEKMDGTEELLVKLNREDLLRKQRTFDNGSIPHQIHLGELHAILRRQEDFYPFLKDNREKIEKILTFRIPYYVGPLARGNSRFAWMTRKSEETITPWNFEEVVDKGASAQSFIERMTNFDKNLPNEKVLPKHSLLYEYFTVYNELTKVKYVTEGMRKPAFLSGEQKKAIVDLLFKTNRKVTVKQLKEDYFKKIECFDSVEISGVEDRFNASLGTYHDLLKIIKDKDFLDNEENEDILEDIVLTLTLFEDREMIEERLKTYAHLFDDKVMKQLKRRRYTGWGRLSRKLINGIRDKQSGKTILDFLKSDGFANRNFMQLIHDDSLTFKEDIQKAQVSGQGDSLHEHIANLAGSPAIKKGILQTVKVVDELVKVMGRHKPENIVIEMARENQTTQKGQKNSRERMKRIEEGIKELGSQILKEHPVENTQLQNEKLYLYYLQNGRDMYVDQELDINRLSDYDVDHIVPQSFLKDDSIDNKVLTRSDKARGKSDNVPSEEVVKKMKNYWRQLLNAKLITQRKFDNLTKAERGGLSELDKAGFIKRQLVETRQITKHVAQILDSRMNTKYDENDKLIREVKVITLKSKLVSDFRKDFQFYKVREINNYHHAHDAYLNAVVGTALIKKYPKLESEFVYGDYKVYDVRKMIAKSEQEIGKATAKYFFYSNIMNFFKTEITLANGEIRKRPLIETNGETGEIVWDKGRDFATVRKVLSMPQVNIVKKTEVQTGGFSKESILPKRNSDKLIARKKDWDPKKYGGFDSPTVAYSVLVVAKVEKGKSKKLKSVKELLGITIMERSSFEKNPIDFLEAKGYKEVKKDLIIKLPKYSLFELENGRKRMLASAGELQKGNELALPSKYVNFLYLASHYEKLKGSPEDNEQKQLFVEQHKHYLDEIIEQISEFSKRVILADANLDKVLSAYNKHRDKPIREQAENIIHLFTLTNLGAPAAFKYFDTTIDRKRYTSTKEVLDATLIHQSITGLYETRIDLSQLGGDGGGGSPAPGGMDPLQLLQPLEAEIKGTKLKAHWNSGATITCVPQAFLEEEVPIKNIWIKTIHGEKEQPVYYLTFKIQGRKVEAEVISSPYDYILVSPSDIPWLMKKPLQLTTLVPLQEYEERLLKQTMLTGSYKEKLQSLFLKYDALWQHWENQVGHRRIKPHHIATGTVNPRPQKQYPINPKAKASIQTVINDLLKQGVLIQQNSIMNTPVYPVPKPDGKWRMVLDYREVNKTIPLIAAQNQHSAGILSSIFRGKYKTTLDLSNGFWAHSITPESYWLTAFTWLGQQYCWTRLPQGFLNSPALFNADVVDLLKEVPNVQVYVDDIYISHDDPREHLEQLEKVFSLLLNAGYVVSLKKSEIAQHEVEFLGFNITKEGRGLTETFKQKLLNITPPRDLKQLQSILGKLNFARNFIPNFSELVKPLYNIIATAPGKYITWTTDNSQQLQNIISMLNSAENLEERNPEVRLIMKVNTSPSAGYIRFYNEFAKRPIMYLNYVYTKAEVKFTNTEKLLTTIHKGLIKALDLGMGQEILVYSPIVSMTKIQKTPLPERKALPIRWITWMSYLEDPRIQFHYDKTLPELQQVPTVTDDIIAKIKHPSEFSMVFYTDGSAIKHPNVNKSHNAGMGIAQVQFKPEFTVINTWSIPLGDHTAQLAEVAAVEFACKKALKIDGPVLIVTDSFYVAESVNKELPYWQSNGFFNNKKKPLKHVSKWKSIADCIQLKPDIIIIHEKGHQPTASTFHTEGNNLADKLATQGSYVVNAGKRTADGSEFEKRTADGSEFESPKKKAKVE

SEQ ID NO: 673 - protein, 2185 aa, synthetic construct
MPAAKRVKLDGGDKKYSIGLDIGTNSVGWAVITDEYKVPSKKFKVLGNTDRHSIKKNLIGALLFDSGETAEATRLKRTARRRYTRRKNRICYLQEIFSNEMAKVDDSFFHRLEESFLVEEDKKHERHPIFGNIVDEVAYHEKYPTIYHLRKKLVDSTDKADLRLIYLALAHMIKFRGHFLIEGDLNPDNSDVDKLFIQLVQTYNQLFEENPINASGVDAKAILSARLSKSRRLENLIAQLPGEKKNGLFGNLIALSLGLTPNFKSNFDLAEDAKLQLSKDTYDDDLDNLLAQIGDQYADLFLAAKNLSDAILLSDILRVNTEITKAPLSASMIKRYDEHHQDLTLLKALVRQQLPEKYKEIFFDQSKNGYAGYIDGGASQEEFYKFIKPILEKMDGTEELLVKLNREDLLRKQRTFDNGSIPHQIHLGELHAILRRQEDFYPFLKDNREKIEKILTFRIPYYVGPLARGNSRFAWMTRKSEETITPWNFEEVVDKGASAQSFIERMTNFDKNLPNEKVLPKHSLLYEYFTVYNELTKVKYVTEGMRKPAFLSGEQKKAIVDLLFKTNRKVTVKQLKEDYFKKIECFDSVEISGVEDRFNASLGTYHDLLKIIKDKDFLDNEENEDILEDIVLTLTLFEDREMIEERLKTYAHLFDDKVMKQLKRRRYTGWGRLSRKLINGIRDKQSGKTILDFLKSDGFANRNFMQLIHDDSLTFKEDIQKAQVSGQGDSLHEHIANLAGSPAIKKGILQTVKVVDELVKVMGRHKPENIVIEMARENQTTQKGQKNSRERMKRIEEGIKELGSQILKEHPVENTQLQNEKLYLYYLQNGRDMYVDQELDINRLSDYDVDHIVPQSFLKDDSIDNKVLTRSDKARGKSDNVPSEEVVKKMKNYWRQLLNAKLITQRKFDNLTKAERGGLSELDKAGFIKRQLVETRQITKHVAQILDSRMNTKYDENDKLIREVKVITLKSKLVSDFRKDFQFYKVREINNYHHAHDAYLNAVVGTALIKKYPKLESEFVYGDYKVYDVRKMIAKSEQEIGKATAKYFFYSNIMNFFKTEITLANGEIRKRPLIETNGETGEIVWDKGRDFATVRKVLSMPQVNIVKKTEVQTGGFSKESILPKRNSDKLIARKKDWDPKKYGGFDSPTVAYSVLVVAKVEKGKSKKLKSVKELLGITIMERSSFEKNPIDFLEAKGYKEVKKDLIIKLPKYSLFELENGRKRMLASAGELQKGNELALPSKYVNFLYLASHYEKLKGSPEDNEQKQLFVEQHKHYLDEIIEQISEFSKRVILADANLDKVLSAYNKHRDKPIREQAENIIHLFTLTNLGAPAAFKYFDTTIDRKRYTSTKEVLDATLIHQSITGLYETRIDLSQLGGDGGGGGGSGGGGSGGGGSGGGGSGGMDPLQLLQPLEAEIKGTKLKAHWNSGATITCVPQAFLEEEVPIKNIWIKTIHGEKEQPVYYLTFKIQGRKVEAEVISSPYDYILVSPSDIPWLMKKPLQLTTLVPLQEYEERLLKQTMLTGSYKEKLQSLFLKYDALWQHWENQVGHRRIKPHHIATGTVNPRPQKQYPINPKAKASIQTVINDLLKQGVLIQQNSIMNTPVYPVPKPDGKWRMVLDYREVNKTIPLIAAQNQHSAGILSSIFRGKYKTTLDLSNGFWAHSITPESYWLTAFTWLGQQYCWTRLPQGFLNSPALFNADVVDLLKEVPNVQVYVDDIYISHDDPREHLEQLEKVFSLLLNAGYVVSLKKSEIAQHEVEFLGFNITKEGRGLTETFKQKLLNITPPRDLKQLQSILGKLNFARNFIPNFSELVKPLYNIIATAPGKYITWTTDNSQQLQNIISMLNSAENLEERNPEVRLIMKVNTSPSAGYIRFYNEFAKRPIMYLNYVYTKAEVKFTNTEKLLTTIHKGLIKALDLGMGQEILVYSPIVSMTKIQKTPLPERKALPIRWITWMSYLEDPRIQFHYDKTLPELQQVPTVTDDIIAKIKHPSEFSMVFYTDGSAIKHPNVNKSHNAGMGIAQVQFKPEFTVINTWSIPLGDHTAQLAEVAAVEFACKKALKIDGPVLIVTDSFYVAESVNKELPYWQSNGFFNNKKKPLKHVSKWKSIADCIQLKPDIIIIHEKGHQPTASTFHTEGNNLADKLATQGSYVVNAGKRTADGSEFEKRTADGSEFESPKKKAKVE

SEQ ID NO: 674 - protein, 2176 aa, synthetic construct
MPAAKRVKLDGGDKKYSIGLDIGTNSVGWAVITDEYKVPSKKFKVLGNTDRHSIKKNLIGALLFDSGETAEATRLKRTARRRYTRRKNRICYLQEIFSNEMAKVDDSFFHRLEESFLVEEDKKHERHPIFGNIVDEVAYHEKYPTIYHLRKKLVDSTDKADLRLIYLALAHMIKFRGHFLIEGDLNPDNSDVDKLFIQLVQTYNQLFEENPINASGVDAKAILSARLSKSRRLENLIAQLPGEKKNGLFGNLIALSLGLTPNFKSNFDLAEDAKLQLSKDTYDDDLDNLLAQIGDQYADLFLAAKNLSDAILLSDILRVNTEITKAPLSASMIKRYDEHHQDLTLLKALVRQQLPEKYKEIFFDQSKNGYAGYIDGGASQEEFYKFIKPILEKMDGTEELLVKLNREDLLRKQRTFDNGSIPHQIHLGELHAILRRQEDFYPFLKDNREKIEKILTFRIPYYVGPLARGNSRFAWMTRKSEETITPWNFEEVVDKGASAQSFIERMTNFDKNLPNEKVLPKHSLLYEYFTVYNELTKVKYVTEGMRKPAFLSGEQKKAIVDLLFKTNRKVTVKQLKEDYFKKIECFDSVEISGVEDRFNASLGTYHDLLKIIKDKDFLDNEENEDILEDIVLTLTLFEDREMIEERLKTYAHLFDDKVMKQLKRRRYTGWGRLSRKLINGIRDKQSGKTILDFLKSDGFANRNFMQLIHDDSLTFKEDIQKAQVSGQGDSLHEHIANLAGSPAIKKGILQTVKVVDELVKVMGRHKPENIVIEMARENQTTQKGQKNSRERMKRIEEGIKELGSQILKEHPVENTQLQNEKLYLYYLQNGRDMYVDQELDINRLSDYDVDHIVPQSFLKDDSIDNKVLTRSDKARGKSDNVPSEEVVKKMKNYWRQLLNAKLITQRKFDNLTKAERGGLSELDKAGFIKRQLVETRQITKHVAQILDSRMNTKYDENDKLIREVKVITLKSKLVSDFRKDFQFYKVREINNYHHAHDAYLNAVVGTALIKKYPKLESEFVYGDYKVYDVRKMIAKSEQEIGKATAKYFFYSNIMNFFKTEITLANGEIRKRPLIETNGETGEIVWDKGRDFATVRKVLSMPQVNIVKKTEVQTGGFSKESILPKRNSDKLIARKKDWDPKKYGGFDSPTVAYSVLVVAKVEKGKSKKLKSVKELLGITIMERSSFEKNPIDFLEAKGYKEVKKDLIIKLPKYSLFELENGRKRMLASAGELQKGNELALPSKYVNFLYLASHYEKLKGSPEDNEQKQLFVEQHKHYLDEIIEQISEFSKRVILADANLDKVLSAYNKHRDKPIREQAENIIHLFTLTNLGAPAAFKYFDTTIDRKRYTSTKEVLDATLIHQSITGLYETRIDLSQLGGDGGGSSEAAAKGGGGGMDPLQLLQPLEAEIKGTKLKAHWNSGATITCVPQAFLEEEVPIKNIWIKTIHGEKEQPVYYLTFKIQGRKVEAEVISSPYDYILVSPSDIPWLMKKPLQLTTLVPLQEYEERLLKQTMLTGSYKEKLQSLFLKYDALWQHWENQVGHRRIKPHHIATGTVNPRPQKQYPINPKAKASIQTVINDLLKQGVLIQQNSIMNTPVYPVPKPDGKWRMVLDYREVNKTIPLIAAQNQHSAGILSSIFRGKYKTTLDLSNGFWAHSITPESYWLTAFTWLGQQYCWTRLPQGFLNSPALFNADVVDLLKEVPNVQVYVDDIYISHDDPREHLEQLEKVFSLLLNAGYVVSLKKSEIAQHEVEFLGFNITKEGRGLTETFKQKLLNITPPRDLKQLQSILGKLNFARNFIPNFSELVKPLYNIIATAPGKYITWTTDNSQQLQNIISMLNSAENLEERNPEVRLIMKVNTSPSAGYIRFYNEFAKRPIMYLNYVYTKAEVKFTNTEKLLTTIHKGLIKALDLGMGQEILVYSPIVSMTKIQKTPLPERKALPIRWITWMSYLEDPRIQFHYDKTLPELQQVPTVTDDIIAKIKHPSEFSMVFYTDGSAIKHPNVNKSHNAGMGIAQVQFKPEFTVINTWSIPLGDHTAQLAEVAAVEFACKKALKIDGPVLIVTDSFYVAESVNKELPYWQSNGFFNNKKKPLKHVSKWKSIADCIQLKPDIIIIHEKGHQPTASTFHTEGNNLADKLATQGSYVVNAGKRTADGSEFEKRTADGSEFESPKKKAKVE

SEQ ID NO: 675 - protein, 2176 aa, synthetic construct
MPAAKRVKLDGGDKKYSIGLDIGTNSVGWAVITDEYKVPSKKFKVLGNTDRHSIKKNLIGALLFDSGETAEATRLKRTARRRYTRRKNRICYLQEIFSNEMAKVDDSFFHRLEESFLVEEDKKHERHPIFGNIVDEVAYHEKYPTIYHLRKKLVDSTDKADLRLIYLALAHMIKFRGHFLIEGDLNPDNSDVDKLFIQLVQTYNQLFEENPINASGVDAKAILSARLSKSRRLENLIAQLPGEKKNGLFGNLIALSLGLTPNFKSNFDLAEDAKLQLSKDTYDDDLDNLLAQIGDQYADLFLAAKNLSDAILLSDILRVNTEITKAPLSASMIKRYDEHHQDLTLLKALVRQQLPEKYKEIFFDQSKNGYAGYIDGGASQEEFYKFIKPILEKMDGTEELLVKLNREDLLRKQRTFDNGSIPHQIHLGELHAILRRQEDFYPFLKDNREKIEKILTFRIPYYVGPLARGNSRFAWMTRKSEETITPWNFEEVVDKGASAQSFIERMTNFDKNLPNEKVLPKHSLLYEYFTVYNELTKVKYVTEGMRKPAFLSGEQKKAIVDLLFKTNRKVTVKQLKEDYFKKIECFDSVEISGVEDRFNASLGTYHDLLKIIKDKDFLDNEENEDILEDIVLTLTLFEDREMIEERLKTYAHLFDDKVMKQLKRRRYTGWGRLSRKLINGIRDKQSGKTILDFLKSDGFANRNFMQLIHDDSLTFKEDIQKAQVSGQGDSLHEHIANLAGSPAIKKGILQTVKVVDELVKVMGRHKPENIVIEMARENQTTQKGQKNSRERMKRIEEGIKELGSQILKEHPVENTQLQNEKLYLYYLQNGRDMYVDQELDINRLSDYDVDHIVPQSFLKDDSIDNKVLTRSDKARGKSDNVPSEEVVKKMKNYWRQLLNAKLITQRKFDNLTKAERGGLSELDKAGFIKRQLVETRQITKHVAQILDSRMNTKYDENDKLIREVKVITLKSKLVSDFRKDFQFYKVREINNYHHAHDAYLNAVVGTALIKKYPKLESEFVYGDYKVYDVRKMIAKSEQEIGKATAKYFFYSNIMNFFKTEITLANGEIRKRPLIETNGETGEIVWDKGRDFATVRKVLSMPQVNIVKKTEVQTGGFSKESILPKRNSDKLIARKKDWDPKKYGGFDSPTVAYSVLVVAKVEKGKSKKLKSVKELLGITIMERSSFEKNPIDFLEAKGYKEVKKDLIIKLPKYSLFELENGRKRMLASAGELQKGNELALPSKYVNFLYLASHYEKLKGSPEDNEQKQLFVEQHKHYLDEIIEQISEFSKRVILADANLDKVLSAYNKHRDKPIREQAENIIHLFTLTNLGAPAAFKYFDTTIDRKRYTSTKEVLDATLIHQSITGLYETRIDLSQLGGDGGGSSPAPEAAAKGGMDPLQLLQPLEAEIKGTKLKAHWNSGATITCVPQAFLEEEVPIKNIWIKTIHGEKEQPVYYLTFKIQGRKVEAEVISSPYDYILVSPSDIPWLMKKPLQLTTLVPLQEYEERLLKQTMLTGSYKEKLQSLFLKYDALWQHWENQVGHRRIKPHHIATGTVNPRPQKQYPINPKAKASIQTVINDLLKQGVLIQQNSIMNTPVYPVPKPDGKWRMVLDYREVNKTIPLIAAQNQHSAGILSSIFRGKYKTTLDLSNGFWAHSITPESYWLTAFTWLGQQYCWTRLPQGFLNSPALFNADVVDLLKEVPNVQVYVDDIYISHDDPREHLEQLEKVFSLLLNAGYVVSLKKSEIAQHEVEFLGFNITKEGRGLTETFKQKLLNITPPRDLKQLQSILGKLNFARNFIPNFSELVKPLYNIIATAPGKYITWTTDNSQQLQNIISMLNSAENLEERNPEVRLIMKVNTSPSAGYIRFYNEFAKRPIMYLNYVYTKAEVKFTNTEKLLTTIHKGLIKALDLGMGQEILVYSPIVSMTKIQKTPLPERKALPIRWITWMSYLEDPRIQFHYDKTLPELQQVPTVTDDIIAKIKHPSEFSMVFYTDGSAIKHPNVNKSHNAGMGIAQVQFKPEFTVINTWSIPLGDHTAQLAEVAAVEFACKKALKIDGPVLIVTDSFYVAESVNKELPYWQSNGFFNNKKKPLKHVSKWKSIADCIQLKPDIIIIHEKGHQPTASTFHTEGNNLADKLATQGSYVVNAGKRTADGSEFEKRTADGSEFESPKKKAKVE

SEQ ID NO: 676 - protein, 2171 aa, synthetic construct
MPAAKRVKLDGGDKKYSIGLDIGTNSVGWAVITDEYKVPSKKFKVLGNTDRHSIKKNLIGALLFDSGETAEATRLKRTARRRYTRRKNRICYLQEIFSNEMAKVDDSFFHRLEESFLVEEDKKHERHPIFGNIVDEVAYHEKYPTIYHLRKKLVDSTDKADLRLIYLALAHMIKFRGHFLIEGDLNPDNSDVDKLFIQLVQTYNQLFEENPINASGVDAKAILSARLSKSRRLENLIAQLPGEKKNGLFGNLIALSLGLTPNFKSNFDLAEDAKLQLSKDTYDDDLDNLLAQIGDQYADLFLAAKNLSDAILLSDILRVNTEITKAPLSASMIKRYDEHHQDLTLLKALVRQQLPEKYKEIFFDQSKNGYAGYIDGGASQEEFYKFIKPILEKMDGTEELLVKLNREDLLRKQRTFDNGSIPHQIHLGELHAILRRQEDFYPFLKDNREKIEKILTFRIPYYVGPLARGNSRFAWMTRKSEETITPWNFEEVVDKGASAQSFIERMTNFDKNLPNEKVLPKHSLLYEYFTVYNELTKVKYVTEGMRKPAFLSGEQKKAIVDLLFKTNRKVTVKQLKEDYFKKIECFDSVEISGVEDRFNASLGTYHDLLKIIKDKDFLDNEENEDILEDIVLTLTLFEDREMIEERLKTYAHLFDDKVMKQLKRRRYTGWGRLSRKLINGIRDKQSGKTILDFLKSDGFANRNFMQLIHDDSLTFKEDIQKAQVSGQGDSLHEHIANLAGSPAIKKGILQTVKVVDELVKVMGRHKPENIVIEMARENQTTQKGQKNSRERMKRIEEGIKELGSQILKEHPVENTQLQNEKLYLYYLQNGRDMYVDQELDINRLSDYDVDHIVPQSFLKDDSIDNKVLTRSDKARGKSDNVPSEEVVKKMKNYWRQLLNAKLITQRKFDNLTKAERGGLSELDKAGFIKRQLVETRQITKHVAQILDSRMNTKYDENDKLIREVKVITLKSKLVSDFRKDFQFYKVREINNYHHAHDAYLNAVVGTALIKKYPKLESEFVYGDYKVYDVRKMIAKSEQEIGKATAKYFFYSNIMNFFKTEITLANGEIRKRPLIETNGETGEIVWDKGRDFATVRKVLSMPQVNIVKKTEVQTGGFSKESILPKRNSDKLIARKKDWDPKKYGGFDSPTVAYSVLVVAKVEKGKSKKLKSVKELLGITIMERSSFEKNPIDFLEAKGYKEVKKDLIIKLPKYSLFELENGRKRMLASAGELQKGNELALPSKYVNFLYLASHYEKLKGSPEDNEQKQLFVEQHKHYLDEIIEQISEFSKRVILADANLDKVLSAYNKHRDKPIREQAENIIHLFTLTNLGAPAAFKYFDTTIDRKRYTSTKEVLDATLIHQSITGLYETRIDLSQLGGDGGPAPGGGGGMDPLQLLQPLEAEIKGTKLKAHWNSGATITCVPQAFLEEEVPIKNIWIKTIHGEKEQPVYYLTFKIQGRKVEAEVISSPYDYILVSPSDIPWLMKKPLQLTTLVPLQEYEERLLKQTMLTGSYKEKLQSLFLKYDALWQHWENQVGHRRIKPHHIATGTVNPRPQKQYPINPKAKASIQTVINDLLKQGVLIQQNSIMNTPVYPVPKPDGKWRMVLDYREVNKTIPLIAAQNQHSAGILSSIFRGKYKTTLDLSNGFWAHSITPESYWLTAFTWLGQQYCWTRLPQGFLNSPALFNADVVDLLKEVPNVQVYVDDIYISHDDPREHLEQLEKVFSLLLNAGYVVSLKKSEIAQHEVEFLGFNITKEGRGLTETFKQKLLNITPPRDLKQLQSILGKLNFARNFIPNFSELVKPLYNIIATAPGKYITWTTDNSQQLQNIISMLNSAENLEERNPEVRLIMKVNTSPSAGYIRFYNEFAKRPIMYLNYVYTKAEVKFTNTEKLLTTIHKGLIKALDLGMGQEILVYSPIVSMTKIQKTPLPERKALPIRWITWMSYLEDPRIQFHYDKTLPELQQVPTVTDDIIAKIKHPSEFSMVFYTDGSAIKHPNVNKSHNAGMGIAQVQFKPEFTVINTWSIPLGDHTAQLAEVAAVEFACKKALKIDGPVLIVTDSFYVAESVNKELPYWQSNGFFNNKKKPLKHVSKWKSIADCIQLKPDIIIIHEKGHQPTASTFHTEGNNLADKLATQGSYVVNAGKRTADGSEFEKRTADGSEFESPKKKAKVE

SEQ ID NO: 677 - protein, 2180 aa, synthetic construct
MPAAKRVKLDGGDKKYSIGLDIGTNSVGWAVITDEYKVPSKKFKVLGNTDRHSIKKNLIGALLFDSGETAEATRLKRTARRRYTRRKNRICYLQEIFSNEMAKVDDSFFHRLEESFLVEEDKKHERHPIFGNIVDEVAYHEKYPTIYHLRKKLVDSTDKADLRLIYLALAHMIKFRGHFLIEGDLNPDNSDVDKLFIQLVQTYNQLFEENPINASGVDAKAILSARLSKSRRLENLIAQLPGEKKNGLFGNLIALSLGLTPNFKSNFDLAEDAKLQLSKDTYDDDLDNLLAQIGDQYADLFLAAKNLSDAILLSDILRVNTEITKAPLSASMIKRYDEHHQDLTLLKALVRQQLPEKYKEIFFDQSKNGYAGYIDGGASQEEFYKFIKPILEKMDGTEELLVKLNREDLLRKQRTFDNGSIPHQIHLGELHAILRRQEDFYPFLKDNREKIEKILTFRIPYYVGPLARGNSRFAWMTRKSEETITPWNFEEVVDKGASAQSFIERMTNFDKNLPNEKVLPKHSLLYEYFTVYNELTKVKYVTEGMRKPAFLSGEQKKAIVDLLFKTNRKVTVKQLKEDYFKKIECFDSVEISGVEDRFNASLGTYHDLLKIIKDKDFLDNEENEDILEDIVLTLTLFEDREMIEERLKTYAHLFDDKVMKQLKRRRYTGWGRLSRKLINGIRDKQSGKTILDFLKSDGFANRNFMQLIHDDSLTFKEDIQKAQVSGQGDSLHEHIANLAGSPAIKKGILQTVKVVDELVKVMGRHKPENIVIEMARENQTTQKGQKNSRERMKRIEEGIKELGSQILKEHPVENTQLQNEKLYLYYLQNGRDMYVDQELDINRLSDYDVDHIVPQSFLKDDSIDNKVLTRSDKARGKSDNVPSEEVVKKMKNYWRQLLNAKLITQRKFDNLTKAERGGLSELDKAGFIKRQLVETRQITKHVAQILDSRMNTKYDENDKLIREVKVITLKSKLVSDFRKDFQFYKVREINNYHHAHDAYLNAVVGTALIKKYPKLESEFVYGDYKVYDVRKMIAKSEQEIGKATAKYFFYSNIMNFFKTEITLANGEIRKRPLIETNGETGEIVWDKGRDFATVRKVLSMPQVNIVKKTEVQTGGFSKESILPKRNSDKLIARKKDWDPKKYGGFDSPTVAYSVLVVAKVEKGKSKKLKSVKELLGITIMERSSFEKNPIDFLEAKGYKEVKKDLIIKLPKYSLFELENGRKRMLASAGELQKGNELALPSKYVNFLYLASHYEKLKGSPEDNEQKQLFVEQHKHYLDEIIEQISEFSKRVILADANLDKVLSAYNKHRDKPIREQAENIIHLFTLTNLGAPAAFKYFDTTIDRKRYTSTKEVLDATLIHQSITGLYETRIDLSQLGGDGGGSSGSSGSSGSSGSSGGMDPLQLLQPLEAEIKGTKLKAHWNSGATITCVPQAFLEEEVPIKNIWIKTIHGEKEQPVYYLTFKIQGRKVEAEVISSPYDYILVSPSDIPWLMKKPLQLTTLVPLQEYEERLLKQTMLTGSYKEKLQSLFLKYDALWQHWENQVGHRRIKPHHIATGTVNPRPQKQYPINPKAKASIQTVINDLLKQGVLIQQNSIMNTPVYPVPKPDGKWRMVLDYREVNKTIPLIAAQNQHSAGILSSIFRGKYKTTLDLSNGFWAHSITPESYWLTAFTWLGQQYCWTRLPQGFLNSPALFNADVVDLLKEVPNVQVYVDDIYISHDDPREHLEQLEKVFSLLLNAGYVVSLKKSEIAQHEVEFLGFNITKEGRGLTETFKQKLLNITPPRDLKQLQSILGKLNFARNFIPNFSELVKPLYNIIATAPGKYITWTTDNSQQLQNIISMLNSAENLEERNPEVRLIMKVNTSPSAGYIRFYNEFAKRPIMYLNYVYTKAEVKFTNTEKLLTTIHKGLIKALDLGMGQEILVYSPIVSMTKIQKTPLPERKALPIRWITWMSYLEDPRIQFHYDKTLPELQQVPTVTDDIIAKIKHPSEFSMVFYTDGSAIKHPNVNKSHNAGMGIAQVQFKPEFTVINTWSIPLGDHTAQLAEVAAVEFACKKALKIDGPVLIVTDSFYVAESVNKELPYWQSNGFFNNKKKPLKHVSKWKSIADCIQLKPDIIIIHEKGHQPTASTFHTEGNNLADKLATQGSYVVNAGKRTADGSEFEKRTADGSEFESPKKKAKVE

SEQ ID NO: 678 - protein, 2174 aa, synthetic construct
MPAAKRVKLDGGDKKYSIGLDIGTNSVGWAVITDEYKVPSKKFKVLGNTDRHSIKKNLIGALLFDSGETAEATRLKRTARRRYTRRKNRICYLQEIFSNEMAKVDDSFFHRLEESFLVEEDKKHERHPIFGNIVDEVAYHEKYPTIYHLRKKLVDSTDKADLRLIYLALAHMIKFRGHFLIEGDLNPDNSDVDKLFIQLVQTYNQLFEENPINASGVDAKAILSARLSKSRRLENLIAQLPGEKKNGLFGNLIALSLGLTPNFKSNFDLAEDAKLQLSKDTYDDDLDNLLAQIGDQYADLFLAAKNLSDAILLSDILRVNTEITKAPLSASMIKRYDEHHQDLTLLKALVRQQLPEKYKEIFFDQSKNGYAGYIDGGASQEEFYKFIKPILEKMDGTEELLVKLNREDLLRKQRTFDNGSIPHQIHLGELHAILRRQEDFYPFLKDNREKIEKILTFRIPYYVGPLARGNSRFAWMTRKSEETITPWNFEEVVDKGASAQSFIERMTNFDKNLPNEKVLPKHSLLYEYFTVYNELTKVKYVTEGMRKPAFLSGEQKKAIVDLLFKTNRKVTVKQLKEDYFKKIECFDSVEISGVEDRFNASLGTYHDLLKIIKDKDFLDNEENEDILEDIVLTLTLFEDREMIEERLKTYAHLFDDKVMKQLKRRRYTGWGRLSRKLINGIRDKQSGKTILDFLKSDGFANRNFMQLIHDDSLTFKEDIQKAQVSGQGDSLHEHIANLAGSPAIKKGILQTVKVVDELVKVMGRHKPENIVIEMARENQTTQKGQKNSRERMKRIEEGIKELGSQILKEHPVENTQLQNEKLYLYYLQNGRDMYVDQELDINRLSDYDVDHIVPQSFLKDDSIDNKVLTRSDKARGKSDNVPSEEVVKKMKNYWRQLLNAKLITQRKFDNLTKAERGGLSELDKAGFIKRQLVETRQITKHVAQILDSRMNTKYDENDKLIREVKVITLKSKLVSDFRKDFQFYKVREINNYHHAHDAYLNAVVGTALIKKYPKLESEFVYGDYKVYDVRKMIAKSEQEIGKATAKYFFYSNIMNFFKTEITLANGEIRKRPLIETNGETGEIVWDKGRDFATVRKVLSMPQVNIVKKTEVQTGGFSKESILPKRNSDKLIARKKDWDPKKYGGFDSPTVAYSVLVVAKVEKGKSKKLKSVKELLGITIMERSSFEKNPIDFLEAKGYKEVKKDLIIKLPKYSLFELENGRKRMLASAGELQKGNELALPSKYVNFLYLASHYEKLKGSPEDNEQKQLFVEQHKHYLDEIIEQISEFSKRVILADANLDKVLSAYNKHRDKPIREQAENIIHLFTLTNLGAPAAFKYFDTTIDRKRYTSTKEVLDATLIHQSITGLYETRIDLSQLGGDGGGGGPAPGGSGGMDPLQLLQPLEAEIKGTKLKAHWNSGATITCVPQAFLEEEVPIKNIWIKTIHGEKEQPVYYLTFKIQGRKVEAEVISSPYDYILVSPSDIPWLMKKPLQLTTLVPLQEYEERLLKQTMLTGSYKEKLQSLFLKYDALWQHWENQVGHRRIKPHHIATGTVNPRPQKQYPINPKAKASIQTVINDLLKQGVLIQQNSIMNTPVYPVPKPDGKWRMVLDYREVNKTIPLIAAQNQHSAGILSSIFRGKYKTTLDLSNGFWAHSITPESYWLTAFTWLGQQYCWTRLPQGFLNSPALFNADVVDLLKEVPNVQVYVDDIYISHDDPREHLEQLEKVFSLLLNAGYVVSLKKSEIAQHEVEFLGFNITKEGRGLTETFKQKLLNITPPRDLKQLQSILGKLNFARNFIPNFSELVKPLYNIIATAPGKYITWTTDNSQQLQNIISMLNSAENLEERNPEVRLIMKVNTSPSAGYIRFYNEFAKRPIMYLNYVYTKAEVKFTNTEKLLTTIHKGLIKALDLGMGQEILVYSPIVSMTKIQKTPLPERKALPIRWITWMSYLEDPRIQFHYDKTLPELQQVPTVTDDIIAKIKHPSEFSMVFYTDGSAIKHPNVNKSHNAGMGIAQVQFKPEFTVINTWSIPLGDHTAQLAEVAAVEFACKKALKIDGPVLIVTDSFYVAESVNKELPYWQSNGFFNNKKKPLKHVSKWKSIADCIQLKPDIIIIHEKGHQPTASTFHTEGNNLADKLATQGSYVVNAGKRTADGSEFEKRTADGSEFESPKKKAKVE

SEQ ID NO: 679 - protein, 2176 aa, synthetic construct
MPAAKRVKLDGGDKKYSIGLDIGTNSVGWAVITDEYKVPSKKFKVLGNTDRHSIKKNLIGALLFDSGETAEATRLKRTARRRYTRRKNRICYLQEIFSNEMAKVDDSFFHRLEESFLVEEDKKHERHPIFGNIVDEVAYHEKYPTIYHLRKKLVDSTDKADLRLIYLALAHMIKFRGHFLIEGDLNPDNSDVDKLFIQLVQTYNQLFEENPINASGVDAKAILSARLSKSRRLENLIAQLPGEKKNGLFGNLIALSLGLTPNFKSNFDLAEDAKLQLSKDTYDDDLDNLLAQIGDQYADLFLAAKNLSDAILLSDILRVNTEITKAPLSASMIKRYDEHHQDLTLLKALVRQQLPEKYKEIFFDQSKNGYAGYIDGGASQEEFYKFIKPILEKMDGTEELLVKLNREDLLRKQRTFDNGSIPHQIHLGELHAILRRQEDFYPFLKDNREKIEKILTFRIPYYVGPLARGNSRFAWMTRKSEETITPWNFEEVVDKGASAQSFIERMTNFDKNLPNEKVLPKHSLLYEYFTVYNELTKVKYVTEGMRKPAFLSGEQKKAIVDLLFKTNRKVTVKQLKEDYFKKIECFDSVEISGVEDRFNASLGTYHDLLKIIKDKDFLDNEENEDILEDIVLTLTLFEDREMIEERLKTYAHLFDDKVMKQLKRRRYTGWGRLSRKLINGIRDKQSGKTILDFLKSDGFANRNFMQLIHDDSLTFKEDIQKAQVSGQGDSLHEHIANLAGSPAIKKGILQTVKVVDELVKVMGRHKPENIVIEMARENQTTQKGQKNSRERMKRIEEGIKELGSQILKEHPVENTQLQNEKLYLYYLQNGRDMYVDQELDINRLSDYDVDHIVPQSFLKDDSIDNKVLTRSDKARGKSDNVPSEEVVKKMKNYWRQLLNAKLITQRKFDNLTKAERGGLSELDKAGFIKRQLVETRQITKHVAQILDSRMNTKYDENDKLIREVKVITLKSKLVSDFRKDFQFYKVREINNYHHAHDAYLNAVVGTALIKKYPKLESEFVYGDYKVYDVRKMIAKSEQEIGKATAKYFFYSNIMNFFKTEITLANGEIRKRPLIETNGETGEIVWDKGRDFATVRKVLSMPQVNIVKKTEVQTGGFSKESILPKRNSDKLIARKKDWDPKKYGGFDSPTVAYSVLVVAKVEKGKSKKLKSVKELLGITIMERSSFEKNPIDFLEAKGYKEVKKDLIIKLPKYSLFELENGRKRMLASAGELQKGNELALPSKYVNFLYLASHYEKLKGSPEDNEQKQLFVEQHKHYLDEIIEQISEFSKRVILADANLDKVLSAYNKHRDKPIREQAENIIHLFTLTNLGAPAAFKYFDTTIDRKRYTSTKEVLDATLIHQSITGLYETRIDLSQLGGDGGGGSGSSEAAAKGGMDPLQLLQPLEAEIKGTKLKAHWNSGATITCVPQAFLEEEVPIKNIWIKTIHGEKEQPVYYLTFKIQGRKVEAEVISSPYDYILVSPSDIPWLMKKPLQLTTLVPLQEYEERLLKQTMLTGSYKEKLQSLFLKYDALWQHWENQVGHRRIKPHHIATGTVNPRPQKQYPINPKAKASIQTVINDLLKQGVLIQQNSIMNTPVYPVPKPDGKWRMVLDYREVNKTIPLIAAQNQHSAGILSSIFRGKYKTTLDLSNGFWAHSITPESYWLTAFTWLGQQYCWTRLPQGFLNSPALFNADVVDLLKEVPNVQVYVDDIYISHDDPREHLEQLEKVFSLLLNAGYVVSLKKSEIAQHEVEFLGFNITKEGRGLTETFKQKLLNITPPRDLKQLQSILGKLNFARNFIPNFSELVKPLYNIIATAPGKYITWTTDNSQQLQNIISMLNSAENLEERNPEVRLIMKVNTSPSAGYIRFYNEFAKRPIMYLNYVYTKAEVKFTNTEKLLTTIHKGLIKALDLGMGQEILVYSPIVSMTKIQKTPLPERKALPIRWITWMSYLEDPRIQFHYDKTLPELQQVPTVTDDIIAKIKHPSEFSMVFYTDGSAIKHPNVNKSHNAGMGIAQVQFKPEFTVINTWSIPLGDHTAQLAEVAAVEFACKKALKIDGPVLIVTDSFYVAESVNKELPYWQSNGFFNNKKKPLKHVSKWKSIADCIQLKPDIIIIHEKGHQPTASTFHTEGNNLADKLATQGSYVVNAGKRTADGSEFEKRTADGSEFESPKKKAKVE

SEQ ID NO: 680 - protein, 2176 aa, synthetic construct
MPAAKRVKLDGGDKKYSIGLDIGTNSVGWAVITDEYKVPSKKFKVLGNTDRHSIKKNLIGALLFDSGETAEATRLKRTARRRYTRRKNRICYLQEIFSNEMAKVDDSFFHRLEESFLVEEDKKHERHPIFGNIVDEVAYHEKYPTIYHLRKKLVDSTDKADLRLIYLALAHMIKFRGHFLIEGDLNPDNSDVDKLFIQLVQTYNQLFEENPINASGVDAKAILSARLSKSRRLENLIAQLPGEKKNGLFGNLIALSLGLTPNFKSNFDLAEDAKLQLSKDTYDDDLDNLLAQIGDQYADLFLAAKNLSDAILLSDILRVNTEITKAPLSASMIKRYDEHHQDLTLLKALVRQQLPEKYKEIFFDQSKNGYAGYIDGGASQEEFYKFIKPILEKMDGTEELLVKLNREDLLRKQRTFDNGSIPHQIHLGELHAILRRQEDFYPFLKDNREKIEKILTFRIPYYVGPLARGNSRFAWMTRKSEETITPWNFEEVVDKGASAQSFIERMTNFDKNLPNEKVLPKHSLLYEYFTVYNELTKVKYVTEGMRKPAFLSGEQKKAIVDLLFKTNRKVTVKQLKEDYFKKIECFDSVEISGVEDRFNASLGTYHDLLKIIKDKDFLDNEENEDILEDIVLTLTLFEDREMIEERLKTYAHLFDDKVMKQLKRRRYTGWGRLSRKLINGIRDKQSGKTILDFLKSDGFANRNFMQLIHDDSLTFKEDIQKAQVSGQGDSLHEHIANLAGSPAIKKGILQTVKVVDELVKVMGRHKPENIVIEMARENQTTQKGQKNSRERMKRIEEGIKELGSQILKEHPVENTQLQNEKLYLYYLQNGRDMYVDQELDINRLSDYDVDHIVPQSFLKDDSIDNKVLTRSDKARGKSDNVPSEEVVKKMKNYWRQLLNAKLITQRKFDNLTKAERGGLSELDKAGFIKRQLVETRQITKHVAQILDSRMNTKYDENDKLIREVKVITLKSKLVSDFRKDFQFYKVREINNYHHAHDAYLNAVVGTALIKKYPKLESEFVYGDYKVYDVRKMIAKSEQEIGKATAKYFFYSNIMNFFKTEITLANGEIRKRPLIETNGETGEIVWDKGRDFATVRKVLSMPQVNIVKKTEVQTGGFSKESILPKRNSDKLIARKKDWDPKKYGGFDSPTVAYSVLVVAKVEKGKSKKLKSVKELLGITIMERSSFEKNPIDFLEAKGYKEVKKDLIIKLPKYSLFELENGRKRMLASAGELQKGNELALPSKYVNFLYLASHYEKLKGSPEDNEQKQLFVEQHKHYLDEIIEQISEFSKRVILADANLDKVLSAYNKHRDKPIREQAENIIHLFTLTNLGAPAAFKYFDTTIDRKRYTSTKEVLDATLIHQSITGLYETRIDLSQLGGDGGEAAAKGGSPAPGGMDPLQLLQPLEAEIKGTKLKAHWNSGATITCVPQAFLEEEVPIKNIWIKTIHGEKEQPVYYLTFKIQGRKVEAEVISSPYDYILVSPSDIPWLMKKPLQLTTLVPLQEYEERLLKQTMLTGSYKEKLQSLFLKYDALWQHWENQVGHRRIKPHHIATGTVNPRPQKQYPINPKAKASIQTVINDLLKQGVLIQQNSIMNTPVYPVPKPDGKWRMVLDYREVNKTIPLIAAQNQHSAGILSSIFRGKYKTTLDLSNGFWAHSITPESYWLTAFTWLGQQYCWTRLPQGFLNSPALFNADVVDLLKEVPNVQVYVDDIYISHDDPREHLEQLEKVFSLLLNAGYVVSLKKSEIAQHEVEFLGFNITKEGRGLTETFKQKLLNITPPRDLKQLQSILGKLNFARNFIPNFSELVKPLYNIIATAPGKYITWTTDNSQQLQNIISMLNSAENLEERNPEVRLIMKVNTSPSAGYIRFYNEFAKRPIMYLNYVYTKAEVKFTNTEKLLTTIHKGLIKALDLGMGQEILVYSPIVSMTKIQKTPLPERKALPIRWITWMSYLEDPRIQFHYDKTLPELQQVPTVTDDIIAKIKHPSEFSMVFYTDGSAIKHPNVNKSHNAGMGIAQVQFKPEFTVINTWSIPLGDHTAQLAEVAAVEFACKKALKIDGPVLIVTDSFYVAESVNKELPYWQSNGFFNNKKKPLKHVSKWKSIADCIQLKPDIIIIHEKGHQPTASTFHTEGNNLADKLATQGSYVVNAGKRTADGSEFEKRTADGSEFESPKKKAKVE

SEQ ID NO: 681 - protein, 2175 aa, synthetic construct
MPAAKRVKLDGGDKKYSIGLDIGTNSVGWAVITDEYKVPSKKFKVLGNTDRHSIKKNLIGALLFDSGETAEATRLKRTARRRYTRRKNRICYLQEIFSNEMAKVDDSFFHRLEESFLVEEDKKHERHPIFGNIVDEVAYHEKYPTIYHLRKKLVDSTDKADLRLIYLALAHMIKFRGHFLIEGDLNPDNSDVDKLFIQLVQTYNQLFEENPINASGVDAKAILSARLSKSRRLENLIAQLPGEKKNGLFGNLIALSLGLTPNFKSNFDLAEDAKLQLSKDTYDDDLDNLLAQIGDQYADLFLAAKNLSDAILLSDILRVNTEITKAPLSASMIKRYDEHHQDLTLLKALVRQQLPEKYKEIFFDQSKNGYAGYIDGGASQEEFYKFIKPILEKMDGTEELLVKLNREDLLRKQRTFDNGSIPHQIHLGELHAILRRQEDFYPFLKDNREKIEKILTFRIPYYVGPLARGNSRFAWMTRKSEETITPWNFEEVVDKGASAQSFIERMTNFDKNLPNEKVLPKHSLLYEYFTVYNELTKVKYVTEGMRKPAFLSGEQKKAIVDLLFKTNRKVTVKQLKEDYFKKIECFDSVEISGVEDRFNASLGTYHDLLKIIKDKDFLDNEENEDILEDIVLTLTLFEDREMIEERLKTYAHLFDDKVMKQLKRRRYTGWGRLSRKLINGIRDKQSGKTILDFLKSDGFANRNFMQLIHDDSLTFKEDIQKAQVSGQGDSLHEHIANLAGSPAIKKGILQTVKVVDELVKVMGRHKPENIVIEMARENQTTQKGQKNSRERMKRIEEGIKELGSQILKEHPVENTQLQNEKLYLYYLQNGRDMYVDQELDINRLSDYDVDHIVPQSFLKDDSIDNKVLTRSDKARGKSDNVPSEEVVKKMKNYWRQLLNAKLITQRKFDNLTKAERGGLSELDKAGFIKRQLVETRQITKHVAQILDSRMNTKYDENDKLIREVKVITLKSKLVSDFRKDFQFYKVREINNYHHAHDAYLNAVVGTALIKKYPKLESEFVYGDYKVYDVRKMIAKSEQEIGKATAKYFFYSNIMNFFKTEITLANGEIRKRPLIETNGETGEIVWDKGRDFATVRKVLSMPQVNIVKKTEVQTGGFSKESILPKRNSDKLIARKKDWDPKKYGGFDSPTVAYSVLVVAKVEKGKSKKLKSVKELLGITIMERSSFEKNPIDFLEAKGYKEVKKDLIIKLPKYSLFELENGRKRMLASAGELQKGNELALPSKYVNFLYLASHYEKLKGSPEDNEQKQLFVEQHKHYLDEIIEQISEFSKRVILADANLDKVLSAYNKHRDKPIREQAENIIHLFTLTNLGAPAAFKYFDTTIDRKRYTSTKEVLDATLIHQSITGLYETRIDLSQLGGDGGGGGGSGGGGSGGMDPLQLLQPLEAEIKGTKLKAHWNSGATITCVPQAFLEEEVPIKNIWIKTIHGEKEQPVYYLTFKIQGRKVEAEVISSPYDYILVSPSDIPWLMKKPLQLTTLVPLQEYEERLLKQTMLTGSYKEKLQSLFLKYDALWQHWENQVGHRRIKPHHIATGTVNPRPQKQYPINPKAKASIQTVINDLLKQGVLIQQNSIMNTPVYPVPKPDGKWRMVLDYREVNKTIPLIAAQNQHSAGILSSIFRGKYKTTLDLSNGFWAHSITPESYWLTAFTWLGQQYCWTRLPQGFLNSPALFNADVVDLLKEVPNVQVYVDDIYISHDDPREHLEQLEKVFSLLLNAGYVVSLKKSEIAQHEVEFLGFNITKEGRGLTETFKQKLLNITPPRDLKQLQSILGKLNFARNFIPNFSELVKPLYNIIATAPGKYITWTTDNSQQLQNIISMLNSAENLEERNPEVRLIMKVNTSPSAGYIRFYNEFAKRPIMYLNYVYTKAEVKFTNTEKLLTTIHKGLIKALDLGMGQEILVYSPIVSMTKIQKTPLPERKALPIRWITWMSYLEDPRIQFHYDKTLPELQQVPTVTDDIIAKIKHPSEFSMVFYTDGSAIKHPNVNKSHNAGMGIAQVQFKPEFTVINTWSIPLGDHTAQLAEVAAVEFACKKALKIDGPVLIVTDSFYVAESVNKELPYWQSNGFFNNKKKPLKHVSKWKSIADCIQLKPDIIIIHEKGHQPTASTFHTEGNNLADKLATQGSYVVNAGKRTADGSEFEKRTADGSEFESPKKKAKVE

SEQ ID NO: 682 - protein, 2171 aa, synthetic construct
MPAAKRVKLDGGDKKYSIGLDIGTNSVGWAVITDEYKVPSKKFKVLGNTDRHSIKKNLIGALLFDSGETAEATRLKRTARRRYTRRKNRICYLQEIFSNEMAKVDDSFFHRLEESFLVEEDKKHERHPIFGNIVDEVAYHEKYPTIYHLRKKLVDSTDKADLRLIYLALAHMIKFRGHFLIEGDLNPDNSDVDKLFIQLVQTYNQLFEENPINASGVDAKAILSARLSKSRRLENLIAQLPGEKKNGLFGNLIALSLGLTPNFKSNFDLAEDAKLQLSKDTYDDDLDNLLAQIGDQYADLFLAAKNLSDAILLSDILRVNTEITKAPLSASMIKRYDEHHQDLTLLKALVRQQLPEKYKEIFFDQSKNGYAGYIDGGASQEEFYKFIKPILEKMDGTEELLVKLNREDLLRKQRTFDNGSIPHQIHLGELHAILRRQEDFYPFLKDNREKIEKILTFRIPYYVGPLARGNSRFAWMTRKSEETITPWNFEEVVDKGASAQSFIERMTNFDKNLPNEKVLPKHSLLYEYFTVYNELTKVKYVTEGMRKPAFLSGEQKKAIVDLLFKTNRKVTVKQLKEDYFKKIECFDSVEISGVEDRFNASLGTYHDLLKIIKDKDFLDNEENEDILEDIVLTLTLFEDREMIEERLKTYAHLFDDKVMKQLKRRRYTGWGRLSRKLINGIRDKQSGKTILDFLKSDGFANRNFMQLIHDDSLTFKEDIQKAQVSGQGDSLHEHIANLAGSPAIKKGILQTVKVVDELVKVMGRHKPENIVIEMARENQTTQKGQKNSRERMKRIEEGIKELGSQILKEHPVENTQLQNEKLYLYYLQNGRDMYVDQELDINRLSDYDVDHIVPQSFLKDDSIDNKVLTRSDKARGKSDNVPSEEVVKKMKNYWRQLLNAKLITQRKFDNLTKAERGGLSELDKAGFIKRQLVETRQITKHVAQILDSRMNTKYDENDKLIREVKVITLKSKLVSDFRKDFQFYKVREINNYHHAHDAYLNAVVGTALIKKYPKLESEFVYGDYKVYDVRKMIAKSEQEIGKATAKYFFYSNIMNFFKTEITLANGEIRKRPLIETNGETGEIVWDKGRDFATVRKVLSMPQVNIVKKTEVQTGGFSKESILPKRNSDKLIARKKDWDPKKYGGFDSPTVAYSVLVVAKVEKGKSKKLKSVKELLGITIMERSSFEKNPIDFLEAKGYKEVKKDLIIKLPKYSLFELENGRKRMLASAGELQKGNELALPSKYVNFLYLASHYEKLKGSPEDNEQKQLFVEQHKHYLDEIIEQISEFSKRVILADANLDKVLSAYNKHRDKPIREQAENIIHLFTLTNLGAPAAFKYFDTTIDRKRYTSTKEVLDATLIHQSITGLYETRIDLSQLGGDGGGGSGGSGGMDPLQLLQPLEAEIKGTKLKAHWNSGATITCVPQAFLEEEVPIKNIWIKTIHGEKEQPVYYLTFKIQGRKVEAEVISSPYDYILVSPSDIPWLMKKPLQLTTLVPLQEYEERLLKQTMLTGSYKEKLQSLFLKYDALWQHWENQVGHRRIKPHHIATGTVNPRPQKQYPINPKAKASIQTVINDLLKQGVLIQQNSIMNTPVYPVPKPDGKWRMVLDYREVNKTIPLIAAQNQHSAGILSSIFRGKYKTTLDLSNGFWAHSITPESYWLTAFTWLGQQYCWTRLPQGFLNSPALFNADVVDLLKEVPNVQVYVDDIYISHDDPREHLEQLEKVFSLLLNAGYVVSLKKSEIAQHEVEFLGFNITKEGRGLTETFKQKLLNITPPRDLKQLQSILGKLNFARNFIPNFSELVKPLYNIIATAPGKYITWTTDNSQQLQNIISMLNSAENLEERNPEVRLIMKVNTSPSAGYIRFYNEFAKRPIMYLNYVYTKAEVKFTNTEKLLTTIHKGLIKALDLGMGQEILVYSPIVSMTKIQKTPLPERKALPIRWITWMSYLEDPRIQFHYDKTLPELQQVPTVTDDIIAKIKHPSEFSMVFYTDGSAIKHPNVNKSHNAGMGIAQVQFKPEFTVINTWSIPLGDHTAQLAEVAAVEFACKKALKIDGPVLIVTDSFYVAESVNKELPYWQSNGFFNNKKKPLKHVSKWKSIADCIQLKPDIIIIHEKGHQPTASTFHTEGNNLADKLATQGSYVVNAGKRTADGSEFEKRTADGSEFESPKKKAKVE

SEQ ID NO: 683 - protein, 2174 aa, synthetic construct
MPAAKRVKLDGGDKKYSIGLDIGTNSVGWAVITDEYKVPSKKFKVLGNTDRHSIKKNLIGALLFDSGETAEATRLKRTARRRYTRRKNRICYLQEIFSNEMAKVDDSFFHRLEESFLVEEDKKHERHPIFGNIVDEVAYHEKYPTIYHLRKKLVDSTDKADLRLIYLALAHMIKFRGHFLIEGDLNPDNSDVDKLFIQLVQTYNQLFEENPINASGVDAKAILSARLSKSRRLENLIAQLPGEKKNGLFGNLIALSLGLTPNFKSNFDLAEDAKLQLSKDTYDDDLDNLLAQIGDQYADLFLAAKNLSDAILLSDILRVNTEITKAPLSASMIKRYDEHHQDLTLLKALVRQQLPEKYKEIFFDQSKNGYAGYIDGGASQEEFYKFIKPILEKMDGTEELLVKLNREDLLRKQRTFDNGSIPHQIHLGELHAILRRQEDFYPFLKDNREKIEKILTFRIPYYVGPLARGNSRFAWMTRKSEETITPWNFEEVVDKGASAQSFIERMTNFDKNLPNEKVLPKHSLLYEYFTVYNELTKVKYVTEGMRKPAFLSGEQKKAIVDLLFKTNRKVTVKQLKEDYFKKIECFDSVEISGVEDRFNASLGTYHDLLKIIKDKDFLDNEENEDILEDIVLTLTLFEDREMIEERLKTYAHLFDDKVMKQLKRRRYTGWGRLSRKLINGIRDKQSGKTILDFLKSDGFANRNFMQLIHDDSLTFKEDIQKAQVSGQGDSLHEHIANLAGSPAIKKGILQTVKVVDELVKVMGRHKPENIVIEMARENQTTQKGQKNSRERMKRIEEGIKELGSQILKEHPVENTQLQNEKLYLYYLQNGRDMYVDQELDINRLSDYDVDHIVPQSFLKDDSIDNKVLTRSDKARGKSDNVPSEEVVKKMKNYWRQLLNAKLITQRKFDNLTKAERGGLSELDKAGFIKRQLVETRQITKHVAQILDSRMNTKYDENDKLIREVKVITLKSKLVSDFRKDFQFYKVREINNYHHAHDAYLNAVVGTALIKKYPKLESEFVYGDYKVYDVRKMIAKSEQEIGKATAKYFFYSNIMNFFKTEITLANGEIRKRPLIETNGETGEIVWDKGRDFATVRKVLSMPQVNIVKKTEVQTGGFSKESILPKRNSDKLIARKKDWDPKKYGGFDSPTVAYSVLVVAKVEKGKSKKLKSVKELLGITIMERSSFEKNPIDFLEAKGYKEVKKDLIIKLPKYSLFELENGRKRMLASAGELQKGNELALPSKYVNFLYLASHYEKLKGSPEDNEQKQLFVEQHKHYLDEIIEQISEFSKRVILADANLDKVLSAYNKHRDKPIREQAENIIHLFTLTNLGAPAAFKYFDTTIDRKRYTSTKEVLDATLIHQSITGLYETRIDLSQLGGDGGGSSGGSPAPGGMDPLQLLQPLEAEIKGTKLKAHWNSGATITCVPQAFLEEEVPIKNIWIKTIHGEKEQPVYYLTFKIQGRKVEAEVISSPYDYILVSPSDIPWLMKKPLQLTTLVPLQEYEERLLKQTMLTGSYKEKLQSLFLKYDALWQHWENQVGHRRIKPHHIATGTVNPRPQKQYPINPKAKASIQTVINDLLKQGVLIQQNSIMNTPVYPVPKPDGKWRMVLDYREVNKTIPLIAAQNQHSAGILSSIFRGKYKTTLDLSNGFWAHSITPESYWLTAFTWLGQQYCWTRLPQGFLNSPALFNADVVDLLKEVPNVQVYVDDIYISHDDPREHLEQLEKVFSLLLNAGYVVSLKKSEIAQHEVEFLGFNITKEGRGLTETFKQKLLNITPPRDLKQLQSILGKLNFARNFIPNFSELVKPLYNIIATAPGKYITWTTDNSQQLQNIISMLNSAENLEERNPEVRLIMKVNTSPSAGYIRFYNEFAKRPIMYLNYVYTKAEVKFTNTEKLLTTIHKGLIKALDLGMGQEILVYSPIVSMTKIQKTPLPERKALPIRWITWMSYLEDPRIQFHYDKTLPELQQVPTVTDDIIAKIKHPSEFSMVFYTDGSAIKHPNVNKSHNAGMGIAQVQFKPEFTVINTWSIPLGDHTAQLAEVAAVEFACKKALKIDGPVLIVTDSFYVAESVNKELPYWQSNGFFNNKKKPLKHVSKWKSIADCIQLKPDIIIIHEKGHQPTASTFHTEGNNLADKLATQGSYVVNAGKRTADGSEFEKRTADGSEFESPKKKAKVE

SEQ ID NO: 684 - protein, 2176 aa, synthetic construct
MPAAKRVKLDGGDKKYSIGLDIGTNSVGWAVITDEYKVPSKKFKVLGNTDRHSIKKNLIGALLFDSGETAEATRLKRTARRRYTRRKNRICYLQEIFSNEMAKVDDSFFHRLEESFLVEEDKKHERHPIFGNIVDEVAYHEKYPTIYHLRKKLVDSTDKADLRLIYLALAHMIKFRGHFLIEGDLNPDNSDVDKLFIQLVQTYNQLFEENPINASGVDAKAILSARLSKSRRLENLIAQLPGEKKNGLFGNLIALSLGLTPNFKSNFDLAEDAKLQLSKDTYDDDLDNLLAQIGDQYADLFLAAKNLSDAILLSDILRVNTEITKAPLSASMIKRYDEHHQDLTLLKALVRQQLPEKYKEIFFDQSKNGYAGYIDGGASQEEFYKFIKPILEKMDGTEELLVKLNREDLLRKQRTFDNGSIPHQIHLGELHAILRRQEDFYPFLKDNREKIEKILTFRIPYYVGPLARGNSRFAWMTRKSEETITPWNFEEVVDKGASAQSFIERMTNFDKNLPNEKVLPKHSLLYEYFTVYNELTKVKYVTEGMRKPAFLSGEQKKAIVDLLFKTNRKVTVKQLKEDYFKKIECFDSVEISGVEDRFNASLGTYHDLLKIIKDKDFLDNEENEDILEDIVLTLTLFEDREMIEERLKTYAHLFDDKVMKQLKRRRYTGWGRLSRKLINGIRDKQSGKTILDFLKSDGFANRNFMQLIHDDSLTFKEDIQKAQVSGQGDSLHEHIANLAGSPAIKKGILQTVKVVDELVKVMGRHKPENIVIEMARENQTTQKGQKNSRERMKRIEEGIKELGSQILKEHPVENTQLQNEKLYLYYLQNGRDMYVDQELDINRLSDYDVDHIVPQSFLKDDSIDNKVLTRSDKARGKSDNVPSEEVVKKMKNYWRQLLNAKLITQRKFDNLTKAERGGLSELDKAGFIKRQLVETRQITKHVAQILDSRMNTKYDENDKLIREVKVITLKSKLVSDFRKDFQFYKVREINNYHHAHDAYLNAVVGTALIKKYPKLESEFVYGDYKVYDVRKMIAKSEQEIGKATAKYFFYSNIMNFFKTEITLANGEIRKRPLIETNGETGEIVWDKGRDFATVRKVLSMPQVNIVKKTEVQTGGFSKESILPKRNSDKLIARKKDWDPKKYGGFDSPTVAYSVLVVAKVEKGKSKKLKSVKELLGITIMERSSFEKNPIDFLEAKGYKEVKKDLIIKLPKYSLFELENGRKRMLASAGELQKGNELALPSKYVNFLYLASHYEKLKGSPEDNEQKQLFVEQHKHYLDEIIEQISEFSKRVILADANLDKVLSAYNKHRDKPIREQAENIIHLFTLTNLGAPAAFKYFDTTIDRKRYTSTKEVLDATLIHQSITGLYETRIDLSQLGGDGGGGSEAAAKGSSGGMDPLQLLQPLEAEIKGTKLKAHWNSGATITCVPQAFLEEEVPIKNIWIKTIHGEKEQPVYYLTFKIQGRKVEAEVISSPYDYILVSPSDIPWLMKKPLQLTTLVPLQEYEERLLKQTMLTGSYKEKLQSLFLKYDALWQHWENQVGHRRIKPHHIATGTVNPRPQKQYPINPKAKASIQTVINDLLKQGVLIQQNSIMNTPVYPVPKPDGKWRMVLDYREVNKTIPLIAAQNQHSAGILSSIFRGKYKTTLDLSNGFWAHSITPESYWLTAFTWLGQQYCWTRLPQGFLNSPALFNADVVDLLKEVPNVQVYVDDIYISHDDPREHLEQLEKVFSLLLNAGYVVSLKKSEIAQHEVEFLGFNITKEGRGLTETFKQKLLNITPPRDLKQLQSILGKLNFARNFIPNFSELVKPLYNIIATAPGKYITWTTDNSQQLQNIISMLNSAENLEERNPEVRLIMKVNTSPSAGYIRFYNEFAKRPIMYLNYVYTKAEVKFTNTEKLLTTIHKGLIKALDLGMGQEILVYSPIVSMTKIQKTPLPERKALPIRWITWMSYLEDPRIQFHYDKTLPELQQVPTVTDDIIAKIKHPSEFSMVFYTDGSAIKHPNVNKSHNAGMGIAQVQFKPEFTVINTWSIPLGDHTAQLAEVAAVEFACKKALKIDGPVLIVTDSFYVAESVNKELPYWQSNGFFNNKKKPLKHVSKWKSIADCIQLKPDIIIIHEKGHQPTASTFHTEGNNLADKLATQGSYVVNAGKRTADGSEFEKRTADGSEFESPKKKAKVE

SEQ ID NO: 685 - protein, 2176 aa, synthetic construct
MPAAKRVKLDGGDKKYSIGLDIGTNSVGWAVITDEYKVPSKKFKVLGNTDRHSIKKNLIGALLFDSGETAEATRLKRTARRRYTRRKNRICYLQEIFSNEMAKVDDSFFHRLEESFLVEEDKKHERHPIFGNIVDEVAYHEKYPTIYHLRKKLVDSTDKADLRLIYLALAHMIKFRGHFLIEGDLNPDNSDVDKLFIQLVQTYNQLFEENPINASGVDAKAILSARLSKSRRLENLIAQLPGEKKNGLFGNLIALSLGLTPNFKSNFDLAEDAKLQLSKDTYDDDLDNLLAQIGDQYADLFLAAKNLSDAILLSDILRVNTEITKAPLSASMIKRYDEHHQDLTLLKALVRQQLPEKYKEIFFDQSKNGYAGYIDGGASQEEFYKFIKPILEKMDGTEELLVKLNREDLLRKQRTFDNGSIPHQIHLGELHAILRRQEDFYPFLKDNREKIEKILTFRIPYYVGPLARGNSRFAWMTRKSEETITPWNFEEVVDKGASAQSFIERMTNFDKNLPNEKVLPKHSLLYEYFTVYNELTKVKYVTEGMRKPAFLSGEQKKAIVDLLFKTNRKVTVKQLKEDYFKKIECFDSVEISGVEDRFNASLGTYHDLLKIIKDKDFLDNEENEDILEDIVLTLTLFEDREMIEERLKTYAHLFDDKVMKQLKRRRYTGWGRLSRKLINGIRDKQSGKTILDFLKSDGFANRNFMQLIHDDSLTFKEDIQKAQVSGQGDSLHEHIANLAGSPAIKKGILQTVKVVDELVKVMGRHKPENIVIEMARENQTTQKGQKNSRERMKRIEEGIKELGSQILKEHPVENTQLQNEKLYLYYLQNGRDMYVDQELDINRLSDYDVDHIVPQSFLKDDSIDNKVLTRSDKARGKSDNVPSEEVVKKMKNYWRQLLNAKLITQRKFDNLTKAERGGLSELDKAGFIKRQLVETRQITKHVAQILDSRMNTKYDENDKLIREVKVITLKSKLVSDFRKDFQFYKVREINNYHHAHDAYLNAVVGTALIKKYPKLESEFVYGDYKVYDVRKMIAKSEQEIGKATAKYFFYSNIMNFFKTEITLANGEIRKRPLIETNGETGEIVWDKGRDFATVRKVLSMPQVNIVKKTEVQTGGFSKESILPKRNSDKLIARKKDWDPKKYGGFDSPTVAYSVLVVAKVEKGKSKKLKSVKELLGITIMERSSFEKNPIDFLEAKGYKEVKKDLIIKLPKYSLFELENGRKRMLASAGELQKGNELALPSKYVNFLYLASHYEKLKGSPEDNEQKQLFVEQHKHYLDEIIEQISEFSKRVILADANLDKVLSAYNKHRDKPIREQAENIIHLFTLTNLGAPAAFKYFDTTIDRKRYTSTKEVLDATLIHQSITGLYETRIDLSQLGGDGGGGGEAAAKGSSGGMDPLQLLQPLEAEIKGTKLKAHWNSGATITCVPQAFLEEEVPIKNIWIKTIHGEKEQPVYYLTFKIQGRKVEAEVISSPYDYILVSPSDIPWLMKKPLQLTTLVPLQEYEERLLKQTMLTGSYKEKLQSLFLKYDALWQHWENQVGHRRIKPHHIATGTVNPRPQKQYPINPKAKASIQTVINDLLKQGVLIQQNSIMNTPVYPVPKPDGKWRMVLDYREVNKTIPLIAAQNQHSAGILSSIFRGKYKTTLDLSNGFWAHSITPESYWLTAFTWLGQQYCWTRLPQGFLNSPALFNADVVDLLKEVPNVQVYVDDIYISHDDPREHLEQLEKVFSLLLNAGYVVSLKKSEIAQHEVEFLGFNITKEGRGLTETFKQKLLNITPPRDLKQLQSILGKLNFARNFIPNFSELVKPLYNIIATAPGKYITWTTDNSQQLQNIISMLNSAENLEERNPEVRLIMKVNTSPSAGYIRFYNEFAKRPIMYLNYVYTKAEVKFTNTEKLLTTIHKGLIKALDLGMGQEILVYSPIVSMTKIQKTPLPERKALPIRWITWMSYLEDPRIQFHYDKTLPELQQVPTVTDDIIAKIKHPSEFSMVFYTDGSAIKHPNVNKSHNAGMGIAQVQFKPEFTVINTWSIPLGDHTAQLAEVAAVEFACKKALKIDGPVLIVTDSFYVAESVNKELPYWQSNGFFNNKKKPLKHVSKWKSIADCIQLKPDIIIIHEKGHQPTASTFHTEGNNLADKLATQGSYVVNAGKRTADGSEFEKRTADGSEFESPKKKAKVE

SEQ ID NO: 686 - protein, 2176 aa, synthetic construct
MPAAKRVKLDGGDKKYSIGLDIGTNSVGWAVITDEYKVPSKKFKVLGNTDRHSIKKNLIGALLFDSGETAEATRLKRTARRRYTRRKNRICYLQEIFSNEMAKVDDSFFHRLEESFLVEEDKKHERHPIFGNIVDEVAYHEKYPTIYHLRKKLVDSTDKADLRLIYLALAHMIKFRGHFLIEGDLNPDNSDVDKLFIQLVQTYNQLFEENPINASGVDAKAILSARLSKSRRLENLIAQLPGEKKNGLFGNLIALSLGLTPNFKSNFDLAEDAKLQLSKDTYDDDLDNLLAQIGDQYADLFLAAKNLSDAILLSDILRVNTEITKAPLSASMIKRYDEHHQDLTLLKALVRQQLPEKYKEIFFDQSKNGYAGYIDGGASQEEFYKFIKPILEKMDGTEELLVKLNREDLLRKQRTFDNGSIPHQIHLGELHAILRRQEDFYPFLKDNREKIEKILTFRIPYYVGPLARGNSRFAWMTRKSEETITPWNFEEVVDKGASAQSFIERMTNFDKNLPNEKVLPKHSLLYEYFTVYNELTKVKYVTEGMRKPAFLSGEQKKAIVDLLFKTNRKVTVKQLKEDYFKKIECFDSVEISGVEDRFNASLGTYHDLLKIIKDKDFLDNEENEDILEDIVLTLTLFEDREMIEERLKTYAHLFDDKVMKQLKRRRYTGWGRLSRKLINGIRDKQSGKTILDFLKSDGFANRNFMQLIHDDSLTFKEDIQKAQVSGQGDSLHEHIANLAGSPAIKKGILQTVKVVDELVKVMGRHKPENIVIEMARENQTTQKGQKNSRERMKRIEEGIKELGSQILKEHPVENTQLQNEKLYLYYLQNGRDMYVDQELDINRLSDYDVDHIVPQSFLKDDSIDNKVLTRSDKARGKSDNVPSEEVVKKMKNYWRQLLNAKLITQRKFDNLTKAERGGLSELDKAGFIKRQLVETRQITKHVAQILDSRMNTKYDENDKLIREVKVITLKSKLVSDFRKDFQFYKVREINNYHHAHDAYLNAVVGTALIKKYPKLESEFVYGDYKVYDVRKMIAKSEQEIGKATAKYFFYSNIMNFFKTEITLANGEIRKRPLIETNGETGEIVWDKGRDFATVRKVLSMPQVNIVKKTEVQTGGFSKESILPKRNSDKLIARKKDWDPKKYGGFDSPTVAYSVLVVAKVEKGKSKKLKSVKELLGITIMERSSFEKNPIDFLEAKGYKEVKKDLIIKLPKYSLFELENGRKRMLASAGELQKGNELALPSKYVNFLYLASHYEKLKGSPEDNEQKQLFVEQHKHYLDEIIEQISEFSKRVILADANLDKVLSAYNKHRDKPIREQAENIIHLFTLTNLGAPAAFKYFDTTIDRKRYTSTKEVLDATLIHQSITGLYETRIDLSQLGGDGGEAAAKPAPGSSGGMDPLQLLQPLEAEIKGTKLKAHWNSGATITCVPQAFLEEEVPIKNIWIKTIHGEKEQPVYYLTFKIQGRKVEAEVISSPYDYILVSPSDIPWLMKKPLQLTTLVPLQEYEERLLKQTMLTGSYKEKLQSLFLKYDALWQHWENQVGHRRIKPHHIATGTVNPRPQKQYPINPKAKASIQTVINDLLKQGVLIQQNSIMNTPVYPVPKPDGKWRMVLDYREVNKTIPLIAAQNQHSAGILSSIFRGKYKTTLDLSNGFWAHSITPESYWLTAFTWLGQQYCWTRLPQGFLNSPALFNADVVDLLKEVPNVQVYVDDIYISHDDPREHLEQLEKVFSLLLNAGYVVSLKKSEIAQHEVEFLGFNITKEGRGLTETFKQKLLNITPPRDLKQLQSILGKLNFARNFIPNFSELVKPLYNIIATAPGKYITWTTDNSQQLQNIISMLNSAENLEERNPEVRLIMKVNTSPSAGYIRFYNEFAKRPIMYLNYVYTKAEVKFTNTEKLLTTIHKGLIKALDLGMGQEILVYSPIVSMTKIQKTPLPERKALPIRWITWMSYLEDPRIQFHYDKTLPELQQVPTVTDDIIAKIKHPSEFSMVFYTDGSAIKHPNVNKSHNAGMGIAQVQFKPEFTVINTWSIPLGDHTAQLAEVAAVEFACKKALKIDGPVLIVTDSFYVAESVNKELPYWQSNGFFNNKKKPLKHVSKWKSIADCIQLKPDIIIIHEKGHQPTASTFHTEGNNLADKLATQGSYVVNAGKRTADGSEFEKRTADGSEFESPKKKAKVE

SEQ ID NO: 687 - protein, 2174 aa, synthetic construct
MPAAKRVKLDGGDKKYSIGLDIGTNSVGWAVITDEYKVPSKKFKVLGNTDRHSIKKNLIGALLFDSGETAEATRLKRTARRRYTRRKNRICYLQEIFSNEMAKVDDSFFHRLEESFLVEEDKKHERHPIFGNIVDEVAYHEKYPTIYHLRKKLVDSTDKADLRLIYLALAHMIKFRGHFLIEGDLNPDNSDVDKLFIQLVQTYNQLFEENPINASGVDAKAILSARLSKSRRLENLIAQLPGEKKNGLFGNLIALSLGLTPNFKSNFDLAEDAKLQLSKDTYDDDLDNLLAQIGDQYADLFLAAKNLSDAILLSDILRVNTEITKAPLSASMIKRYDEHHQDLTLLKALVRQQLPEKYKEIFFDQSKNGYAGYIDGGASQEEFYKFIKPILEKMDGTEELLVKLNREDLLRKQRTFDNGSIPHQIHLGELHAILRRQEDFYPFLKDNREKIEKILTFRIPYYVGPLARGNSRFAWMTRKSEETITPWNFEEVVDKGASAQSFIERMTNFDKNLPNEKVLPKHSLLYEYFTVYNELTKVKYVTEGMRKPAFLSGEQKKAIVDLLFKTNRKVTVKQLKEDYFKKIECFDSVEISGVEDRFNASLGTYHDLLKIIKDKDFLDNEENEDILEDIVLTLTLFEDREMIEERLKTYAHLFDDKVMKQLKRRRYTGWGRLSRKLINGIRDKQSGKTILDFLKSDGFANRNFMQLIHDDSLTFKEDIQKAQVSGQGDSLHEHIANLAGSPAIKKGILQTVKVVDELVKVMGRHKPENIVIEMARENQTTQKGQKNSRERMKRIEEGIKELGSQILKEHPVENTQLQNEKLYLYYLQNGRDMYVDQELDINRLSDYDVDHIVPQSFLKDDSIDNKVLTRSDKARGKSDNVPSEEVVKKMKNYWRQLLNAKLITQRKFDNLTKAERGGLSELDKAGFIKRQLVETRQITKHVAQILDSRMNTKYDENDKLIREVKVITLKSKLVSDFRKDFQFYKVREINNYHHAHDAYLNAVVGTALIKKYPKLESEFVYGDYKVYDVRKMIAKSEQEIGKATAKYFFYSNIMNFFKTEITLANGEIRKRPLIETNGETGEIVWDKGRDFATVRKVLSMPQVNIVKKTEVQTGGFSKESILPKRNSDKLIARKKDWDPKKYGGFDSPTVAYSVLVVAKVEKGKSKKLKSVKELLGITIMERSSFEKNPIDFLEAKGYKEVKKDLIIKLPKYSLFELENGRKRMLASAGELQKGNELALPSKYVNFLYLASHYEKLKGSPEDNEQKQLFVEQHKHYLDEIIEQISEFSKRVILADANLDKVLSAYNKHRDKPIREQAENIIHLFTLTNLGAPAAFKYFDTTIDRKRYTSTKEVLDATLIHQSITGLYETRIDLSQLGGDGGGGGPAPGSSGGMDPLQLLQPLEAEIKGTKLKAHWNSGATITCVPQAFLEEEVPIKNIWIKTIHGEKEQPVYYLTFKIQGRKVEAEVISSPYDYILVSPSDIPWLMKKPLQLTTLVPLQEYEERLLKQTMLTGSYKEKLQSLFLKYDALWQHWENQVGHRRIKPHHIATGTVNPRPQKQYPINPKAKASIQTVINDLLKQGVLIQQNSIMNTPVYPVPKPDGKWRMVLDYREVNKTIPLIAAQNQHSAGILSSIFRGKYKTTLDLSNGFWAHSITPESYWLTAFTWLGQQYCWTRLPQGFLNSPALFNADVVDLLKEVPNVQVYVDDIYISHDDPREHLEQLEKVFSLLLNAGYVVSLKKSEIAQHEVEFLGFNITKEGRGLTETFKQKLLNITPPRDLKQLQSILGKLNFARNFIPNFSELVKPLYNIIATAPGKYITWTTDNSQQLQNIISMLNSAENLEERNPEVRLIMKVNTSPSAGYIRFYNEFAKRPIMYLNYVYTKAEVKFTNTEKLLTTIHKGLIKALDLGMGQEILVYSPIVSMTKIQKTPLPERKALPIRWITWMSYLEDPRIQFHYDKTLPELQQVPTVTDDIIAKIKHPSEFSMVFYTDGSAIKHPNVNKSHNAGMGIAQVQFKPEFTVINTWSIPLGDHTAQLAEVAAVEFACKKALKIDGPVLIVTDSFYVAESVNKELPYWQSNGFFNNKKKPLKHVSKWKSIADCIQLKPDIIIIHEKGHQPTASTFHTEGNNLADKLATQGSYVVNAGKRTADGSEFEKRTADGSEFESPKKKAKVE

SEQ ID NO: 688 - protein, 2173 aa, synthetic construct
MPAAKRVKLDGGDKKYSIGLDIGTNSVGWAVITDEYKVPSKKFKVLGNTDRHSIKKNLIGALLFDSGETAEATRLKRTARRRYTRRKNRICYLQEIFSNEMAKVDDSFFHRLEESFLVEEDKKHERHPIFGNIVDEVAYHEKYPTIYHLRKKLVDSTDKADLRLIYLALAHMIKFRGHFLIEGDLNPDNSDVDKLFIQLVQTYNQLFEENPINASGVDAKAILSARLSKSRRLENLIAQLPGEKKNGLFGNLIALSLGLTPNFKSNFDLAEDAKLQLSKDTYDDDLDNLLAQIGDQYADLFLAAKNLSDAILLSDILRVNTEITKAPLSASMIKRYDEHHQDLTLLKALVRQQLPEKYKEIFFDQSKNGYAGYIDGGASQEEFYKFIKPILEKMDGTEELLVKLNREDLLRKQRTFDNGSIPHQIHLGELHAILRRQEDFYPFLKDNREKIEKILTFRIPYYVGPLARGNSRFAWMTRKSEETITPWNFEEVVDKGASAQSFIERMTNFDKNLPNEKVLPKHSLLYEYFTVYNELTKVKYVTEGMRKPAFLSGEQKKAIVDLLFKTNRKVTVKQLKEDYFKKIECFDSVEISGVEDRFNASLGTYHDLLKIIKDKDFLDNEENEDILEDIVLTLTLFEDREMIEERLKTYAHLFDDKVMKQLKRRRYTGWGRLSRKLINGIRDKQSGKTILDFLKSDGFANRNFMQLIHDDSLTFKEDIQKAQVSGQGDSLHEHIANLAGSPAIKKGILQTVKVVDELVKVMGRHKPENIVIEMARENQTTQKGQKNSRERMKRIEEGIKELGSQILKEHPVENTQLQNEKLYLYYLQNGRDMYVDQELDINRLSDYDVDHIVPQSFLKDDSIDNKVLTRSDKARGKSDNVPSEEVVKKMKNYWRQLLNAKLITQRKFDNLTKAERGGLSELDKAGFIKRQLVETRQITKHVAQILDSRMNTKYDENDKLIREVKVITLKSKLVSDFRKDFQFYKVREINNYHHAHDAYLNAVVGTALIKKYPKLESEFVYGDYKVYDVRKMIAKSEQEIGKATAKYFFYSNIMNFFKTEITLANGEIRKRPLIETNGETGEIVWDKGRDFATVRKVLSMPQVNIVKKTEVQTGGFSKESILPKRNSDKLIARKKDWDPKKYGGFDSPTVAYSVLVVAKVEKGKSKKLKSVKELLGITIMERSSFEKNPIDFLEAKGYKEVKKDLIIKLPKYSLFELENGRKRMLASAGELQKGNELALPSKYVNFLYLASHYEKLKGSPEDNEQKQLFVEQHKHYLDEIIEQISEFSKRVILADANLDKVLSAYNKHRDKPIREQAENIIHLFTLTNLGAPAAFKYFDTTIDRKRYTSTKEVLDATLIHQSITGLYETRIDLSQLGGDGGEAAAKGSSGGMDPLQLLQPLEAEIKGTKLKAHWNSGATITCVPQAFLEEEVPIKNIWIKTIHGEKEQPVYYLTFKIQGRKVEAEVISSPYDYILVSPSDIPWLMKKPLQLTTLVPLQEYEERLLKQTMLTGSYKEKLQSLFLKYDALWQHWENQVGHRRIKPHHIATGTVNPRPQKQYPINPKAKASIQTVINDLLKQGVLIQQNSIMNTPVYPVPKPDGKWRMVLDYREVNKTIPLIAAQNQHSAGILSSIFRGKYKTTLDLSNGFWAHSITPESYWLTAFTWLGQQYCWTRLPQGFLNSPALFNADVVDLLKEVPNVQVYVDDIYISHDDPREHLEQLEKVFSLLLNAGYVVSLKKSEIAQHEVEFLGFNITKEGRGLTETFKQKLLNITPPRDLKQLQSILGKLNFARNFIPNFSELVKPLYNIIATAPGKYITWTTDNSQQLQNIISMLNSAENLEERNPEVRLIMKVNTSPSAGYIRFYNEFAKRPIMYLNYVYTKAEVKFTNTEKLLTTIHKGLIKALDLGMGQEILVYSPIVSMTKIQKTPLPERKALPIRWITWMSYLEDPRIQFHYDKTLPELQQVPTVTDDIIAKIKHPSEFSMVFYTDGSAIKHPNVNKSHNAGMGIAQVQFKPEFTVINTWSIPLGDHTAQLAEVAAVEFACKKALKIDGPVLIVTDSFYVAESVNKELPYWQSNGFFNNKKKPLKHVSKWKSIADCIQLKPDIIIIHEKGHQPTASTFHTEGNNLADKLATQGSYVVNAGKRTADGSEFEKRTADGSEFESPKKKAKVE

SEQ ID NO: 689 - protein, 2176 aa, synthetic construct
MPAAKRVKLDGGDKKYSIGLDIGTNSVGWAVITDEYKVPSKKFKVLGNTDRHSIKKNLIGALLFDSGETAEATRLKRTARRRYTRRKNRICYLQEIFSNEMAKVDDSFFHRLEESFLVEEDKKHERHPIFGNIVDEVAYHEKYPTIYHLRKKLVDSTDKADLRLIYLALAHMIKFRGHFLIEGDLNPDNSDVDKLFIQLVQTYNQLFEENPINASGVDAKAILSARLSKSRRLENLIAQLPGEKKNGLFGNLIALSLGLTPNFKSNFDLAEDAKLQLSKDTYDDDLDNLLAQIGDQYADLFLAAKNLSDAILLSDILRVNTEITKAPLSASMIKRYDEHHQDLTLLKALVRQQLPEKYKEIFFDQSKNGYAGYIDGGASQEEFYKFIKPILEKMDGTEELLVKLNREDLLRKQRTFDNGSIPHQIHLGELHAILRRQEDFYPFLKDNREKIEKILTFRIPYYVGPLARGNSRFAWMTRKSEETITPWNFEEVVDKGASAQSFIERMTNFDKNLPNEKVLPKHSLLYEYFTVYNELTKVKYVTEGMRKPAFLSGEQKKAIVDLLFKTNRKVTVKQLKEDYFKKIECFDSVEISGVEDRFNASLGTYHDLLKIIKDKDFLDNEENEDILEDIVLTLTLFEDREMIEERLKTYAHLFDDKVMKQLKRRRYTGWGRLSRKLINGIRDKQSGKTILDFLKSDGFANRNFMQLIHDDSLTFKEDIQKAQVSGQGDSLHEHIANLAGSPAIKKGILQTVKVVDELVKVMGRHKPENIVIEMARENQTTQKGQKNSRERMKRIEEGIKELGSQILKEHPVENTQLQNEKLYLYYLQNGRDMYVDQELDINRLSDYDVDHIVPQSFLKDDSIDNKVLTRSDKARGKSDNVPSEEVVKKMKNYWRQLLNAKLITQRKFDNLTKAERGGLSELDKAGFIKRQLVETRQITKHVAQILDSRMNTKYDENDKLIREVKVITLKSKLVSDFRKDFQFYKVREINNYHHAHDAYLNAVVGTALIKKYPKLESEFVYGDYKVYDVRKMIAKSEQEIGKATAKYFFYSNIMNFFKTEITLANGEIRKRPLIETNGETGEIVWDKGRDFATVRKVLSMPQVNIVKKTEVQTGGFSKESILPKRNSDKLIARKKDWDPKKYGGFDSPTVAYSVLVVAKVEKGKSKKLKSVKELLGITIMERSSFEKNPIDFLEAKGYKEVKKDLIIKLPKYSLFELENGRKRMLASAGELQKGNELALPSKYVNFLYLASHYEKLKGSPEDNEQKQLFVEQHKHYLDEIIEQISEFSKRVILADANLDKVLSAYNKHRDKPIREQAENIIHLFTLTNLGAPAAFKYFDTTIDRKRYTSTKEVLDATLIHQSITGLYETRIDLSQLGGDGGEAAAKPAPGGSGGMNPLQLLQPLPAEVKGTKLLAHWNSGATITCIPESFLEDEQPIKQTLIKTIHGEKQQNVYYLTFKVKGRKVEAEVIASPYEYILLSPTDVPWLTQQPLQLTILVPLQEYQDRILNKTALPEEQKQQLKALFTKYDNLWQHWENQVGHRKIRPHNIATGDYPPRPQKQYPINPKAKPSIQIVIDDLLKQGVLTPQNSTMNTPVYPVPKPDGRWRMVLDYREVNKTIPLTAAQNQHSAGILATIVRQKYKTTLDLANGFWAHPITPDSYWLTAFTWQGKQYCWTRLPQGFLNSPALFTADAVDLLKEVPNVQVYVDDIYLSHDNPHEHIQQLEKVFQILLQAGYVVSLKKSEIGQRTVEFLGFNITKEGRGLTDTFKTKLLNVTPPKDLKQLQSILGLLNFARNFIPNFAELVQTLYNLIASSKGKYIEWTEDNTKQLNKVIEALNTASNLEERLPDQRLVIKVNTSPSAGYVRYYNESGKKPIMYLNYVFSKAELKFSMLEKLLTTMHKALIKAMDLAMGQEILVYSPIVSMTKIQKTPLPERKALPIRWITWMTYLEDPRIQFHYDKTLPELKHIPDVYTSSIPPLKHPSQYEGVFCTDGSAIKSPDPTKSNNAGMGIVHAIYNPEYKILNQWSIPLGHHTAQMAEIAAVEFACKKALKVPGPVLVITDSFYVAESANKELPYWKSNGFVNNKKEPLKHISKWKSIAECLSIKPDITIQHEKGHQPINTSIHTEGNALADKLATQGSYVVNAGKRTADGSEFEKRTADGSEFESPKKKAKVE

SEQ ID NO: 690 - protein, 2176 aa, synthetic construct
MPAAKRVKLDGGDKKYSIGLDIGTNSVGWAVITDEYKVPSKKFKVLGNTDRHSIKKNLIGALLFDSGETAEATRLKRTARRRYTRRKNRICYLQEIFSNEMAKVDDSFFHRLEESFLVEEDKKHERHPIFGNIVDEVAYHEKYPTIYHLRKKLVDSTDKADLRLIYLALAHMIKFRGHFLIEGDLNPDNSDVDKLFIQLVQTYNQLFEENPINASGVDAKAILSARLSKSRRLENLIAQLPGEKKNGLFGNLIALSLGLTPNFKSNFDLAEDAKLQLSKDTYDDDLDNLLAQIGDQYADLFLAAKNLSDAILLSDILRVNTEITKAPLSASMIKRYDEHHQDLTLLKALVRQQLPEKYKEIFFDQSKNGYAGYIDGGASQEEFYKFIKPILEKMDGTEELLVKLNREDLLRKQRTFDNGSIPHQIHLGELHAILRRQEDFYPFLKDNREKIEKILTFRIPYYVGPLARGNSRFAWMTRKSEETITPWNFEEVVDKGASAQSFIERMTNFDKNLPNEKVLPKHSLLYEYFTVYNELTKVKYVTEGMRKPAFLSGEQKKAIVDLLFKTNRKVTVKQLKEDYFKKIECFDSVEISGVEDRFNASLGTYHDLLKIIKDKDFLDNEENEDILEDIVLTLTLFEDREMIEERLKTYAHLFDDKVMKQLKRRRYTGWGRLSRKLINGIRDKQSGKTILDFLKSDGFANRNFMQLIHDDSLTFKEDIQKAQVSGQGDSLHEHIANLAGSPAIKKGILQTVKVVDELVKVMGRHKPENIVIEMARENQTTQKGQKNSRERMKRIEEGIKELGSQILKEHPVENTQLQNEKLYLYYLQNGRDMYVDQELDINRLSDYDVDHIVPQSFLKDDSIDNKVLTRSDKARGKSDNVPSEEVVKKMKNYWRQLLNAKLITQRKFDNLTKAERGGLSELDKAGFIKRQLVETRQITKHVAQILDSRMNTKYDENDKLIREVKVITLKSKLVSDFRKDFQFYKVREINNYHHAHDAYLNAVVGTALIKKYPKLESEFVYGDYKVYDVRKMIAKSEQEIGKATAKYFFYSNIMNFFKTEITLANGEIRKRPLIETNGETGEIVWDKGRDFATVRKVLSMPQVNIVKKTEVQTGGFSKESILPKRNSDKLIARKKDWDPKKYGGFDSPTVAYSVLVVAKVEKGKSKKLKSVKELLGITIMERSSFEKNPIDFLEAKGYKEVKKDLIIKLPKYSLFELENGRKRMLASAGELQKGNELALPSKYVNFLYLASHYEKLKGSPEDNEQKQLFVEQHKHYLDEIIEQISEFSKRVILADANLDKVLSAYNKHRDKPIREQAENIIHLFTLTNLGAPAAFKYFDTTIDRKRYTSTKEVLDATLIHQSITGLYETRIDLSQLGGDGGGGSEAAAKPAPGGMNPLQLLQPLPAEVKGTKLLAHWNSGATITCIPESFLEDEQPIKQTLIKTIHGEKQQNVYYLTFKVKGRKVEAEVIASPYEYILLSPTDVPWLTQQPLQLTILVPLQEYQDRILNKTALPEEQKQQLKALFTKYDNLWQHWENQVGHRKIRPHNIATGDYPPRPQKQYPINPKAKPSIQIVIDDLLKQGVLTPQNSTMNTPVYPVPKPDGRWRMVLDYREVNKTIPLTAAQNQHSAGILATIVRQKYKTTLDLANGFWAHPITPDSYWLTAFTWQGKQYCWTRLPQGFLNSPALFTADAVDLLKEVPNVQVYVDDIYLSHDNPHEHIQQLEKVFQILLQAGYVVSLKKSEIGQRTVEFLGFNITKEGRGLTDTFKTKLLNVTPPKDLKQLQSILGLLNFARNFIPNFAELVQTLYNLIASSKGKYIEWTEDNTKQLNKVIEALNTASNLEERLPDQRLVIKVNTSPSAGYVRYYNESGKKPIMYLNYVFSKAELKFSMLEKLLTTMHKALIKAMDLAMGQEILVYSPIVSMTKIQKTPLPERKALPIRWITWMTYLEDPRIQFHYDKTLPELKHIPDVYTSSIPPLKHPSQYEGVFCTDGSAIKSPDPTKSNNAGMGIVHAIYNPEYKILNQWSIPLGHHTAQMAEIAAVEFACKKALKVPGPVLVITDSFYVAESANKELPYWKSNGFVNNKKEPLKHISKWKSIAECLSIKPDITIQHEKGHQPINTSIHTEGNALADKLATQGSYVVNAGKRTADGSEFEKRTADGSEFESPKKKAKVE

SEQ ID NO: 691 - protein, 2173 aa, synthetic construct
MPAAKRVKLDGGDKKYSIGLDIGTNSVGWAVITDEYKVPSKKFKVLGNTDRHSIKKNLIGALLFDSGETAEATRLKRTARRRYTRRKNRICYLQEIFSNEMAKVDDSFFHRLEESFLVEEDKKHERHPIFGNIVDEVAYHEKYPTIYHLRKKLVDSTDKADLRLIYLALAHMIKFRGHFLIEGDLNPDNSDVDKLFIQLVQTYNQLFEENPINASGVDAKAILSARLSKSRRLENLIAQLPGEKKNGLFGNLIALSLGLTPNFKSNFDLAEDAKLQLSKDTYDDDLDNLLAQIGDQYADLFLAAKNLSDAILLSDILRVNTEITKAPLSASMIKRYDEHHQDLTLLKALVRQQLPEKYKEIFFDQSKNGYAGYIDGGASQEEFYKFIKPILEKMDGTEELLVKLNREDLLRKQRTFDNGSIPHQIHLGELHAILRRQEDFYPFLKDNREKIEKILTFRIPYYVGPLARGNSRFAWMTRKSEETITPWNFEEVVDKGASAQSFIERMTNFDKNLPNEKVLPKHSLLYEYFTVYNELTKVKYVTEGMRKPAFLSGEQKKAIVDLLFKTNRKVTVKQLKEDYFKKIECFDSVEISGVEDRFNASLGTYHDLLKIIKDKDFLDNEENEDILEDIVLTLTLFEDREMIEERLKTYAHLFDDKVMKQLKRRRYTGWGRLSRKLINGIRDKQSGKTILDFLKSDGFANRNFMQLIHDDSLTFKEDIQKAQVSGQGDSLHEHIANLAGSPAIKKGILQTVKVVDELVKVMGRHKPENIVIEMARENQTTQKGQKNSRERMKRIEEGIKELGSQILKEHPVENTQLQNEKLYLYYLQNGRDMYVDQELDINRLSDYDVDHIVPQSFLKDDSIDNKVLTRSDKARGKSDNVPSEEVVKKMKNYWRQLLNAKLITQRKFDNLTKAERGGLSELDKAGFIKRQLVETRQITKHVAQILDSRMNTKYDENDKLIREVKVITLKSKLVSDFRKDFQFYKVREINNYHHAHDAYLNAVVGTALIKKYPKLESEFVYGDYKVYDVRKMIAKSEQEIGKATAKYFFYSNIMNFFKTEITLANGEIRKRPLIETNGETGEIVWDKGRDFATVRKVLSMPQVNIVKKTEVQTGGFSKESILPKRNSDKLIARKKDWDPKKYGGFDSPTVAYSVLVVAKVEKGKSKKLKSVKELLGITIMERSSFEKNPIDFLEAKGYKEVKKDLIIKLPKYSLFELENGRKRMLASAGELQKGNELALPSKYVNFLYLASHYEKLKGSPEDNEQKQLFVEQHKHYLDEIIEQISEFSKRVILADANLDKVLSAYNKHRDKPIREQAENIIHLFTLTNLGAPAAFKYFDTTIDRKRYTSTKEVLDATLIHQSITGLYETRIDLSQLGGDGGGSSEAAAKGGMNPLQLLQPLPAEVKGTKLLAHWNSGATITCIPESFLEDEQPIKQTLIKTIHGEKQQNVYYLTFKVKGRKVEAEVIASPYEYILLSPTDVPWLTQQPLQLTILVPLQEYQDRILNKTALPEEQKQQLKALFTKYDNLWQHWENQVGHRKIRPHNIATGDYPPRPQKQYPINPKAKPSIQIVIDDLLKQGVLTPQNSTMNTPVYPVPKPDGRWRMVLDYREVNKTIPLTAAQNQHSAGILATIVRQKYKTTLDLANGFWAHPITPDSYWLTAFTWQGKQYCWTRLPQGFLNSPALFTADAVDLLKEVPNVQVYVDDIYLSHDNPHEHIQQLEKVFQILLQAGYVVSLKKSEIGQRTVEFLGFNITKEGRGLTDTFKTKLLNVTPPKDLKQLQSILGLLNFARNFIPNFAELVQTLYNLIASSKGKYIEWTEDNTKQLNKVIEALNTASNLEERLPDQRLVIKVNTSPSAGYVRYYNESGKKPIMYLNYVFSKAELKFSMLEKLLTTMHKALIKAMDLAMGQEILVYSPIVSMTKIQKTPLPERKALPIRWITWMTYLEDPRIQFHYDKTLPELKHIPDVYTSSIPPLKHPSQYEGVFCTDGSAIKSPDPTKSNNAGMGIVHAIYNPEYKILNQWSIPLGHHTAQMAEIAAVEFACKKALKVPGPVLVITDSFYVAESANKELPYWKSNGFVNNKKEPLKHISKWKSIAECLSIKPDITIQHEKGHQPINTSIHTEGNALADKLATQGSYVVNAGKRTADGSEFEKRTADGSEFESPKKKAKVE

SEQ ID NO: 692 - protein, 2180 aa, synthetic construct
MPAAKRVKLDGGDKKYSIGLDIGTNSVGWAVITDEYKVPSKKFKVLGNTDRHSIKKNLIGALLFDSGETAEATRLKRTARRRYTRRKNRICYLQEIFSNEMAKVDDSFFHRLEESFLVEEDKKHERHPIFGNIVDEVAYHEKYPTIYHLRKKLVDSTDKADLRLIYLALAHMIKFRGHFLIEGDLNPDNSDVDKLFIQLVQTYNQLFEENPINASGVDAKAILSARLSKSRRLENLIAQLPGEKKNGLFGNLIALSLGLTPNFKSNFDLAEDAKLQLSKDTYDDDLDNLLAQIGDQYADLFLAAKNLSDAILLSDILRVNTEITKAPLSASMIKRYDEHHQDLTLLKALVRQQLPEKYKEIFFDQSKNGYAGYIDGGASQEEFYKFIKPILEKMDGTEELLVKLNREDLLRKQRTFDNGSIPHQIHLGELHAILRRQEDFYPFLKDNREKIEKILTFRIPYYVGPLARGNSRFAWMTRKSEETITPWNFEEVVDKGASAQSFIERMTNFDKNLPNEKVLPKHSLLYEYFTVYNELTKVKYVTEGMRKPAFLSGEQKKAIVDLLFKTNRKVTVKQLKEDYFKKIECFDSVEISGVEDRFNASLGTYHDLLKIIKDKDFLDNEENEDILEDIVLTLTLFEDREMIEERLKTYAHLFDDKVMKQLKRRRYTGWGRLSRKLINGIRDKQSGKTILDFLKSDGFANRNFMQLIHDDSLTFKEDIQKAQVSGQGDSLHEHIANLAGSPAIKKGILQTVKVVDELVKVMGRHKPENIVIEMARENQTTQKGQKNSRERMKRIEEGIKELGSQILKEHPVENTQLQNEKLYLYYLQNGRDMYVDQELDINRLSDYDVDHIVPQSFLKDDSIDNKVLTRSDKARGKSDNVPSEEVVKKMKNYWRQLLNAKLITQRKFDNLTKAERGGLSELDKAGFIKRQLVETRQITKHVAQILDSRMNTKYDENDKLIREVKVITLKSKLVSDFRKDFQFYKVREINNYHHAHDAYLNAVVGTALIKKYPKLESEFVYGDYKVYDVRKMIAKSEQEIGKATAKYFFYSNIMNFFKTEITLANGEIRKRPLIETNGETGEIVWDKGRDFATVRKVLSMPQVNIVKKTEVQTGGFSKESILPKRNSDKLIARKKDWDPKKYGGFDSPTVAYSVLVVAKVEKGKSKKLKSVKELLGITIMERSSFEKNPIDFLEAKGYKEVKKDLIIKLPKYSLFELENGRKRMLASAGELQKGNELALPSKYVNFLYLASHYEKLKGSPEDNEQKQLFVEQHKHYLDEIIEQISEFSKRVILADANLDKVLSAYNKHRDKPIREQAENIIHLFTLTNLGAPAAFKYFDTTIDRKRYTSTKEVLDATLIHQSITGLYETRIDLSQLGGDGGEAAAKGGGGSEAAAKGGMNPLQLLQPLPAEVKGTKLLAHWNSGATITCIPESFLEDEQPIKQTLIKTIHGEKQQNVYYLTFKVKGRKVEAEVIASPYEYILLSPTDVPWLTQQPLQLTILVPLQEYQDRILNKTALPEEQKQQLKALFTKYDNLWQHWENQVGHRKIRPHNIATGDYPPRPQKQYPINPKAKPSIQIVIDDLLKQGVLTPQNSTMNTPVYPVPKPDGRWRMVLDYREVNKTIPLTAAQNQHSAGILATIVRQKYKTTLDLANGFWAHPITPDSYWLTAFTWQGKQYCWTRLPQGFLNSPALFTADAVDLLKEVPNVQVYVDDIYLSHDNPHEHIQQLEKVFQILLQAGYVVSLKKSEIGQRTVEFLGFNITKEGRGLTDTFKTKLLNVTPPKDLKQLQSILGLLNFARNFIPNFAELVQTLYNLIASSKGKYIEWTEDNTKQLNKVIEALNTASNLEERLPDQRLVIKVNTSPSAGYVRYYNESGKKPIMYLNYVFSKAELKFSMLEKLLTTMHKALIKAMDLAMGQEILVYSPIVSMTKIQKTPLPERKALPIRWITWMTYLEDPRIQFHYDKTLPELKHIPDVYTSSIPPLKHPSQYEGVFCTDGSAIKSPDPTKSNNAGMGIVHAIYNPEYKILNQWSIPLGHHTAQMAEIAAVEFACKKALKVPGPVLVITDSFYVAESANKELPYWKSNGFVNNKKEPLKHISKWKSIAECLSIKPDITIQHEKGHQPINTSIHTEGNALADKLATQGSYVVNAGKRTADGSEFEKRTADGSEFESPKKKAKVE

SEQ ID NO: 693 - protein, 2170 aa, synthetic construct
MPAAKRVKLDGGDKKYSIGLDIGTNSVGWAVITDEYKVPSKKFKVLGNTDRHSIKKNLIGALLFDSGETAEATRLKRTARRRYTRRKNRICYLQEIFSNEMAKVDDSFFHRLEESFLVEEDKKHERHPIFGNIVDEVAYHEKYPTIYHLRKKLVDSTDKADLRLIYLALAHMIKFRGHFLIEGDLNPDNSDVDKLFIQLVQTYNQLFEENPINASGVDAKAILSARLSKSRRLENLIAQLPGEKKNGLFGNLIALSLGLTPNFKSNFDLAEDAKLQLSKDTYDDDLDNLLAQIGDQYADLFLAAKNLSDAILLSDILRVNTEITKAPLSASMIKRYDEHHQDLTLLKALVRQQLPEKYKEIFFDQSKNGYAGYIDGGASQEEFYKFIKPILEKMDGTEELLVKLNREDLLRKQRTFDNGSIPHQIHLGELHAILRRQEDFYPFLKDNREKIEKILTFRIPYYVGPLARGNSRFAWMTRKSEETITPWNFEEVVDKGASAQSFIERMTNFDKNLPNEKVLPKHSLLYEYFTVYNELTKVKYVTEGMRKPAFLSGEQKKAIVDLLFKTNRKVTVKQLKEDYFKKIECFDSVEISGVEDRFNASLGTYHDLLKIIKDKDFLDNEENEDILEDIVLTLTLFEDREMIEERLKTYAHLFDDKVMKQLKRRRYTGWGRLSRKLINGIRDKQSGKTILDFLKSDGFANRNFMQLIHDDSLTFKEDIQKAQVSGQGDSLHEHIANLAGSPAIKKGILQTVKVVDELVKVMGRHKPENIVIEMARENQTTQKGQKNSRERMKRIEEGIKELGSQILKEHPVENTQLQNEKLYLYYLQNGRDMYVDQELDINRLSDYDVDHIVPQSFLKDDSIDNKVLTRSDKARGKSDNVPSEEVVKKMKNYWRQLLNAKLITQRKFDNLTKAERGGLSELDKAGFIKRQLVETRQITKHVAQILDSRMNTKYDENDKLIREVKVITLKSKLVSDFRKDFQFYKVREINNYHHAHDAYLNAVVGTALIKKYPKLESEFVYGDYKVYDVRKMIAKSEQEIGKATAKYFFYSNIMNFFKTEITLANGEIRKRPLIETNGETGEIVWDKGRDFATVRKVLSMPQVNIVKKTEVQTGGFSKESILPKRNSDKLIARKKDWDPKKYGGFDSPTVAYSVLVVAKVEKGKSKKLKSVKELLGITIMERSSFEKNPIDFLEAKGYKEVKKDLIIKLPKYSLFELENGRKRMLASAGELQKGNELALPSKYVNFLYLASHYEKLKGSPEDNEQKQLFVEQHKHYLDEIIEQISEFSKRVILADANLDKVLSAYNKHRDKPIREQAENIIHLFTLTNLGAPAAFKYFDTTIDRKRYTSTKEVLDATLIHQSITGLYETRIDLSQLGGDGGPAPAPGGMNPLQLLQPLPAEVKGTKLLAHWNSGATITCIPESFLEDEQPIKQTLIKTIHGEKQQNVYYLTFKVKGRKVEAEVIASPYEYILLSPTDVPWLTQQPLQLTILVPLQEYQDRILNKTALPEEQKQQLKALFTKYDNLWQHWENQVGHRKIRPHNIATGDYPPRPQKQYPINPKAKPSIQIVIDDLLKQGVLTPQNSTMNTPVYPVPKPDGRWRMVLDYREVNKTIPLTAAQNQHSAGILATIVRQKYKTTLDLANGFWAHPITPDSYWLTAFTWQGKQYCWTRLPQGFLNSPALFTADAVDLLKEVPNVQVYVDDIYLSHDNPHEHIQQLEKVFQILLQAGYVVSLKKSEIGQRTVEFLGFNITKEGRGLTDTFKTKLLNVTPPKDLKQLQSILGLLNFARNFIPNFAELVQTLYNLIASSKGKYIEWTEDNTKQLNKVIEALNTASNLEERLPDQRLVIKVNTSPSAGYVRYYNESGKKPIMYLNYVFSKAELKFSMLEKLLTTMHKALIKAMDLAMGQEILVYSPIVSMTKIQKTPLPERKALPIRWITWMTYLEDPRIQFHYDKTLPELKHIPDVYTSSIPPLKHPSQYEGVFCTDGSAIKSPDPTKSNNAGMGIVHAIYNPEYKILNQWSIPLGHHTAQMAEIAAVEFACKKALKVPGPVLVITDSFYVAESANKELPYWKSNGFVNNKKEPLKHISKWKSIAECLSIKPDITIQHEKGHQPINTSIHTEGNALADKLATQGSYVVNAGKRTADGSEFEKRTADGSEFESPKKKAKVE

SEQ ID NO: 694 - protein, 2185 aa, synthetic construct
MPAAKRVKLDGGDKKYSIGLDIGTNSVGWAVITDEYKVPSKKFKVLGNTDRHSIKKNLIGALLFDSGETAEATRLKRTARRRYTRRKNRICYLQEIFSNEMAKVDDSFFHRLEESFLVEEDKKHERHPIFGNIVDEVAYHEKYPTIYHLRKKLVDSTDKADLRLIYLALAHMIKFRGHFLIEGDLNPDNSDVDKLFIQLVQTYNQLFEENPINASGVDAKAILSARLSKSRRLENLIAQLPGEKKNGLFGNLIALSLGLTPNFKSNFDLAEDAKLQLSKDTYDDDLDNLLAQIGDQYADLFLAAKNLSDAILLSDILRVNTEITKAPLSASMIKRYDEHHQDLTLLKALVRQQLPEKYKEIFFDQSKNGYAGYIDGGASQEEFYKFIKPILEKMDGTEELLVKLNREDLLRKQRTFDNGSIPHQIHLGELHAILRRQEDFYPFLKDNREKIEKILTFRIPYYVGPLARGNSRFAWMTRKSEETITPWNFEEVVDKGASAQSFIERMTNFDKNLPNEKVLPKHSLLYEYFTVYNELTKVKYVTEGMRKPAFLSGEQKKAIVDLLFKTNRKVTVKQLKEDYFKKIECFDSVEISGVEDRFNASLGTYHDLLKIIKDKDFLDNEENEDILEDIVLTLTLFEDREMIEERLKTYAHLFDDKVMKQLKRRRYTGWGRLSRKLINGIRDKQSGKTILDFLKSDGFANRNFMQLIHDDSLTFKEDIQKAQVSGQGDSLHEHIANLAGSPAIKKGILQTVKVVDELVKVMGRHKPENIVIEMARENQTTQKGQKNSRERMKRIEEGIKELGSQILKEHPVENTQLQNEKLYLYYLQNGRDMYVDQELDINRLSDYDVDHIVPQSFLKDDSIDNKVLTRSDKARGKSDNVPSEEVVKKMKNYWRQLLNAKLITQRKFDNLTKAERGGLSELDKAGFIKRQLVETRQITKHVAQILDSRMNTKYDENDKLIREVKVITLKSKLVSDFRKDFQFYKVREINNYHHAHDAYLNAVVGTALIKKYPKLESEFVYGDYKVYDVRKMIAKSEQEIGKATAKYFFYSNIMNFFKTEITLANGEIRKRPLIETNGETGEIVWDKGRDFATVRKVLSMPQVNIVKKTEVQTGGFSKESILPKRNSDKLIARKKDWDPKKYGGFDSPTVAYSVLVVAKVEKGKSKKLKSVKELLGITIMERSSFEKNPIDFLEAKGYKEVKKDLIIKLPKYSLFELENGRKRMLASAGELQKGNELALPSKYVNFLYLASHYEKLKGSPEDNEQKQLFVEQHKHYLDEIIEQISEFSKRVILADANLDKVLSAYNKHRDKPIREQAENIIHLFTLTNLGAPAAFKYFDTTIDRKRYTSTKEVLDATLIHQSITGLYETRIDLSQLGGDGGEAAAKEAAAKEAAAKEAAAKGGMNPLQLLQPLPAEVKGTKLLAHWNSGATITCIPESFLEDEQPIKQTLIKTIHGEKQQNVYYLTFKVKGRKVEAEVIASPYEYILLSPTDVPWLTQQPLQLTILVPLQEYQDRILNKTALPEEQKQQLKALFTKYDNLWQHWENQVGHRKIRPHNIATGDYPPRPQKQYPINPKAKPSIQIVIDDLLKQGVLTPQNSTMNTPVYPVPKPDGRWRMVLDYREVNKTIPLTAAQNQHSAGILATIVRQKYKTTLDLANGFWAHPITPDSYWLTAFTWQGKQYCWTRLPQGFLNSPALFTADAVDLLKEVPNVQVYVDDIYLSHDNPHEHIQQLEKVFQILLQAGYVVSLKKSEIGQRTVEFLGFNITKEGRGLTDTFKTKLLNVTPPKDLKQLQSILGLLNFARNFIPNFAELVQTLYNLIASSKGKYIEWTEDNTKQLNKVIEALNTASNLEERLPDQRLVIKVNTSPSAGYVRYYNESGKKPIMYLNYVFSKAELKFSMLEKLLTTMHKALIKAMDLAMGQEILVYSPIVSMTKIQKTPLPERKALPIRWITWMTYLEDPRIQFHYDKTLPELKHIPDVYTSSIPPLKHPSQYEGVFCTDGSAIKSPDPTKSNNAGMGIVHAIYNPEYKILNQWSIPLGHHTAQMAEIAAVEFACKKALKVPGPVLVITDSFYVAESANKELPYWKSNGFVNNKKEPLKHISKWKSIAECLSIKPDITIQHEKGHQPINTSIHTEGNALADKLATQGSYVVNAGKRTADGSEFEKRTADGSEFESPKKKAKVE

SEQ ID NO: 695 - protein, 2081 aa, synthetic construct
MPAAKRVKLDGGDKKYSIGLDIGTNSVGWAVITDEYKVPSKKFKVLGNTDRHSIKKNLIGALLFDSGETAEATRLKRTARRRYTRRKNRICYLQEIFSNEMAKVDDSFFHRLEESFLVEEDKKHERHPIFGNIVDEVAYHEKYPTIYHLRKKLVDSTDKADLRLIYLALAHMIKFRGHFLIEGDLNPDNSDVDKLFIQLVQTYNQLFEENPINASGVDAKAILSARLSKSRRLENLIAQLPGEKKNGLFGNLIALSLGLTPNFKSNFDLAEDAKLQLSKDTYDDDLDNLLAQIGDQYADLFLAAKNLSDAILLSDILRVNTEITKAPLSASMIKRYDEHHQDLTLLKALVRQQLPEKYKEIFFDQSKNGYAGYIDGGASQEEFYKFIKPILEKMDGTEELLVKLNREDLLRKQRTFDNGSIPHQIHLGELHAILRRQEDFYPFLKDNREKIEKILTFRIPYYVGPLARGNSRFAWMTRKSEETITPWNFEEVVDKGASAQSFIERMTNFDKNLPNEKVLPKHSLLYEYFTVYNELTKVKYVTEGMRKPAFLSGEQKKAIVDLLFKTNRKVTVKQLKEDYFKKIECFDSVEISGVEDRFNASLGTYHDLLKIIKDKDFLDNEENEDILEDIVLTLTLFEDREMIEERLKTYAHLFDDKVMKQLKRRRYTGWGRLSRKLINGIRDKQSGKTILDFLKSDGFANRNFMQLIHDDSLTFKEDIQKAQVSGQGDSLHEHIANLAGSPAIKKGILQTVKVVDELVKVMGRHKPENIVIEMARENQTTQKGQKNSRERMKRIEEGIKELGSQILKEHPVENTQLQNEKLYLYYLQNGRDMYVDQELDINRLSDYDVDHIVPQSFLKDDSIDNKVLTRSDKARGKSDNVPSEEVVKKMKNYWRQLLNAKLITQRKFDNLTKAERGGLSELDKAGFIKRQLVETRQITKHVAQILDSRMNTKYDENDKLIREVKVITLKSKLVSDFRKDFQFYKVREINNYHHAHDAYLNAVVGTALIKKYPKLESEFVYGDYKVYDVRKMIAKSEQEIGKATAKYFFYSNIMNFFKTEITLANGEIRKRPLIETNGETGEIVWDKGRDFATVRKVLSMPQVNIVKKTEVQTGGFSKESILPKRNSDKLIARKKDWDPKKYGGFDSPTVAYSVLVVAKVEKGKSKKLKSVKELLGITIMERSSFEKNPIDFLEAKGYKEVKKDLIIKLPKYSLFELENGRKRMLASAGELQKGNELALPSKYVNFLYLASHYEKLKGSPEDNEQKQLFVEQHKHYLDEIIEQISEFSKRVILADANLDKVLSAYNKHRDKPIREQAENIIHLFTLTNLGAPAAFKYFDTTIDRKRYTSTKEVLDATLIHQSITGLYETRIDLSQLGGDGGPAPAPGGVPWLTQQPLQLTILVPLQEYQDRILNKTALPEEQKQQLKALFTKYDNLWQHWENQVGHRKIRPHNIATGDYPPRPQKQYPINPKAKPSIQIVIDDLLKQGVLTPQNSTMNTPVYPVPKPDGRWRMVLDYREVNKTIPLTAAQNQHSAGILATIVRQKYKTTLDLANGFWAHPITPDSYWLTAFTWQGKQYCWTRLPQGFLNSPALFTADAVDLLKEVPNVQVYVDDIYLSHDNPHEHIQQLEKVFQILLQAGYVVSLKKSEIGQRTVEFLGFNITKEGRGLTDTFKTKLLNVTPPKDLKQLQSILGLLNFARNFIPNFAELVQTLYNLIASSKGKYIEWTEDNTKQLNKVIEALNTASNLEERLPDQRLVIKVNTSPSAGYVRYYNESGKKPIMYLNYVFSKAELKFSMLEKLLTTMHKALIKAMDLAMGQEILVYSPIVSMTKIQKTPLPERKALPIRWITWMTYLEDPRIQFHYDKTLPELKHIPDVYTSSIPPLKHPSQYEGVFCTDGSAIKSPDPTKSNNAGMGIVHAIYNPEYKILNQWSIPLGHHTAQMAEIAAVEFACKKALKVPGPVLVITDSFYVAESANKELPYWKSNGFVNNKKEPLKHISKWKSIAECLSIKPDITIQHEKGHQPINTSIHTEGNALADKLATQGSYVVNAGKRTADGSEFEKRTADGSEFESPKKKAKVE

SEQ ID NO: 696 - protein, 2087 aa, synthetic construct
MPAAKRVKLDGGDKKYSIGLDIGTNSVGWAVITDEYKVPSKKFKVLGNTDRHSIKKNLIGALLFDSGETAEATRLKRTARRRYTRRKNRICYLQEIFSNEMAKVDDSFFHRLEESFLVEEDKKHERHPIFGNIVDEVAYHEKYPTIYHLRKKLVDSTDKADLRLIYLALAHMIKFRGHFLIEGDLNPDNSDVDKLFIQLVQTYNQLFEENPINASGVDAKAILSARLSKSRRLENLIAQLPGEKKNGLFGNLIALSLGLTPNFKSNFDLAEDAKLQLSKDTYDDDLDNLLAQIGDQYADLFLAAKNLSDAILLSDILRVNTEITKAPLSASMIKRYDEHHQDLTLLKALVRQQLPEKYKEIFFDQSKNGYAGYIDGGASQEEFYKFIKPILEKMDGTEELLVKLNREDLLRKQRTFDNGSIPHQIHLGELHAILRRQEDFYPFLKDNREKIEKILTFRIPYYVGPLARGNSRFAWMTRKSEETITPWNFEEVVDKGASAQSFIERMTNFDKNLPNEKVLPKHSLLYEYFTVYNELTKVKYVTEGMRKPAFLSGEQKKAIVDLLFKTNRKVTVKQLKEDYFKKIECFDSVEISGVEDRFNASLGTYHDLLKIIKDKDFLDNEENEDILEDIVLTLTLFEDREMIEERLKTYAHLFDDKVMKQLKRRRYTGWGRLSRKLINGIRDKQSGKTILDFLKSDGFANRNFMQLIHDDSLTFKEDIQKAQVSGQGDSLHEHIANLAGSPAIKKGILQTVKVVDELVKVMGRHKPENIVIEMARENQTTQKGQKNSRERMKRIEEGIKELGSQILKEHPVENTQLQNEKLYLYYLQNGRDMYVDQELDINRLSDYDVDHIVPQSFLKDDSIDNKVLTRSDKARGKSDNVPSEEVVKKMKNYWRQLLNAKLITQRKFDNLTKAERGGLSELDKAGFIKRQLVETRQITKHVAQILDSRMNTKYDENDKLIREVKVITLKSKLVSDFRKDFQFYKVREINNYHHAHDAYLNAVVGTALIKKYPKLESEFVYGDYKVYDVRKMIAKSEQEIGKATAKYFFYSNIMNFFKTEITLANGEIRKRPLIETNGETGEIVWDKGRDFATVRKVLSMPQVNIVKKTEVQTGGFSKESILPKRNSDKLIARKKDWDPKKYGGFDSPTVAYSVLVVAKVEKGKSKKLKSVKELLGITIMERSSFEKNPIDFLEAKGYKEVKKDLIIKLPKYSLFELENGRKRMLASAGELQKGNELALPSKYVNFLYLASHYEKLKGSPEDNEQKQLFVEQHKHYLDEIIEQISEFSKRVILADANLDKVLSAYNKHRDKPIREQAENIIHLFTLTNLGAPAAFKYFDTTIDRKRYTSTKEVLDATLIHQSITGLYETRIDLSQLGGDGGPAPGGGEAAAKGGVPWLTQQPLQLTILVPLQEYQDRILNKTALPEEQKQQLKALFTKYDNLWQHWENQVGHRKIRPHNIATGDYPPRPQKQYPINPKAKPSIQIVIDDLLKQGVLTPQNSTMNTPVYPVPKPDGRWRMVLDYREVNKTIPLTAAQNQHSAGILATIVRQKYKTTLDLANGFWAHPITPDSYWLTAFTWQGKQYCWTRLPQGFLNSPALFTADAVDLLKEVPNVQVYVDDIYLSHDNPHEHIQQLEKVFQILLQAGYVVSLKKSEIGQRTVEFLGFNITKEGRGLTDTFKTKLLNVTPPKDLKQLQSILGLLNFARNFIPNFAELVQTLYNLIASSKGKYIEWTEDNTKQLNKVIEALNTASNLEERLPDQRLVIKVNTSPSAGYVRYYNESGKKPIMYLNYVFSKAELKFSMLEKLLTTMHKALIKAMDLAMGQEILVYSPIVSMTKIQKTPLPERKALPIRWITWMTYLEDPRIQFHYDKTLPELKHIPDVYTSSIPPLKHPSQYEGVFCTDGSAIKSPDPTKSNNAGMGIVHAIYNPEYKILNQWSIPLGHHTAQMAEIAAVEFACKKALKVPGPVLVITDSFYVAESANKELPYWKSNGFVNNKKEPLKHISKWKSIAECLSIKPDITIQHEKGHQPINTSIHTEGNALADKLATQGSYVVNAGKRTADGSEFEKRTADGSEFESPKKKAKVE

SEQ ID NO: 697 - protein, 2087 aa, synthetic construct
MPAAKRVKLDGGDKKYSIGLDIGTNSVGWAVITDEYKVPSKKFKVLGNTDRHSIKKNLIGALLFDSGETAEATRLKRTARRRYTRRKNRICYLQEIFSNEMAKVDDSFFHRLEESFLVEEDKKHERHPIFGNIVDEVAYHEKYPTIYHLRKKLVDSTDKADLRLIYLALAHMIKFRGHFLIEGDLNPDNSDVDKLFIQLVQTYNQLFEENPINASGVDAKAILSARLSKSRRLENLIAQLPGEKKNGLFGNLIALSLGLTPNFKSNFDLAEDAKLQLSKDTYDDDLDNLLAQIGDQYADLFLAAKNLSDAILLSDILRVNTEITKAPLSASMIKRYDEHHQDLTLLKALVRQQLPEKYKEIFFDQSKNGYAGYIDGGASQEEFYKFIKPILEKMDGTEELLVKLNREDLLRKQRTFDNGSIPHQIHLGELHAILRRQEDFYPFLKDNREKIEKILTFRIPYYVGPLARGNSRFAWMTRKSEETITPWNFEEVVDKGASAQSFIERMTNFDKNLPNEKVLPKHSLLYEYFTVYNELTKVKYVTEGMRKPAFLSGEQKKAIVDLLFKTNRKVTVKQLKEDYFKKIECFDSVEISGVEDRFNASLGTYHDLLKIIKDKDFLDNEENEDILEDIVLTLTLFEDREMIEERLKTYAHLFDDKVMKQLKRRRYTGWGRLSRKLINGIRDKQSGKTILDFLKSDGFANRNFMQLIHDDSLTFKEDIQKAQVSGQGDSLHEHIANLAGSPAIKKGILQTVKVVDELVKVMGRHKPENIVIEMARENQTTQKGQKNSRERMKRIEEGIKELGSQILKEHPVENTQLQNEKLYLYYLQNGRDMYVDQELDINRLSDYDVDHIVPQSFLKDDSIDNKVLTRSDKARGKSDNVPSEEVVKKMKNYWRQLLNAKLITQRKFDNLTKAERGGLSELDKAGFIKRQLVETRQITKHVAQILDSRMNTKYDENDKLIREVKVITLKSKLVSDFRKDFQFYKVREINNYHHAHDAYLNAVVGTALIKKYPKLESEFVYGDYKVYDVRKMIAKSEQEIGKATAKYFFYSNIMNFFKTEITLANGEIRKRPLIETNGETGEIVWDKGRDFATVRKVLSMPQVNIVKKTEVQTGGFSKESILPKRNSDKLIARKKDWDPKKYGGFDSPTVAYSVLVVAKVEKGKSKKLKSVKELLGITIMERSSFEKNPIDFLEAKGYKEVKKDLIIKLPKYSLFELENGRKRMLASAGELQKGNELALPSKYVNFLYLASHYEKLKGSPEDNEQKQLFVEQHKHYLDEIIEQISEFSKRVILADANLDKVLSAYNKHRDKPIREQAENIIHLFTLTNLGAPAAFKYFDTTIDRKRYTSTKEVLDATLIHQSITGLYETRIDLSQLGGDGGGGGEAAAKGGSGGVPWLTQQPLQLTILVPLQEYQDRILNKTALPEEQKQQLKALFTKYDNLWQHWENQVGHRKIRPHNIATGDYPPRPQKQYPINPKAKPSIQIVIDDLLKQGVLTPQNSTMNTPVYPVPKPDGRWRMVLDYREVNKTIPLTAAQNQHSAGILATIVRQKYKTTLDLANGFWAHPITPDSYWLTAFTWQGKQYCWTRLPQGFLNSPALFTADAVDLLKEVPNVQVYVDDIYLSHDNPHEHIQQLEKVFQILLQAGYVVSLKKSEIGQRTVEFLGFNITKEGRGLTDTFKTKLLNVTPPKDLKQLQSILGLLNFARNFIPNFAELVQTLYNLIASSKGKYIEWTEDNTKQLNKVIEALNTASNLEERLPDQRLVIKVNTSPSAGYVRYYNESGKKPIMYLNYVFSKAELKFSMLEKLLTTMHKALIKAMDLAMGQEILVYSPIVSMTKIQKTPLPERKALPIRWITWMTYLEDPRIQFHYDKTLPELKHIPDVYTSSIPPLKHPSQYEGVFCTDGSAIKSPDPTKSNNAGMGIVHAIYNPEYKILNQWSIPLGHHTAQMAEIAAVEFACKKALKVPGPVLVITDSFYVAESANKELPYWKSNGFVNNKKEPLKHISKWKSIAECLSIKPDITIQHEKGHQPINTSIHTEGNALADKLATQGSYVVNAGKRTADGSEFEKRTADGSEFESPKKKAKVE

SEQ ID NO: 698 - protein, 2087 aa, synthetic construct
MPAAKRVKLDGGDKKYSIGLDIGTNSVGWAVITDEYKVPSKKFKVLGNTDRHSIKKNLIGALLFDSGETAEATRLKRTARRRYTRRKNRICYLQEIFSNEMAKVDDSFFHRLEESFLVEEDKKHERHPIFGNIVDEVAYHEKYPTIYHLRKKLVDSTDKADLRLIYLALAHMIKFRGHFLIEGDLNPDNSDVDKLFIQLVQTYNQLFEENPINASGVDAKAILSARLSKSRRLENLIAQLPGEKKNGLFGNLIALSLGLTPNFKSNFDLAEDAKLQLSKDTYDDDLDNLLAQIGDQYADLFLAAKNLSDAILLSDILRVNTEITKAPLSASMIKRYDEHHQDLTLLKALVRQQLPEKYKEIFFDQSKNGYAGYIDGGASQEEFYKFIKPILEKMDGTEELLVKLNREDLLRKQRTFDNGSIPHQIHLGELHAILRRQEDFYPFLKDNREKIEKILTFRIPYYVGPLARGNSRFAWMTRKSEETITPWNFEEVVDKGASAQSFIERMTNFDKNLPNEKVLPKHSLLYEYFTVYNELTKVKYVTEGMRKPAFLSGEQKKAIVDLLFKTNRKVTVKQLKEDYFKKIECFDSVEISGVEDRFNASLGTYHDLLKIIKDKDFLDNEENEDILEDIVLTLTLFEDREMIEERLKTYAHLFDDKVMKQLKRRRYTGWGRLSRKLINGIRDKQSGKTILDFLKSDGFANRNFMQLIHDDSLTFKEDIQKAQVSGQGDSLHEHIANLAGSPAIKKGILQTVKVVDELVKVMGRHKPENIVIEMARENQTTQKGQKNSRERMKRIEEGIKELGSQILKEHPVENTQLQNEKLYLYYLQNGRDMYVDQELDINRLSDYDVDHIVPQSFLKDDSIDNKVLTRSDKARGKSDNVPSEEVVKKMKNYWRQLLNAKLITQRKFDNLTKAERGGLSELDKAGFIKRQLVETRQITKHVAQILDSRMNTKYDENDKLIREVKVITLKSKLVSDFRKDFQFYKVREINNYHHAHDAYLNAVVGTALIKKYPKLESEFVYGDYKVYDVRKMIAKSEQEIGKATAKYFFYSNIMNFFKTEITLANGEIRKRPLIETNGETGEIVWDKGRDFATVRKVLSMPQVNIVKKTEVQTGGFSKESILPKRNSDKLIARKKDWDPKKYGGFDSPTVAYSVLVVAKVEKGKSKKLKSVKELLGITIMERSSFEKNPIDFLEAKGYKEVKKDLIIKLPKYSLFELENGRKRMLASAGELQKGNELALPSKYVNFLYLASHYEKLKGSPEDNEQKQLFVEQHKHYLDEIIEQISEFSKRVILADANLDKVLSAYNKHRDKPIREQAENIIHLFTLTNLGAPAAFKYFDTTIDRKRYTSTKEVLDATLIHQSITGLYETRIDLSQLGGDGGGGGEAAAKGSSGGVPWLTQQPLQLTILVPLQEYQDRILNKTALPEEQKQQLKALFTKYDNLWQHWENQVGHRKIRPHNIATGDYPPRPQKQYPINPKAKPSIQIVIDDLLKQGVLTPQNSTMNTPVYPVPKPDGRWRMVLDYREVNKTIPLTAAQNQHSAGILATIVRQKYKTTLDLANGFWAHPITPDSYWLTAFTWQGKQYCWTRLPQGFLNSPALFTADAVDLLKEVPNVQVYVDDIYLSHDNPHEHIQQLEKVFQILLQAGYVVSLKKSEIGQRTVEFLGFNITKEGRGLTDTFKTKLLNVTPPKDLKQLQSILGLLNFARNFIPNFAELVQTLYNLIASSKGKYIEWTEDNTKQLNKVIEALNTASNLEERLPDQRLVIKVNTSPSAGYVRYYNESGKKPIMYLNYVFSKAELKFSMLEKLLTTMHKALIKAMDLAMGQEILVYSPIVSMTKIQKTPLPERKALPIRWITWMTYLEDPRIQFHYDKTLPELKHIPDVYTSSIPPLKHPSQYEGVFCTDGSAIKSPDPTKSNNAGMGIVHAIYNPEYKILNQWSIPLGHHTAQMAEIAAVEFACKKALKVPGPVLVITDSFYVAESANKELPYWKSNGFVNNKKEPLKHISKWKSIAECLSIKPDITIQHEKGHQPINTSIHTEGNALADKLATQGSYVVNAGKRTADGSEFEKRTADGSEFESPKKKAKVE

SEQ ID NO: 699 - protein, 2087 aa, synthetic construct
MPAAKRVKLDGGDKKYSIGLDIGTNSVGWAVITDEYKVPSKKFKVLGNTDRHSIKKNLIGALLFDSGETAEATRLKRTARRRYTRRKNRICYLQEIFSNEMAKVDDSFFHRLEESFLVEEDKKHERHPIFGNIVDEVAYHEKYPTIYHLRKKLVDSTDKADLRLIYLALAHMIKFRGHFLIEGDLNPDNSDVDKLFIQLVQTYNQLFEENPINASGVDAKAILSARLSKSRRLENLIAQLPGEKKNGLFGNLIALSLGLTPNFKSNFDLAEDAKLQLSKDTYDDDLDNLLAQIGDQYADLFLAAKNLSDAILLSDILRVNTEITKAPLSASMIKRYDEHHQDLTLLKALVRQQLPEKYKEIFFDQSKNGYAGYIDGGASQEEFYKFIKPILEKMDGTEELLVKLNREDLLRKQRTFDNGSIPHQIHLGELHAILRRQEDFYPFLKDNREKIEKILTFRIPYYVGPLARGNSRFAWMTRKSEETITPWNFEEVVDKGASAQSFIERMTNFDKNLPNEKVLPKHSLLYEYFTVYNELTKVKYVTEGMRKPAFLSGEQKKAIVDLLFKTNRKVTVKQLKEDYFKKIECFDSVEISGVEDRFNASLGTYHDLLKIIKDKDFLDNEENEDILEDIVLTLTLFEDREMIEERLKTYAHLFDDKVMKQLKRRRYTGWGRLSRKLINGIRDKQSGKTILDFLKSDGFANRNFMQLIHDDSLTFKEDIQKAQVSGQGDSLHEHIANLAGSPAIKKGILQTVKVVDELVKVMGRHKPENIVIEMARENQTTQKGQKNSRERMKRIEEGIKELGSQILKEHPVENTQLQNEKLYLYYLQNGRDMYVDQELDINRLSDYDVDHIVPQSFLKDDSIDNKVLTRSDKARGKSDNVPSEEVVKKMKNYWRQLLNAKLITQRKFDNLTKAERGGLSELDKAGFIKRQLVETRQITKHVAQILDSRMNTKYDENDKLIREVKVITLKSKLVSDFRKDFQFYKVREINNYHHAHDAYLNAVVGTALIKKYPKLESEFVYGDYKVYDVRKMIAKSEQEIGKATAKYFFYSNIMNFFKTEITLANGEIRKRPLIETNGETGEIVWDKGRDFATVRKVLSMPQVNIVKKTEVQTGGFSKESILPKRNSDKLIARKKDWDPKKYGGFDSPTVAYSVLVVAKVEKGKSKKLKSVKELLGITIMERSSFEKNPIDFLEAKGYKEVKKDLIIKLPKYSLFELENGRKRMLASAGELQKGNELALPSKYVNFLYLASHYEKLKGSPEDNEQKQLFVEQHKHYLDEIIEQISEFSKRVILADANLDKVLSAYNKHRDKPIREQAENIIHLFTLTNLGAPAAFKYFDTTIDRKRYTSTKEVLDATLIHQSITGLYETRIDLSQLGGDGGGSSGGGEAAAKGGVPWLTQQPLQLTILVPLQEYQDRILNKTALPEEQKQQLKALFTKYDNLWQHWENQVGHRKIRPHNIATGDYPPRPQKQYPINPKAKPSIQIVIDDLLKQGVLTPQNSTMNTPVYPVPKPDGRWRMVLDYREVNKTIPLTAAQNQHSAGILATIVRQKYKTTLDLANGFWAHPITPDSYWLTAFTWQGKQYCWTRLPQGFLNSPALFTADAVDLLKEVPNVQVYVDDIYLSHDNPHEHIQQLEKVFQILLQAGYVVSLKKSEIGQRTVEFLGFNITKEGRGLTDTFKTKLLNVTPPKDLKQLQSILGLLNFARNFIPNFAELVQTLYNLIASSKGKYIEWTEDNTKQLNKVIEALNTASNLEERLPDQRLVIKVNTSPSAGYVRYYNESGKKPIMYLNYVFSKAELKFSMLEKLLTTMHKALIKAMDLAMGQEILVYSPIVSMTKIQKTPLPERKALPIRWITWMTYLEDPRIQFHYDKTLPELKHIPDVYTSSIPPLKHPSQYEGVFCTDGSAIKSPDPTKSNNAGMGIVHAIYNPEYKILNQWSIPLGHHTAQMAEIAAVEFACKKALKVPGPVLVITDSFYVAESANKELPYWKSNGFVNNKKEPLKHISKWKSIAECLSIKPDITIQHEKGHQPINTSIHTEGNALADKLATQGSYVVNAGKRTADGSEFEKRTADGSEFESPKKKAKVE

SEQ ID NO: 700 - protein, 2094 aa, synthetic construct
MPAAKRVKLDGGDKKYSIGLDIGTNSVGWAVITDEYKVPSKKFKVLGNTDRHSIKKNLIGALLFDSGETAEATRLKRTARRRYTRRKNRICYLQEIFSNEMAKVDDSFFHRLEESFLVEEDKKHERHPIFGNIVDEVAYHEKYPTIYHLRKKLVDSTDKADLRLIYLALAHMIKFRGHFLIEGDLNPDNSDVDKLFIQLVQTYNQLFEENPINASGVDAKAILSARLSKSRRLENLIAQLPGEKKNGLFGNLIALSLGLTPNFKSNFDLAEDAKLQLSKDTYDDDLDNLLAQIGDQYADLFLAAKNLSDAILLSDILRVNTEITKAPLSASMIKRYDEHHQDLTLLKALVRQQLPEKYKEIFFDQSKNGYAGYIDGGASQEEFYKFIKPILEKMDGTEELLVKLNREDLLRKQRTFDNGSIPHQIHLGELHAILRRQEDFYPFLKDNREKIEKILTFRIPYYVGPLARGNSRFAWMTRKSEETITPWNFEEVVDKGASAQSFIERMTNFDKNLPNEKVLPKHSLLYEYFTVYNELTKVKYVTEGMRKPAFLSGEQKKAIVDLLFKTNRKVTVKQLKEDYFKKIECFDSVEISGVEDRFNASLGTYHDLLKIIKDKDFLDNEENEDILEDIVLTLTLFEDREMIEERLKTYAHLFDDKVMKQLKRRRYTGWGRLSRKLINGIRDKQSGKTILDFLKSDGFANRNFMQLIHDDSLTFKEDIQKAQVSGQGDSLHEHIANLAGSPAIKKGILQTVKVVDELVKVMGRHKPENIVIEMARENQTTQKGQKNSRERMKRIEEGIKELGSQILKEHPVENTQLQNEKLYLYYLQNGRDMYVDQELDINRLSDYDVDHIVPQSFLKDDSIDNKVLTRSDKARGKSDNVPSEEVVKKMKNYWRQLLNAKLITQRKFDNLTKAERGGLSELDKAGFIKRQLVETRQITKHVAQILDSRMNTKYDENDKLIREVKVITLKSKLVSDFRKDFQFYKVREINNYHHAHDAYLNAVVGTALIKKYPKLESEFVYGDYKVYDVRKMIAKSEQEIGKATAKYFFYSNIMNFFKTEITLANGEIRKRPLIETNGETGEIVWDKGRDFATVRKVLSMPQVNIVKKTEVQTGGFSKESILPKRNSDKLIARKKDWDPKKYGGFDSPTVAYSVLVVAKVEKGKSKKLKSVKELLGITIMERSSFEKNPIDFLEAKGYKEVKKDLIIKLPKYSLFELENGRKRMLASAGELQKGNELALPSKYVNFLYLASHYEKLKGSPEDNEQKQLFVEQHKHYLDEIIEQISEFSKRVILADANLDKVLSAYNKHRDKPIREQAENIIHLFTLTNLGAPAAFKYFDTTIDRKRYTSTKEVLDATLIHQSITGLYETRIDLSQLGGDGGGGSGGSGGSGGSGGSGGSGGVPWLTQQPLQLTILVPLQEYQDRILNKTALPEEQKQQLKALFTKYDNLWQHWENQVGHRKIRPHNIATGDYPPRPQKQYPINPKAKPSIQIVIDDLLKQGVLTPQNSTMNTPVYPVPKPDGRWRMVLDYREVNKTIPLTAAQNQHSAGILATIVRQKYKTTLDLANGFWAHPITPDSYWLTAFTWQGKQYCWTRLPQGFLNSPALFNADAVDLLKEVPNVQVYVDDIYLSHDNPHEHIQQLEKVFQILLQAGYVVSLKKSEIGQRTVEFLGFNITKEGRGLTDTFKTKLLNVTPPKDLKQLQSILGLLNFARNFIPNFAELVQTLYNLIASSPGKYIEWTEDNTKQLNKVIEALNTASNLEERLPDQRLVIKVNTSPSAGYVRYYNESGKKPIMYLNYVFSKAELKFSMLEKLLTTMHKALIKAMDLAMGQEILVYSPIVSMTKIQKTPLPERKALPIRWITWMTYLEDPRIQFHYDKTLPELKHIPDVYTSSIPPLKHPSQYEGVFCTDGSAIKSPDPTKSNNAGMGIVHAIYNPEYKILNQWSIPLGHHTAQMAEIAAVEFACKKALKVPGPVLVITDSFYVAESANKELPYWKSNGFVNNKKEPLKHISKWKSIAECLSIKPDITIQHEKGHQPINTSIHTEGNALADKLATQGSYVVNAGKRTADGSEFEKRTADGSEFESPKKKAKVE

SEQ ID NO: 701 - protein, 2091 aa, synthetic construct
MPAAKRVKLDGGDKKYSIGLDIGTNSVGWAVITDEYKVPSKKFKVLGNTDRHSIKKNLIGALLFDSGETAEATRLKRTARRRYTRRKNRICYLQEIFSNEMAKVDDSFFHRLEESFLVEEDKKHERHPIFGNIVDEVAYHEKYPTIYHLRKKLVDSTDKADLRLIYLALAHMIKFRGHFLIEGDLNPDNSDVDKLFIQLVQTYNQLFEENPINASGVDAKAILSARLSKSRRLENLIAQLPGEKKNGLFGNLIALSLGLTPNFKSNFDLAEDAKLQLSKDTYDDDLDNLLAQIGDQYADLFLAAKNLSDAILLSDILRVNTEITKAPLSASMIKRYDEHHQDLTLLKALVRQQLPEKYKEIFFDQSKNGYAGYIDGGASQEEFYKFIKPILEKMDGTEELLVKLNREDLLRKQRTFDNGSIPHQIHLGELHAILRRQEDFYPFLKDNREKIEKILTFRIPYYVGPLARGNSRFAWMTRKSEETITPWNFEEVVDKGASAQSFIERMTNFDKNLPNEKVLPKHSLLYEYFTVYNELTKVKYVTEGMRKPAFLSGEQKKAIVDLLFKTNRKVTVKQLKEDYFKKIECFDSVEISGVEDRFNASLGTYHDLLKIIKDKDFLDNEENEDILEDIVLTLTLFEDREMIEERLKTYAHLFDDKVMKQLKRRRYTGWGRLSRKLINGIRDKQSGKTILDFLKSDGFANRNFMQLIHDDSLTFKEDIQKAQVSGQGDSLHEHIANLAGSPAIKKGILQTVKVVDELVKVMGRHKPENIVIEMARENQTTQKGQKNSRERMKRIEEGIKELGSQILKEHPVENTQLQNEKLYLYYLQNGRDMYVDQELDINRLSDYDVDHIVPQSFLKDDSIDNKVLTRSDKARGKSDNVPSEEVVKKMKNYWRQLLNAKLITQRKFDNLTKAERGGLSELDKAGFIKRQLVETRQITKHVAQILDSRMNTKYDENDKLIREVKVITLKSKLVSDFRKDFQFYKVREINNYHHAHDAYLNAVVGTALIKKYPKLESEFVYGDYKVYDVRKMIAKSEQEIGKATAKYFFYSNIMNFFKTEITLANGEIRKRPLIETNGETGEIVWDKGRDFATVRKVLSMPQVNIVKKTEVQTGGFSKESILPKRNSDKLIARKKDWDPKKYGGFDSPTVAYSVLVVAKVEKGKSKKLKSVKELLGITIMERSSFEKNPIDFLEAKGYKEVKKDLIIKLPKYSLFELENGRKRMLASAGELQKGNELALPSKYVNFLYLASHYEKLKGSPEDNEQKQLFVEQHKHYLDEIIEQISEFSKRVILADANLDKVLSAYNKHRDKPIREQAENIIHLFTLTNLGAPAAFKYFDTTIDRKRYTSTKEVLDATLIHQSITGLYETRIDLSQLGGDGGEAAAKGGGGSEAAAKGGVPWLTQQPLQLTILVPLQEYQDRILNKTALPEEQKQQLKALFTKYDNLWQHWENQVGHRKIRPHNIATGDYPPRPQKQYPINPKAKPSIQIVIDDLLKQGVLTPQNSTMNTPVYPVPKPDGRWRMVLDYREVNKTIPLTAAQNQHSAGILATIVRQKYKTTLDLANGFWAHPITPDSYWLTAFTWQGKQYCWTRLPQGFLNSPALFNADAVDLLKEVPNVQVYVDDIYLSHDNPHEHIQQLEKVFQILLQAGYVVSLKKSEIGQRTVEFLGFNITKEGRGLTDTFKTKLLNVTPPKDLKQLQSILGLLNFARNFIPNFAELVQTLYNLIASSPGKYIEWTEDNTKQLNKVIEALNTASNLEERLPDQRLVIKVNTSPSAGYVRYYNESGKKPIMYLNYVFSKAELKFSMLEKLLTTMHKALIKAMDLAMGQEILVYSPIVSMTKIQKTPLPERKALPIRWITWMTYLEDPRIQFHYDKTLPELKHIPDVYTSSIPPLKHPSQYEGVFCTDGSAIKSPDPTKSNNAGMGIVHAIYNPEYKILNQWSIPLGHHTAQMAEIAAVEFACKKALKVPGPVLVITDSFYVAESANKELPYWKSNGFVNNKKEPLKHISKWKSIAECLSIKPDITIQHEKGHQPINTSIHTEGNALADKLATQGSYVVNAGKRTADGSEFEKRTADGSEFESPKKKAKVE

SEQ ID NO: 702 - protein, 2091 aa, synthetic construct
MPAAKRVKLDGGDKKYSIGLDIGTNSVGWAVITDEYKVPSKKFKVLGNTDRHSIKKNLIGALLFDSGETAEATRLKRTARRRYTRRKNRICYLQEIFSNEMAKVDDSFFHRLEESFLVEEDKKHERHPIFGNIVDEVAYHEKYPTIYHLRKKLVDSTDKADLRLIYLALAHMIKFRGHFLIEGDLNPDNSDVDKLFIQLVQTYNQLFEENPINASGVDAKAILSARLSKSRRLENLIAQLPGEKKNGLFGNLIALSLGLTPNFKSNFDLAEDAKLQLSKDTYDDDLDNLLAQIGDQYADLFLAAKNLSDAILLSDILRVNTEITKAPLSASMIKRYDEHHQDLTLLKALVRQQLPEKYKEIFFDQSKNGYAGYIDGGASQEEFYKFIKPILEKMDGTEELLVKLNREDLLRKQRTFDNGSIPHQIHLGELHAILRRQEDFYPFLKDNREKIEKILTFRIPYYVGPLARGNSRFAWMTRKSEETITPWNFEEVVDKGASAQSFIERMTNFDKNLPNEKVLPKHSLLYEYFTVYNELTKVKYVTEGMRKPAFLSGEQKKAIVDLLFKTNRKVTVKQLKEDYFKKIECFDSVEISGVEDRFNASLGTYHDLLKIIKDKDFLDNEENEDILEDIVLTLTLFEDREMIEERLKTYAHLFDDKVMKQLKRRRYTGWGRLSRKLINGIRDKQSGKTILDFLKSDGFANRNFMQLIHDDSLTFKEDIQKAQVSGQGDSLHEHIANLAGSPAIKKGILQTVKVVDELVKVMGRHKPENIVIEMARENQTTQKGQKNSRERMKRIEEGIKELGSQILKEHPVENTQLQNEKLYLYYLQNGRDMYVDQELDINRLSDYDVDHIVPQSFLKDDSIDNKVLTRSDKARGKSDNVPSEEVVKKMKNYWRQLLNAKLITQRKFDNLTKAERGGLSELDKAGFIKRQLVETRQITKHVAQILDSRMNTKYDENDKLIREVKVITLKSKLVSDFRKDFQFYKVREINNYHHAHDAYLNAVVGTALIKKYPKLESEFVYGDYKVYDVRKMIAKSEQEIGKATAKYFFYSNIMNFFKTEITLANGEIRKRPLIETNGETGEIVWDKGRDFATVRKVLSMPQVNIVKKTEVQTGGFSKESILPKRNSDKLIARKKDWDPKKYGGFDSPTVAYSVLVVAKVEKGKSKKLKSVKELLGITIMERSSFEKNPIDFLEAKGYKEVKKDLIIKLPKYSLFELENGRKRMLASAGELQKGNELALPSKYVNFLYLASHYEKLKGSPEDNEQKQLFVEQHKHYLDEIIEQISEFSKRVILADANLDKVLSAYNKHRDKPIREQAENIIHLFTLTNLGAPAAFKYFDTTIDRKRYTSTKEVLDATLIHQSITGLYETRIDLSQLGGDGGGGSGGSGGSGGSGGSGGVPWLTQQPLQLTILVPLQEYQDRILNKTALPEEQKQQLKALFTKYDNLWQHWENQVGHRKIRPHNIATGDYPPRPQKQYPINPKAKPSIQIVIDDLLKQGVLTPQNSTMNTPVYPVPKPDGRWRMVLDYREVNKTIPLTAAQNQHSAGILATIVRQKYKTTLDLANGFWAHPITPDSYWLTAFTWQGKQYCWTRLPQGFLNSPALFNADAVDLLKEVPNVQVYVDDIYLSHDNPHEHIQQLEKVFQILLQAGYVVSLKKSEIGQRTVEFLGFNITKEGRGLTDTFKTKLLNVTPPKDLKQLQSILGLLNFARNFIPNFAELVQTLYNLIASSPGKYIEWTEDNTKQLNKVIEALNTASNLEERLPDQRLVIKVNTSPSAGYVRYYNESGKKPIMYLNYVFSKAELKFSMLEKLLTTMHKALIKAMDLAMGQEILVYSPIVSMTKIQKTPLPERKALPIRWITWMTYLEDPRIQFHYDKTLPELKHIPDVYTSSIPPLKHPSQYEGVFCTDGSAIKSPDPTKSNNAGMGIVHAIYNPEYKILNQWSIPLGHHTAQMAEIAAVEFACKKALKVPGPVLVITDSFYVAESANKELPYWKSNGFVNNKKEPLKHISKWKSIAECLSIKPDITIQHEKGHQPINTSIHTEGNALADKLATQGSYVVNAGKRTADGSEFEKRTADGSEFESPKKKAKVE

SEQ ID NO: 703 - protein, 2082 aa, synthetic construct
MPAAKRVKLDGGDKKYSIGLDIGTNSVGWAVITDEYKVPSKKFKVLGNTDRHSIKKNLIGALLFDSGETAEATRLKRTARRRYTRRKNRICYLQEIFSNEMAKVDDSFFHRLEESFLVEEDKKHERHPIFGNIVDEVAYHEKYPTIYHLRKKLVDSTDKADLRLIYLALAHMIKFRGHFLIEGDLNPDNSDVDKLFIQLVQTYNQLFEENPINASGVDAKAILSARLSKSRRLENLIAQLPGEKKNGLFGNLIALSLGLTPNFKSNFDLAEDAKLQLSKDTYDDDLDNLLAQIGDQYADLFLAAKNLSDAILLSDILRVNTEITKAPLSASMIKRYDEHHQDLTLLKALVRQQLPEKYKEIFFDQSKNGYAGYIDGGASQEEFYKFIKPILEKMDGTEELLVKLNREDLLRKQRTFDNGSIPHQIHLGELHAILRRQEDFYPFLKDNREKIEKILTFRIPYYVGPLARGNSRFAWMTRKSEETITPWNFEEVVDKGASAQSFIERMTNFDKNLPNEKVLPKHSLLYEYFTVYNELTKVKYVTEGMRKPAFLSGEQKKAIVDLLFKTNRKVTVKQLKEDYFKKIECFDSVEISGVEDRFNASLGTYHDLLKIIKDKDFLDNEENEDILEDIVLTLTLFEDREMIEERLKTYAHLFDDKVMKQLKRRRYTGWGRLSRKLINGIRDKQSGKTILDFLKSDGFANRNFMQLIHDDSLTFKEDIQKAQVSGQGDSLHEHIANLAGSPAIKKGILQTVKVVDELVKVMGRHKPENIVIEMARENQTTQKGQKNSRERMKRIEEGIKELGSQILKEHPVENTQLQNEKLYLYYLQNGRDMYVDQELDINRLSDYDVDHIVPQSFLKDDSIDNKVLTRSDKARGKSDNVPSEEVVKKMKNYWRQLLNAKLITQRKFDNLTKAERGGLSELDKAGFIKRQLVETRQITKHVAQILDSRMNTKYDENDKLIREVKVITLKSKLVSDFRKDFQFYKVREINNYHHAHDAYLNAVVGTALIKKYPKLESEFVYGDYKVYDVRKMIAKSEQEIGKATAKYFFYSNIMNFFKTEITLANGEIRKRPLIETNGETGEIVWDKGRDFATVRKVLSMPQVNIVKKTEVQTGGFSKESILPKRNSDKLIARKKDWDPKKYGGFDSPTVAYSVLVVAKVEKGKSKKLKSVKELLGITIMERSSFEKNPIDFLEAKGYKEVKKDLIIKLPKYSLFELENGRKRMLASAGELQKGNELALPSKYVNFLYLASHYEKLKGSPEDNEQKQLFVEQHKHYLDEIIEQISEFSKRVILADANLDKVLSAYNKHRDKPIREQAENIIHLFTLTNLGAPAAFKYFDTTIDRKRYTSTKEVLDATLIHQSITGLYETRIDLSQLGGDGGGSSGGSGGVPWLTQQPLQLTILVPLQEYQDRILNKTALPEEQKQQLKALFTKYDNLWQHWENQVGHRKIRPHNIATGDYPPRPQKQYPINPKAKPSIQIVIDDLLKQGVLTPQNSTMNTPVYPVPKPDGRWRMVLDYREVNKTIPLTAAQNQHSAGILATIVRQKYKTTLDLANGFWAHPITPDSYWLTAFTWQGKQYCWTRLPQGFLNSPALFNADAVDLLKEVPNVQVYVDDIYLSHDNPHEHIQQLEKVFQILLQAGYVVSLKKSEIGQRTVEFLGFNITKEGRGLTDTFKTKLLNVTPPKDLKQLQSILGLLNFARNFIPNFAELVQTLYNLIASSPGKYIEWTEDNTKQLNKVIEALNTASNLEERLPDQRLVIKVNTSPSAGYVRYYNESGKKPIMYLNYVFSKAELKFSMLEKLLTTMHKALIKAMDLAMGQEILVYSPIVSMTKIQKTPLPERKALPIRWITWMTYLEDPRIQFHYDKTLPELKHIPDVYTSSIPPLKHPSQYEGVFCTDGSAIKSPDPTKSNNAGMGIVHAIYNPEYKILNQWSIPLGHHTAQMAEIAAVEFACKKALKVPGPVLVITDSFYVAESANKELPYWKSNGFVNNKKEPLKHISKWKSIAECLSIKPDITIQHEKGHQPINTSIHTEGNALADKLATQGSYVVNAGKRTADGSEFEKRTADGSEFESPKKKAKVE

SEQ ID NO: 704 - protein, 2092 aa, synthetic construct
MPAAKRVKLDGGDKKYSIGLDIGTNSVGWAVITDEYKVPSKKFKVLGNTDRHSIKKNLIGALLFDSGETAEATRLKRTARRRYTRRKNRICYLQEIFSNEMAKVDDSFFHRLEESFLVEEDKKHERHPIFGNIVDEVAYHEKYPTIYHLRKKLVDSTDKADLRLIYLALAHMIKFRGHFLIEGDLNPDNSDVDKLFIQLVQTYNQLFEENPINASGVDAKAILSARLSKSRRLENLIAQLPGEKKNGLFGNLIALSLGLTPNFKSNFDLAEDAKLQLSKDTYDDDLDNLLAQIGDQYADLFLAAKNLSDAILLSDILRVNTEITKAPLSASMIKRYDEHHQDLTLLKALVRQQLPEKYKEIFFDQSKNGYAGYIDGGASQEEFYKFIKPILEKMDGTEELLVKLNREDLLRKQRTFDNGSIPHQIHLGELHAILRRQEDFYPFLKDNREKIEKILTFRIPYYVGPLARGNSRFAWMTRKSEETITPWNFEEVVDKGASAQSFIERMTNFDKNLPNEKVLPKHSLLYEYFTVYNELTKVKYVTEGMRKPAFLSGEQKKAIVDLLFKTNRKVTVKQLKEDYFKKIECFDSVEISGVEDRFNASLGTYHDLLKIIKDKDFLDNEENEDILEDIVLTLTLFEDREMIEERLKTYAHLFDDKVMKQLKRRRYTGWGRLSRKLINGIRDKQSGKTILDFLKSDGFANRNFMQLIHDDSLTFKEDIQKAQVSGQGDSLHEHIANLAGSPAIKKGILQTVKVVDELVKVMGRHKPENIVIEMARENQTTQKGQKNSRERMKRIEEGIKELGSQILKEHPVENTQLQNEKLYLYYLQNGRDMYVDQELDINRLSDYDVDHIVPQSFLKDDSIDNKVLTRSDKARGKSDNVPSEEVVKKMKNYWRQLLNAKLITQRKFDNLTKAERGGLSELDKAGFIKRQLVETRQITKHVAQILDSRMNTKYDENDKLIREVKVITLKSKLVSDFRKDFQFYKVREINNYHHAHDAYLNAVVGTALIKKYPKLESEFVYGDYKVYDVRKMIAKSEQEIGKATAKYFFYSNIMNFFKTEITLANGEIRKRPLIETNGETGEIVWDKGRDFATVRKVLSMPQVNIVKKTEVQTGGFSKESILPKRNSDKLIARKKDWDPKKYGGFDSPTVAYSVLVVAKVEKGKSKKLKSVKELLGITIMERSSFEKNPIDFLEAKGYKEVKKDLIIKLPKYSLFELENGRKRMLASAGELQKGNELALPSKYVNFLYLASHYEKLKGSPEDNEQKQLFVEQHKHYLDEIIEQISEFSKRVILADANLDKVLSAYNKHRDKPIREQAENIIHLFTLTNLGAPAAFKYFDTTIDRKRYTSTKEVLDATLIHQSITGLYETRIDLSQLGGDGGSGSETPGTSESATPESGGVPWLTQQPLQLTILVPLQEYQDRILNKTALPEEQKQQLKALFTKYDNLWQHWENQVGHRKIRPHNIATGDYPPRPQKQYPINPKAKPSIQIVIDDLLKQGVLTPQNSTMNTPVYPVPKPDGRWRMVLDYREVNKTIPLTAAQNQHSAGILATIVRQKYKTTLDLANGFWAHPITPDSYWLTAFTWQGKQYCWTRLPQGFLNSPALFNADAVDLLKEVPNVQVYVDDIYLSHDNPHEHIQQLEKVFQILLQAGYVVSLKKSEIGQRTVEFLGFNITKEGRGLTDTFKTKLLNVTPPKDLKQLQSILGKLNFARNFIPNFAELVQTLYNLIASSPGKYIEWTEDNTKQLNKVIEALNTASNLEERLPDQRLVIKVNTSPSAGYVRYYNESGKKPIMYLNYVFSKAELKFSMLEKLLTTMHKALIKAMDLAMGQEILVYSPIVSMTKIQKTPLPERKALPIRWITWMTYLEDPRIQFHYDKTLPELKHIPDVYTSSIPPLKHPSQYEGVFCTDGSAIKSPDPTKSNNAGMGIVHAIYNPEYKILNQWSIPLGHHTAQMAEIAAVEFACKKALKVPGPVLVITDSFYVAESANKELPYWKSNGFVNNKKEPLKHISKWKSIAECLSIKPDITIQHEKGHQPINTSIHTEGNALADKLATQGSYVVNAGKRTADGSEFEKRTADGSEFESPKKKAKVE

SEQ ID NO: 705 - protein, 2087 aa, synthetic construct
MPAAKRVKLDGGDKKYSIGLDIGTNSVGWAVITDEYKVPSKKFKVLGNTDRHSIKKNLIGALLFDSGETAEATRLKRTARRRYTRRKNRICYLQEIFSNEMAKVDDSFFHRLEESFLVEEDKKHERHPIFGNIVDEVAYHEKYPTIYHLRKKLVDSTDKADLRLIYLALAHMIKFRGHFLIEGDLNPDNSDVDKLFIQLVQTYNQLFEENPINASGVDAKAILSARLSKSRRLENLIAQLPGEKKNGLFGNLIALSLGLTPNFKSNFDLAEDAKLQLSKDTYDDDLDNLLAQIGDQYADLFLAAKNLSDAILLSDILRVNTEITKAPLSASMIKRYDEHHQDLTLLKALVRQQLPEKYKEIFFDQSKNGYAGYIDGGASQEEFYKFIKPILEKMDGTEELLVKLNREDLLRKQRTFDNGSIPHQIHLGELHAILRRQEDFYPFLKDNREKIEKILTFRIPYYVGPLARGNSRFAWMTRKSEETITPWNFEEVVDKGASAQSFIERMTNFDKNLPNEKVLPKHSLLYEYFTVYNELTKVKYVTEGMRKPAFLSGEQKKAIVDLLFKTNRKVTVKQLKEDYFKKIECFDSVEISGVEDRFNASLGTYHDLLKIIKDKDFLDNEENEDILEDIVLTLTLFEDREMIEERLKTYAHLFDDKVMKQLKRRRYTGWGRLSRKLINGIRDKQSGKTILDFLKSDGFANRNFMQLIHDDSLTFKEDIQKAQVSGQGDSLHEHIANLAGSPAIKKGILQTVKVVDELVKVMGRHKPENIVIEMARENQTTQKGQKNSRERMKRIEEGIKELGSQILKEHPVENTQLQNEKLYLYYLQNGRDMYVDQELDINRLSDYDVDHIVPQSFLKDDSIDNKVLTRSDKARGKSDNVPSEEVVKKMKNYWRQLLNAKLITQRKFDNLTKAERGGLSELDKAGFIKRQLVETRQITKHVAQILDSRMNTKYDENDKLIREVKVITLKSKLVSDFRKDFQFYKVREINNYHHAHDAYLNAVVGTALIKKYPKLESEFVYGDYKVYDVRKMIAKSEQEIGKATAKYFFYSNIMNFFKTEITLANGEIRKRPLIETNGETGEIVWDKGRDFATVRKVLSMPQVNIVKKTEVQTGGFSKESILPKRNSDKLIARKKDWDPKKYGGFDSPTVAYSVLVVAKVEKGKSKKLKSVKELLGITIMERSSFEKNPIDFLEAKGYKEVKKDLIIKLPKYSLFELENGRKRMLASAGELQKGNELALPSKYVNFLYLASHYEKLKGSPEDNEQKQLFVEQHKHYLDEIIEQISEFSKRVILADANLDKVLSAYNKHRDKPIREQAENIIHLFTLTNLGAPAAFKYFDTTIDRKRYTSTKEVLDATLIHQSITGLYETRIDLSQLGGDGGPAPAPAPAPAPGGVPWLTQQPLQLTILVPLQEYQDRILNKTALPEEQKQQLKALFTKYDNLWQHWENQVGHRKIRPHNIATGDYPPRPQKQYPINPKAKPSIQIVIDDLLKQGVLTPQNSTMNTPVYPVPKPDGRWRMVLDYREVNKTIPLTAAQNQHSAGILATIVRQKYKTTLDLANGFWAHPITPDSYWLTAFTWQGKQYCWTRLPQGFLNSPALFNADAVDLLKEVPNVQVYVDDIYLSHDNPHEHIQQLEKVFQILLQAGYVVSLKKSEIGQRTVEFLGFNITKEGRGLTDTFKTKLLNVTPPKDLKQLQSILGKLNFARNFIPNFAELVQTLYNLIASSPGKYIEWTEDNTKQLNKVIEALNTASNLEERLPDQRLVIKVNTSPSAGYVRYYNESGKKPIMYLNYVFSKAELKFSMLEKLLTTMHKALIKAMDLAMGQEILVYSPIVSMTKIQKTPLPERKALPIRWITWMTYLEDPRIQFHYDKTLPELKHIPDVYTSSIPPLKHPSQYEGVFCTDGSAIKSPDPTKSNNAGMGIVHAIYNPEYKILNQWSIPLGHHTAQMAEIAAVEFACKKALKVPGPVLVITDSFYVAESANKELPYWKSNGFVNNKKEPLKHISKWKSIAECLSIKPDITIQHEKGHQPINTSIHTEGNALADKLATQGSYVVNAGKRTADGSEFEKRTADGSEFESPKKKAKVE

SEQ ID NO: 706 - protein, 2085 aa, synthetic construct
MPAAKRVKLDGGDKKYSIGLDIGTNSVGWAVITDEYKVPSKKFKVLGNTDRHSIKKNLIGALLFDSGETAEATRLKRTARRRYTRRKNRICYLQEIFSNEMAKVDDSFFHRLEESFLVEEDKKHERHPIFGNIVDEVAYHEKYPTIYHLRKKLVDSTDKADLRLIYLALAHMIKFRGHFLIEGDLNPDNSDVDKLFIQLVQTYNQLFEENPINASGVDAKAILSARLSKSRRLENLIAQLPGEKKNGLFGNLIALSLGLTPNFKSNFDLAEDAKLQLSKDTYDDDLDNLLAQIGDQYADLFLAAKNLSDAILLSDILRVNTEITKAPLSASMIKRYDEHHQDLTLLKALVRQQLPEKYKEIFFDQSKNGYAGYIDGGASQEEFYKFIKPILEKMDGTEELLVKLNREDLLRKQRTFDNGSIPHQIHLGELHAILRRQEDFYPFLKDNREKIEKILTFRIPYYVGPLARGNSRFAWMTRKSEETITPWNFEEVVDKGASAQSFIERMTNFDKNLPNEKVLPKHSLLYEYFTVYNELTKVKYVTEGMRKPAFLSGEQKKAIVDLLFKTNRKVTVKQLKEDYFKKIECFDSVEISGVEDRFNASLGTYHDLLKIIKDKDFLDNEENEDILEDIVLTLTLFEDREMIEERLKTYAHLFDDKVMKQLKRRRYTGWGRLSRKLINGIRDKQSGKTILDFLKSDGFANRNFMQLIHDDSLTFKEDIQKAQVSGQGDSLHEHIANLAGSPAIKKGILQTVKVVDELVKVMGRHKPENIVIEMARENQTTQKGQKNSRERMKRIEEGIKELGSQILKEHPVENTQLQNEKLYLYYLQNGRDMYVDQELDINRLSDYDVDHIVPQSFLKDDSIDNKVLTRSDKARGKSDNVPSEEVVKKMKNYWRQLLNAKLITQRKFDNLTKAERGGLSELDKAGFIKRQLVETRQITKHVAQILDSRMNTKYDENDKLIREVKVITLKSKLVSDFRKDFQFYKVREINNYHHAHDAYLNAVVGTALIKKYPKLESEFVYGDYKVYDVRKMIAKSEQEIGKATAKYFFYSNIMNFFKTEITLANGEIRKRPLIETNGETGEIVWDKGRDFATVRKVLSMPQVNIVKKTEVQTGGFSKESILPKRNSDKLIARKKDWDPKKYGGFDSPTVAYSVLVVAKVEKGKSKKLKSVKELLGITIMERSSFEKNPIDFLEAKGYKEVKKDLIIKLPKYSLFELENGRKRMLASAGELQKGNELALPSKYVNFLYLASHYEKLKGSPEDNEQKQLFVEQHKHYLDEIIEQISEFSKRVILADANLDKVLSAYNKHRDKPIREQAENIIHLFTLTNLGAPAAFKYFDTTIDRKRYTSTKEVLDATLIHQSITGLYETRIDLSQLGGDGGPAPGGGGSSGGVPWLTQQPLQLTILVPLQEYQDRILNKTALPEEQKQQLKALFTKYDNLWQHWENQVGHRKIRPHNIATGDYPPRPQKQYPINPKAKPSIQIVIDDLLKQGVLTPQNSTMNTPVYPVPKPDGRWRMVLDYREVNKTIPLTAAQNQHSAGILATIVRQKYKTTLDLANGFWAHPITPDSYWLTAFTWQGKQYCWTRLPQGFLNSPALFNADAVDLLKEVPNVQVYVDDIYLSHDNPHEHIQQLEKVFQILLQAGYVVSLKKSEIGQRTVEFLGFNITKEGRGLTDTFKTKLLNVTPPKDLKQLQSILGKLNFARNFIPNFAELVQTLYNLIASSPGKYIEWTEDNTKQLNKVIEALNTASNLEERLPDQRLVIKVNTSPSAGYVRYYNESGKKPIMYLNYVFSKAELKFSMLEKLLTTMHKALIKAMDLAMGQEILVYSPIVSMTKIQKTPLPERKALPIRWITWMTYLEDPRIQFHYDKTLPELKHIPDVYTSSIPPLKHPSQYEGVFCTDGSAIKSPDPTKSNNAGMGIVHAIYNPEYKILNQWSIPLGHHTAQMAEIAAVEFACKKALKVPGPVLVITDSFYVAESANKELPYWKSNGFVNNKKEPLKHISKWKSIAECLSIKPDITIQHEKGHQPINTSIHTEGNALADKLATQGSYVVNAGKRTADGSEFEKRTADGSEFESPKKKAKVE

SEQ ID NO: 707 - protein, 2168 aa, synthetic construct
MPAAKRVKLDGGDKKYSIGLDIGTNSVGWAVITDEYKVPSKKFKVLGNTDRHSIKKNLIGALLFDSGETAEATRLKRTARRRYTRRKNRICYLQEIFSNEMAKVDDSFFHRLEESFLVEEDKKHERHPIFGNIVDEVAYHEKYPTIYHLRKKLVDSTDKADLRLIYLALAHMIKFRGHFLIEGDLNPDNSDVDKLFIQLVQTYNQLFEENPINASGVDAKAILSARLSKSRRLENLIAQLPGEKKNGLFGNLIALSLGLTPNFKSNFDLAEDAKLQLSKDTYDDDLDNLLAQIGDQYADLFLAAKNLSDAILLSDILRVNTEITKAPLSASMIKRYDEHHQDLTLLKALVRQQLPEKYKEIFFDQSKNGYAGYIDGGASQEEFYKFIKPILEKMDGTEELLVKLNREDLLRKQRTFDNGSIPHQIHLGELHAILRRQEDFYPFLKDNREKIEKILTFRIPYYVGPLARGNSRFAWMTRKSEETITPWNFEEVVDKGASAQSFIERMTNFDKNLPNEKVLPKHSLLYEYFTVYNELTKVKYVTEGMRKPAFLSGEQKKAIVDLLFKTNRKVTVKQLKEDYFKKIECFDSVEISGVEDRFNASLGTYHDLLKIIKDKDFLDNEENEDILEDIVLTLTLFEDREMIEERLKTYAHLFDDKVMKQLKRRRYTGWGRLSRKLINGIRDKQSGKTILDFLKSDGFANRNFMQLIHDDSLTFKEDIQKAQVSGQGDSLHEHIANLAGSPAIKKGILQTVKVVDELVKVMGRHKPENIVIEMARENQTTQKGQKNSRERMKRIEEGIKELGSQILKEHPVENTQLQNEKLYLYYLQNGRDMYVDQELDINRLSDYDVDHIVPQSFLKDDSIDNKVLTRSDKARGKSDNVPSEEVVKKMKNYWRQLLNAKLITQRKFDNLTKAERGGLSELDKAGFIKRQLVETRQITKHVAQILDSRMNTKYDENDKLIREVKVITLKSKLVSDFRKDFQFYKVREINNYHHAHDAYLNAVVGTALIKKYPKLESEFVYGDYKVYDVRKMIAKSEQEIGKATAKYFFYSNIMNFFKTEITLANGEIRKRPLIETNGETGEIVWDKGRDFATVRKVLSMPQVNIVKKTEVQTGGFSKESILPKRNSDKLIARKKDWDPKKYGGFDSPTVAYSVLVVAKVEKGKSKKLKSVKELLGITIMERSSFEKNPIDFLEAKGYKEVKKDLIIKLPKYSLFELENGRKRMLASAGELQKGNELALPSKYVNFLYLASHYEKLKGSPEDNEQKQLFVEQHKHYLDEIIEQISEFSKRVILADANLDKVLSAYNKHRDKPIREQAENIIHLFTLTNLGAPAAFKYFDTTIDRKRYTSTKEVLDATLIHQSITGLYETRIDLSQLGGDGGGSSGGMNPLQLLQPLPAEVKGTKLLAHWNSGATITCIPESFLEDEQPIKQTLIKTIHGEKQQNVYYLTFKVKGRKVEAEVIASPYEYILLSPTDVPWLTQQPLQLTILVPLQEYQDRILNKTALPEEQKQQLKALFTKYDNLWQHWENQVGHRKIRPHNIATGDYPPRPQKQYPINPKAKPSIQIVIDDLLKQGVLTPQNSTMNTPVYPVPKPDGRWRMVLDYREVNKTIPLTAAQNQHSAGILATIVRQKYKTTLDLANGFWAHPITPDSYWLTAFTWQGKQYCWTRLPQGFLNSPALFNADAVDLLKEVPNVQVYVDDIYLSHDNPHEHIQQLEKVFQILLQAGYVVSLKKSEIGQRTVEFLGFNITKEGRGLTDTFKTKLLNVTPPKDLKQLQSILGLLNFARNFIPNFAELVQTLYNLIASSPGKYIEWTEDNTKQLNKVIEALNTASNLEERLPDQRLVIKVNTSPSAGYVRYYNESGKKPIMYLNYVFSKAELKFSMLEKLLTTMHKALIKAMDLAMGQEILVYSPIVSMTKIQKTPLPERKALPIRWITWMTYLEDPRIQFHYDKTLPELKHIPDVYTSSIPPLKHPSQYEGVFCTDGSAIKSPDPTKSNNAGMGIVHAIYNPEYKILNQWSIPLGHHTAQMAEIAAVEFACKKALKVPGPVLVITDSFYVAESANKELPYWKSNGFVNNKKEPLKHISKWKSIAECLSIKPDITIQHEKGHQPINTSIHTEGNALADKLATQGSYVVNAGKRTADGSEFEKRTADGSEFESPKKKAKVE

SEQ ID NO: 708 - protein, 2174 aa, synthetic construct
MPAAKRVKLDGGDKKYSIGLDIGTNSVGWAVITDEYKVPSKKFKVLGNTDRHSIKKNLIGALLFDSGETAEATRLKRTARRRYTRRKNRICYLQEIFSNEMAKVDDSFFHRLEESFLVEEDKKHERHPIFGNIVDEVAYHEKYPTIYHLRKKLVDSTDKADLRLIYLALAHMIKFRGHFLIEGDLNPDNSDVDKLFIQLVQTYNQLFEENPINASGVDAKAILSARLSKSRRLENLIAQLPGEKKNGLFGNLIALSLGLTPNFKSNFDLAEDAKLQLSKDTYDDDLDNLLAQIGDQYADLFLAAKNLSDAILLSDILRVNTEITKAPLSASMIKRYDEHHQDLTLLKALVRQQLPEKYKEIFFDQSKNGYAGYIDGGASQEEFYKFIKPILEKMDGTEELLVKLNREDLLRKQRTFDNGSIPHQIHLGELHAILRRQEDFYPFLKDNREKIEKILTFRIPYYVGPLARGNSRFAWMTRKSEETITPWNFEEVVDKGASAQSFIERMTNFDKNLPNEKVLPKHSLLYEYFTVYNELTKVKYVTEGMRKPAFLSGEQKKAIVDLLFKTNRKVTVKQLKEDYFKKIECFDSVEISGVEDRFNASLGTYHDLLKIIKDKDFLDNEENEDILEDIVLTLTLFEDREMIEERLKTYAHLFDDKVMKQLKRRRYTGWGRLSRKLINGIRDKQSGKTILDFLKSDGFANRNFMQLIHDDSLTFKEDIQKAQVSGQGDSLHEHIANLAGSPAIKKGILQTVKVVDELVKVMGRHKPENIVIEMARENQTTQKGQKNSRERMKRIEEGIKELGSQILKEHPVENTQLQNEKLYLYYLQNGRDMYVDQELDINRLSDYDVDHIVPQSFLKDDSIDNKVLTRSDKARGKSDNVPSEEVVKKMKNYWRQLLNAKLITQRKFDNLTKAERGGLSELDKAGFIKRQLVETRQITKHVAQILDSRMNTKYDENDKLIREVKVITLKSKLVSDFRKDFQFYKVREINNYHHAHDAYLNAVVGTALIKKYPKLESEFVYGDYKVYDVRKMIAKSEQEIGKATAKYFFYSNIMNFFKTEITLANGEIRKRPLIETNGETGEIVWDKGRDFATVRKVLSMPQVNIVKKTEVQTGGFSKESILPKRNSDKLIARKKDWDPKKYGGFDSPTVAYSVLVVAKVEKGKSKKLKSVKELLGITIMERSSFEKNPIDFLEAKGYKEVKKDLIIKLPKYSLFELENGRKRMLASAGELQKGNELALPSKYVNFLYLASHYEKLKGSPEDNEQKQLFVEQHKHYLDEIIEQISEFSKRVILADANLDKVLSAYNKHRDKPIREQAENIIHLFTLTNLGAPAAFKYFDTTIDRKRYTSTKEVLDATLIHQSITGLYETRIDLSQLGGDGGGGGPAPGSSGGMNPLQLLQPLPAEVKGTKLLAHWNSGATITCIPESFLEDEQPIKQTLIKTIHGEKQQNVYYLTFKVKGRKVEAEVIASPYEYILLSPTDVPWLTQQPLQLTILVPLQEYQDRILNKTALPEEQKQQLKALFTKYDNLWQHWENQVGHRKIRPHNIATGDYPPRPQKQYPINPKAKPSIQIVIDDLLKQGVLTPQNSTMNTPVYPVPKPDGRWRMVLDYREVNKTIPLTAAQNQHSAGILATIVRQKYKTTLDLANGFWAHPITPDSYWLTAFTWQGKQYCWTRLPQGFLNSPALFNADAVDLLKEVPNVQVYVDDIYLSHDNPHEHIQQLEKVFQILLQAGYVVSLKKSEIGQRTVEFLGFNITKEGRGLTDTFKTKLLNVTPPKDLKQLQSILGLLNFARNFIPNFAELVQTLYNLIASSPGKYIEWTEDNTKQLNKVIEALNTASNLEERLPDQRLVIKVNTSPSAGYVRYYNESGKKPIMYLNYVFSKAELKFSMLEKLLTTMHKALIKAMDLAMGQEILVYSPIVSMTKIQKTPLPERKALPIRWITWMTYLEDPRIQFHYDKTLPELKHIPDVYTSSIPPLKHPSQYEGVFCTDGSAIKSPDPTKSNNAGMGIVHAIYNPEYKILNQWSIPLGHHTAQMAEIAAVEFACKKALKVPGPVLVITDSFYVAESANKELPYWKSNGFVNNKKEPLKHISKWKSIAECLSIKPDITIQHEKGHQPINTSIHTEGNALADKLATQGSYVVNAGKRTADGSEFEKRTADGSEFESPKKKAKVE

SEQ ID NO: 709 - protein, 2176 aa, synthetic construct
MPAAKRVKLDGGDKKYSIGLDIGTNSVGWAVITDEYKVPSKKFKVLGNTDRHSIKKNLIGALLFDSGETAEATRLKRTARRRYTRRKNRICYLQEIFSNEMAKVDDSFFHRLEESFLVEEDKKHERHPIFGNIVDEVAYHEKYPTIYHLRKKLVDSTDKADLRLIYLALAHMIKFRGHFLIEGDLNPDNSDVDKLFIQLVQTYNQLFEENPINASGVDAKAILSARLSKSRRLENLIAQLPGEKKNGLFGNLIALSLGLTPNFKSNFDLAEDAKLQLSKDTYDDDLDNLLAQIGDQYADLFLAAKNLSDAILLSDILRVNTEITKAPLSASMIKRYDEHHQDLTLLKALVRQQLPEKYKEIFFDQSKNGYAGYIDGGASQEEFYKFIKPILEKMDGTEELLVKLNREDLLRKQRTFDNGSIPHQIHLGELHAILRRQEDFYPFLKDNREKIEKILTFRIPYYVGPLARGNSRFAWMTRKSEETITPWNFEEVVDKGASAQSFIERMTNFDKNLPNEKVLPKHSLLYEYFTVYNELTKVKYVTEGMRKPAFLSGEQKKAIVDLLFKTNRKVTVKQLKEDYFKKIECFDSVEISGVEDRFNASLGTYHDLLKIIKDKDFLDNEENEDILEDIVLTLTLFEDREMIEERLKTYAHLFDDKVMKQLKRRRYTGWGRLSRKLINGIRDKQSGKTILDFLKSDGFANRNFMQLIHDDSLTFKEDIQKAQVSGQGDSLHEHIANLAGSPAIKKGILQTVKVVDELVKVMGRHKPENIVIEMARENQTTQKGQKNSRERMKRIEEGIKELGSQILKEHPVENTQLQNEKLYLYYLQNGRDMYVDQELDINRLSDYDVDHIVPQSFLKDDSIDNKVLTRSDKARGKSDNVPSEEVVKKMKNYWRQLLNAKLITQRKFDNLTKAERGGLSELDKAGFIKRQLVETRQITKHVAQILDSRMNTKYDENDKLIREVKVITLKSKLVSDFRKDFQFYKVREINNYHHAHDAYLNAVVGTALIKKYPKLESEFVYGDYKVYDVRKMIAKSEQEIGKATAKYFFYSNIMNFFKTEITLANGEIRKRPLIETNGETGEIVWDKGRDFATVRKVLSMPQVNIVKKTEVQTGGFSKESILPKRNSDKLIARKKDWDPKKYGGFDSPTVAYSVLVVAKVEKGKSKKLKSVKELLGITIMERSSFEKNPIDFLEAKGYKEVKKDLIIKLPKYSLFELENGRKRMLASAGELQKGNELALPSKYVNFLYLASHYEKLKGSPEDNEQKQLFVEQHKHYLDEIIEQISEFSKRVILADANLDKVLSAYNKHRDKPIREQAENIIHLFTLTNLGAPAAFKYFDTTIDRKRYTSTKEVLDATLIHQSITGLYETRIDLSQLGGDGGPAPEAAAKGSSGGMNPLQLLQPLPAEVKGTKLLAHWNSGATITCIPESFLEDEQPIKQTLIKTIHGEKQQNVYYLTFKVKGRKVEAEVIASPYEYILLSPTDVPWLTQQPLQLTILVPLQEYQDRILNKTALPEEQKQQLKALFTKYDNLWQHWENQVGHRKIRPHNIATGDYPPRPQKQYPINPKAKPSIQIVIDDLLKQGVLTPQNSTMNTPVYPVPKPDGRWRMVLDYREVNKTIPLTAAQNQHSAGILATIVRQKYKTTLDLANGFWAHPITPDSYWLTAFTWQGKQYCWTRLPQGFLNSPALFNADAVDLLKEVPNVQVYVDDIYLSHDNPHEHIQQLEKVFQILLQAGYVVSLKKSEIGQRTVEFLGFNITKEGRGLTDTFKTKLLNVTPPKDLKQLQSILGLLNFARNFIPNFAELVQTLYNLIASSPGKYIEWTEDNTKQLNKVIEALNTASNLEERLPDQRLVIKVNTSPSAGYVRYYNESGKKPIMYLNYVFSKAELKFSMLEKLLTTMHKALIKAMDLAMGQEILVYSPIVSMTKIQKTPLPERKALPIRWITWMTYLEDPRIQFHYDKTLPELKHIPDVYTSSIPPLKHPSQYEGVFCTDGSAIKSPDPTKSNNAGMGIVHAIYNPEYKILNQWSIPLGHHTAQMAEIAAVEFACKKALKVPGPVLVITDSFYVAESANKELPYWKSNGFVNNKKEPLKHISKWKSIAECLSIKPDITIQHEKGHQPINTSIHTEGNALADKLATQGSYVVNAGKRTADGSEFEKRTADGSEFESPKKKAKVE

SEQ ID NO: 710 - protein, 2171 aa, synthetic construct
MPAAKRVKLDGGDKKYSIGLDIGTNSVGWAVITDEYKVPSKKFKVLGNTDRHSIKKNLIGALLFDSGETAEATRLKRTARRRYTRRKNRICYLQEIFSNEMAKVDDSFFHRLEESFLVEEDKKHERHPIFGNIVDEVAYHEKYPTIYHLRKKLVDSTDKADLRLIYLALAHMIKFRGHFLIEGDLNPDNSDVDKLFIQLVQTYNQLFEENPINASGVDAKAILSARLSKSRRLENLIAQLPGEKKNGLFGNLIALSLGLTPNFKSNFDLAEDAKLQLSKDTYDDDLDNLLAQIGDQYADLFLAAKNLSDAILLSDILRVNTEITKAPLSASMIKRYDEHHQDLTLLKALVRQQLPEKYKEIFFDQSKNGYAGYIDGGASQEEFYKFIKPILEKMDGTEELLVKLNREDLLRKQRTFDNGSIPHQIHLGELHAILRRQEDFYPFLKDNREKIEKILTFRIPYYVGPLARGNSRFAWMTRKSEETITPWNFEEVVDKGASAQSFIERMTNFDKNLPNEKVLPKHSLLYEYFTVYNELTKVKYVTEGMRKPAFLSGEQKKAIVDLLFKTNRKVTVKQLKEDYFKKIECFDSVEISGVEDRFNASLGTYHDLLKIIKDKDFLDNEENEDILEDIVLTLTLFEDREMIEERLKTYAHLFDDKVMKQLKRRRYTGWGRLSRKLINGIRDKQSGKTILDFLKSDGFANRNFMQLIHDDSLTFKEDIQKAQVSGQGDSLHEHIANLAGSPAIKKGILQTVKVVDELVKVMGRHKPENIVIEMARENQTTQKGQKNSRERMKRIEEGIKELGSQILKEHPVENTQLQNEKLYLYYLQNGRDMYVDQELDINRLSDYDVDHIVPQSFLKDDSIDNKVLTRSDKARGKSDNVPSEEVVKKMKNYWRQLLNAKLITQRKFDNLTKAERGGLSELDKAGFIKRQLVETRQITKHVAQILDSRMNTKYDENDKLIREVKVITLKSKLVSDFRKDFQFYKVREINNYHHAHDAYLNAVVGTALIKKYPKLESEFVYGDYKVYDVRKMIAKSEQEIGKATAKYFFYSNIMNFFKTEITLANGEIRKRPLIETNGETGEIVWDKGRDFATVRKVLSMPQVNIVKKTEVQTGGFSKESILPKRNSDKLIARKKDWDPKKYGGFDSPTVAYSVLVVAKVEKGKSKKLKSVKELLGITIMERSSFEKNPIDFLEAKGYKEVKKDLIIKLPKYSLFELENGRKRMLASAGELQKGNELALPSKYVNFLYLASHYEKLKGSPEDNEQKQLFVEQHKHYLDEIIEQISEFSKRVILADANLDKVLSAYNKHRDKPIREQAENIIHLFTLTNLGAPAAFKYFDTTIDRKRYTSTKEVLDATLIHQSITGLYETRIDLSQLGGDGGGGGGSSGGMNPLQLLQPLPAEVKGTKLLAHWNSGATITCIPESFLEDEQPIKQTLIKTIHGEKQQNVYYLTFKVKGRKVEAEVIASPYEYILLSPTDVPWLTQQPLQLTILVPLQEYQDRILNKTALPEEQKQQLKALFTKYDNLWQHWENQVGHRKIRPHNIATGDYPPRPQKQYPINPKAKPSIQIVIDDLLKQGVLTPQNSTMNTPVYPVPKPDGRWRMVLDYREVNKTIPLTAAQNQHSAGILATIVRQKYKTTLDLANGFWAHPITPDSYWLTAFTWQGKQYCWTRLPQGFLNSPALFNADAVDLLKEVPNVQVYVDDIYLSHDNPHEHIQQLEKVFQILLQAGYVVSLKKSEIGQRTVEFLGFNITKEGRGLTDTFKTKLLNVTPPKDLKQLQSILGLLNFARNFIPNFAELVQTLYNLIASSPGKYIEWTEDNTKQLNKVIEALNTASNLEERLPDQRLVIKVNTSPSAGYVRYYNESGKKPIMYLNYVFSKAELKFSMLEKLLTTMHKALIKAMDLAMGQEILVYSPIVSMTKIQKTPLPERKALPIRWITWMTYLEDPRIQFHYDKTLPELKHIPDVYTSSIPPLKHPSQYEGVFCTDGSAIKSPDPTKSNNAGMGIVHAIYNPEYKILNQWSIPLGHHTAQMAEIAAVEFACKKALKVPGPVLVITDSFYVAESANKELPYWKSNGFVNNKKEPLKHISKWKSIAECLSIKPDITIQHEKGHQPINTSIHTEGNALADKLATQGSYVVNAGKRTADGSEFEKRTADGSEFESPKKKAKVE

SEQ ID NO: 711 - protein, 2174 aa, synthetic construct
MPAAKRVKLDGGDKKYSIGLDIGTNSVGWAVITDEYKVPSKKFKVLGNTDRHSIKKNLIGALLFDSGETAEATRLKRTARRRYTRRKNRICYLQEIFSNEMAKVDDSFFHRLEESFLVEEDKKHERHPIFGNIVDEVAYHEKYPTIYHLRKKLVDSTDKADLRLIYLALAHMIKFRGHFLIEGDLNPDNSDVDKLFIQLVQTYNQLFEENPINASGVDAKAILSARLSKSRRLENLIAQLPGEKKNGLFGNLIALSLGLTPNFKSNFDLAEDAKLQLSKDTYDDDLDNLLAQIGDQYADLFLAAKNLSDAILLSDILRVNTEITKAPLSASMIKRYDEHHQDLTLLKALVRQQLPEKYKEIFFDQSKNGYAGYIDGGASQEEFYKFIKPILEKMDGTEELLVKLNREDLLRKQRTFDNGSIPHQIHLGELHAILRRQEDFYPFLKDNREKIEKILTFRIPYYVGPLARGNSRFAWMTRKSEETITPWNFEEVVDKGASAQSFIERMTNFDKNLPNEKVLPKHSLLYEYFTVYNELTKVKYVTEGMRKPAFLSGEQKKAIVDLLFKTNRKVTVKQLKEDYFKKIECFDSVEISGVEDRFNASLGTYHDLLKIIKDKDFLDNEENEDILEDIVLTLTLFEDREMIEERLKTYAHLFDDKVMKQLKRRRYTGWGRLSRKLINGIRDKQSGKTILDFLKSDGFANRNFMQLIHDDSLTFKEDIQKAQVSGQGDSLHEHIANLAGSPAIKKGILQTVKVVDELVKVMGRHKPENIVIEMARENQTTQKGQKNSRERMKRIEEGIKELGSQILKEHPVENTQLQNEKLYLYYLQNGRDMYVDQELDINRLSDYDVDHIVPQSFLKDDSIDNKVLTRSDKARGKSDNVPSEEVVKKMKNYWRQLLNAKLITQRKFDNLTKAERGGLSELDKAGFIKRQLVETRQITKHVAQILDSRMNTKYDENDKLIREVKVITLKSKLVSDFRKDFQFYKVREINNYHHAHDAYLNAVVGTALIKKYPKLESEFVYGDYKVYDVRKMIAKSEQEIGKATAKYFFYSNIMNFFKTEITLANGEIRKRPLIETNGETGEIVWDKGRDFATVRKVLSMPQVNIVKKTEVQTGGFSKESILPKRNSDKLIARKKDWDPKKYGGFDSPTVAYSVLVVAKVEKGKSKKLKSVKELLGITIMERSSFEKNPIDFLEAKGYKEVKKDLIIKLPKYSLFELENGRKRMLASAGELQKGNELALPSKYVNFLYLASHYEKLKGSPEDNEQKQLFVEQHKHYLDEIIEQISEFSKRVILADANLDKVLSAYNKHRDKPIREQAENIIHLFTLTNLGAPAAFKYFDTTIDRKRYTSTKEVLDATLIHQSITGLYETRIDLSQLGGDGGGSSGGGGGSGGMNPLQLLQPLPAEVKGTKLLAHWNSGATITCIPESFLEDEQPIKQTLIKTIHGEKQQNVYYLTFKVKGRKVEAEVIASPYEYILLSPTDVPWLTQQPLQLTILVPLQEYQDRILNKTALPEEQKQQLKALFTKYDNLWQHWENQVGHRKIRPHNIATGDYPPRPQKQYPINPKAKPSIQIVIDDLLKQGVLTPQNSTMNTPVYPVPKPDGRWRMVLDYREVNKTIPLTAAQNQHSAGILATIVRQKYKTTLDLANGFWAHPITPDSYWLTAFTWQGKQYCWTRLPQGFLNSPALFNADAVDLLKEVPNVQVYVDDIYLSHDNPHEHIQQLEKVFQILLQAGYVVSLKKSEIGQRTVEFLGFNITKEGRGLTDTFKTKLLNVTPPKDLKQLQSILGLLNFARNFIPNFAELVQTLYNLIASSPGKYIEWTEDNTKQLNKVIEALNTASNLEERLPDQRLVIKVNTSPSAGYVRYYNESGKKPIMYLNYVFSKAELKFSMLEKLLTTMHKALIKAMDLAMGQEILVYSPIVSMTKIQKTPLPERKALPIRWITWMTYLEDPRIQFHYDKTLPELKHIPDVYTSSIPPLKHPSQYEGVFCTDGSAIKSPDPTKSNNAGMGIVHAIYNPEYKILNQWSIPLGHHTAQMAEIAAVEFACKKALKVPGPVLVITDSFYVAESANKELPYWKSNGFVNNKKEPLKHISKWKSIAECLSIKPDITIQHEKGHQPINTSIHTEGNALADKLATQGSYVVNAGKRTADGSEFEKRTADGSEFESPKKKAKVE

SEQ ID NO: 712 - protein, 2176 aa, synthetic construct
MPAAKRVKLDGGDKKYSIGLDIGTNSVGWAVITDEYKVPSKKFKVLGNTDRHSIKKNLIGALLFDSGETAEATRLKRTARRRYTRRKNRICYLQEIFSNEMAKVDDSFFHRLEESFLVEEDKKHERHPIFGNIVDEVAYHEKYPTIYHLRKKLVDSTDKADLRLIYLALAHMIKFRGHFLIEGDLNPDNSDVDKLFIQLVQTYNQLFEENPINASGVDAKAILSARLSKSRRLENLIAQLPGEKKNGLFGNLIALSLGLTPNFKSNFDLAEDAKLQLSKDTYDDDLDNLLAQIGDQYADLFLAAKNLSDAILLSDILRVNTEITKAPLSASMIKRYDEHHQDLTLLKALVRQQLPEKYKEIFFDQSKNGYAGYIDGGASQEEFYKFIKPILEKMDGTEELLVKLNREDLLRKQRTFDNGSIPHQIHLGELHAILRRQEDFYPFLKDNREKIEKILTFRIPYYVGPLARGNSRFAWMTRKSEETITPWNFEEVVDKGASAQSFIERMTNFDKNLPNEKVLPKHSLLYEYFTVYNELTKVKYVTEGMRKPAFLSGEQKKAIVDLLFKTNRKVTVKQLKEDYFKKIECFDSVEISGVEDRFNASLGTYHDLLKIIKDKDFLDNEENEDILEDIVLTLTLFEDREMIEERLKTYAHLFDDKVMKQLKRRRYTGWGRLSRKLINGIRDKQSGKTILDFLKSDGFANRNFMQLIHDDSLTFKEDIQKAQVSGQGDSLHEHIANLAGSPAIKKGILQTVKVVDELVKVMGRHKPENIVIEMARENQTTQKGQKNSRERMKRIEEGIKELGSQILKEHPVENTQLQNEKLYLYYLQNGRDMYVDQELDINRLSDYDVDHIVPQSFLKDDSIDNKVLTRSDKARGKSDNVPSEEVVKKMKNYWRQLLNAKLITQRKFDNLTKAERGGLSELDKAGFIKRQLVETRQITKHVAQILDSRMNTKYDENDKLIREVKVITLKSKLVSDFRKDFQFYKVREINNYHHAHDAYLNAVVGTALIKKYPKLESEFVYGDYKVYDVRKMIAKSEQEIGKATAKYFFYSNIMNFFKTEITLANGEIRKRPLIETNGETGEIVWDKGRDFATVRKVLSMPQVNIVKKTEVQTGGFSKESILPKRNSDKLIARKKDWDPKKYGGFDSPTVAYSVLVVAKVEKGKSKKLKSVKELLGITIMERSSFEKNPIDFLEAKGYKEVKKDLIIKLPKYSLFELENGRKRMLASAGELQKGNELALPSKYVNFLYLASHYEKLKGSPEDNEQKQLFVEQHKHYLDEIIEQISEFSKRVILADANLDKVLSAYNKHRDKPIREQAENIIHLFTLTNLGAPAAFKYFDTTIDRKRYTSTKEVLDATLIHQSITGLYETRIDLSQLGGDGGGSSGGSEAAAKGGMNPLQLLQPLPAEVKGTKLLAHWNSGATITCIPESFLEDEQPIKQTLIKTIHGEKQQNVYYLTFKVKGRKVEAEVIASPYEYILLSPTDVPWLTQQPLQLTILVPLQEYQDRILNKTALPEEQKQQLKALFTKYDNLWQHWENQVGHRKIRPHNIATGDYPPRPQKQYPINPKAKPSIQIVIDDLLKQGVLTPQNSTMNTPVYPVPKPDGRWRMVLDYREVNKTIPLTAAQNQHSAGILATIVRQKYKTTLDLANGFWAHPITPDSYWLTAFTWQGKQYCWTRLPQGFLNSPALFNADAVDLLKEVPNVQVYVDDIYLSHDNPHEHIQQLEKVFQILLQAGYVVSLKKSEIGQRTVEFLGFNITKEGRGLTDTFKTKLLNVTPPKDLKQLQSILGLLNFARNFIPNFAELVQTLYNLIASSPGKYIEWTEDNTKQLNKVIEALNTASNLEERLPDQRLVIKVNTSPSAGYVRYYNESGKKPIMYLNYVFSKAELKFSMLEKLLTTMHKALIKAMDLAMGQEILVYSPIVSMTKIQKTPLPERKALPIRWITWMTYLEDPRIQFHYDKTLPELKHIPDVYTSSIPPLKHPSQYEGVFCTDGSAIKSPDPTKSNNAGMGIVHAIYNPEYKILNQWSIPLGHHTAQMAEIAAVEFACKKALKVPGPVLVITDSFYVAESANKELPYWKSNGFVNNKKEPLKHISKWKSIAECLSIKPDITIQHEKGHQPINTSIHTEGNALADKLATQGSYVVNAGKRTADGSEFEKRTADGSEFESPKKKAKVE

SEQ ID NO: 713 - protein, 2181 aa, synthetic construct
MPAAKRVKLDGGDKKYSIGLDIGTNSVGWAVITDEYKVPSKKFKVLGNTDRHSIKKNLIGALLFDSGETAEATRLKRTARRRYTRRKNRICYLQEIFSNEMAKVDDSFFHRLEESFLVEEDKKHERHPIFGNIVDEVAYHEKYPTIYHLRKKLVDSTDKADLRLIYLALAHMIKFRGHFLIEGDLNPDNSDVDKLFIQLVQTYNQLFEENPINASGVDAKAILSARLSKSRRLENLIAQLPGEKKNGLFGNLIALSLGLTPNFKSNFDLAEDAKLQLSKDTYDDDLDNLLAQIGDQYADLFLAAKNLSDAILLSDILRVNTEITKAPLSASMIKRYDEHHQDLTLLKALVRQQLPEKYKEIFFDQSKNGYAGYIDGGASQEEFYKFIKPILEKMDGTEELLVKLNREDLLRKQRTFDNGSIPHQIHLGELHAILRRQEDFYPFLKDNREKIEKILTFRIPYYVGPLARGNSRFAWMTRKSEETITPWNFEEVVDKGASAQSFIERMTNFDKNLPNEKVLPKHSLLYEYFTVYNELTKVKYVTEGMRKPAFLSGEQKKAIVDLLFKTNRKVTVKQLKEDYFKKIECFDSVEISGVEDRFNASLGTYHDLLKIIKDKDFLDNEENEDILEDIVLTLTLFEDREMIEERLKTYAHLFDDKVMKQLKRRRYTGWGRLSRKLINGIRDKQSGKTILDFLKSDGFANRNFMQLIHDDSLTFKEDIQKAQVSGQGDSLHEHIANLAGSPAIKKGILQTVKVVDELVKVMGRHKPENIVIEMARENQTTQKGQKNSRERMKRIEEGIKELGSQILKEHPVENTQLQNEKLYLYYLQNGRDMYVDQELDINRLSDYDVDHIVPQSFLKDDSIDNKVLTRSDKARGKSDNVPSEEVVKKMKNYWRQLLNAKLITQRKFDNLTKAERGGLSELDKAGFIKRQLVETRQITKHVAQILDSRMNTKYDENDKLIREVKVITLKSKLVSDFRKDFQFYKVREINNYHHAHDAYLNAVVGTALIKKYPKLESEFVYGDYKVYDVRKMIAKSEQEIGKATAKYFFYSNIMNFFKTEITLANGEIRKRPLIETNGETGEIVWDKGRDFATVRKVLSMPQVNIVKKTEVQTGGFSKESILPKRNSDKLIARKKDWDPKKYGGFDSPTVAYSVLVVAKVEKGKSKKLKSVKELLGITIMERSSFEKNPIDFLEAKGYKEVKKDLIIKLPKYSLFELENGRKRMLASAGELQKGNELALPSKYVNFLYLASHYEKLKGSPEDNEQKQLFVEQHKHYLDEIIEQISEFSKRVILADANLDKVLSAYNKHRDKPIREQAENIIHLFTLTNLGAPAAFKYFDTTIDRKRYTSTKEVLDATLIHQSITGLYETRIDLSQLGGDGGSGSETPGTSESATPESGGMNPLQLLQPLPAEVKGTKLLAHWNSGATITCIPESFLEDEQPIKQTLIKTIHGEKQQNVYYLTFKVKGRKVEAEVIASPYEYILLSPTDVPWLTQQPLQLTILVPLQEYQDRILNKTALPEEQKQQLKALFTKYDNLWQHWENQVGHRKIRPHNIATGDYPPRPQKQYPINPKAKPSIQIVIDDLLKQGVLTPQNSTMNTPVYPVPKPDGRWRMVLDYREVNKTIPLTAAQNQHSAGILATIVRQKYKTTLDLANGFWAHPITPDSYWLTAFTWQGKQYCWTRLPQGFLNSPALFNADAVDLLKEVPNVQVYVDDIYLSHDNPHEHIQQLEKVFQILLQAGYVVSLKKSEIGQRTVEFLGFNITKEGRGLTDTFKTKLLNVTPPKDLKQLQSILGLLNFARNFIPNFAELVQTLYNLIASSPGKYIEWTEDNTKQLNKVIEALNTASNLEERLPDQRLVIKVNTSPSAGYVRYYNESGKKPIMYLNYVFSKAELKFSMLEKLLTTMHKALIKAMDLAMGQEILVYSPIVSMTKIQKTPLPERKALPIRWITWMTYLEDPRIQFHYDKTLPELKHIPDVYTSSIPPLKHPSQYEGVFCTDGSAIKSPDPTKSNNAGMGIVHAIYNPEYKILNQWSIPLGHHTAQMAEIAAVEFACKKALKVPGPVLVITDSFYVAESANKELPYWKSNGFVNNKKEPLKHISKWKSIAECLSIKPDITIQHEKGHQPINTSIHTEGNALADKLATQGSYVVNAGKRTADGSEFEKRTADGSEFESPKKKAKVE

SEQ ID NO: 714 - protein, 2176 aa, synthetic construct
MPAAKRVKLDGGDKKYSIGLDIGTNSVGWAVITDEYKVPSKKFKVLGNTDRHSIKKNLIGALLFDSGETAEATRLKRTARRRYTRRKNRICYLQEIFSNEMAKVDDSFFHRLEESFLVEEDKKHERHPIFGNIVDEVAYHEKYPTIYHLRKKLVDSTDKADLRLIYLALAHMIKFRGHFLIEGDLNPDNSDVDKLFIQLVQTYNQLFEENPINASGVDAKAILSARLSKSRRLENLIAQLPGEKKNGLFGNLIALSLGLTPNFKSNFDLAEDAKLQLSKDTYDDDLDNLLAQIGDQYADLFLAAKNLSDAILLSDILRVNTEITKAPLSASMIKRYDEHHQDLTLLKALVRQQLPEKYKEIFFDQSKNGYAGYIDGGASQEEFYKFIKPILEKMDGTEELLVKLNREDLLRKQRTFDNGSIPHQIHLGELHAILRRQEDFYPFLKDNREKIEKILTFRIPYYVGPLARGNSRFAWMTRKSEETITPWNFEEVVDKGASAQSFIERMTNFDKNLPNEKVLPKHSLLYEYFTVYNELTKVKYVTEGMRKPAFLSGEQKKAIVDLLFKTNRKVTVKQLKEDYFKKIECFDSVEISGVEDRFNASLGTYHDLLKIIKDKDFLDNEENEDILEDIVLTLTLFEDREMIEERLKTYAHLFDDKVMKQLKRRRYTGWGRLSRKLINGIRDKQSGKTILDFLKSDGFANRNFMQLIHDDSLTFKEDIQKAQVSGQGDSLHEHIANLAGSPAIKKGILQTVKVVDELVKVMGRHKPENIVIEMARENQTTQKGQKNSRERMKRIEEGIKELGSQILKEHPVENTQLQNEKLYLYYLQNGRDMYVDQELDINRLSDYDVDHIVPQSFLKDDSIDNKVLTRSDKARGKSDNVPSEEVVKKMKNYWRQLLNAKLITQRKFDNLTKAERGGLSELDKAGFIKRQLVETRQITKHVAQILDSRMNTKYDENDKLIREVKVITLKSKLVSDFRKDFQFYKVREINNYHHAHDAYLNAVVGTALIKKYPKLESEFVYGDYKVYDVRKMIAKSEQEIGKATAKYFFYSNIMNFFKTEITLANGEIRKRPLIETNGETGEIVWDKGRDFATVRKVLSMPQVNIVKKTEVQTGGFSKESILPKRNSDKLIARKKDWDPKKYGGFDSPTVAYSVLVVAKVEKGKSKKLKSVKELLGITIMERSSFEKNPIDFLEAKGYKEVKKDLIIKLPKYSLFELENGRKRMLASAGELQKGNELALPSKYVNFLYLASHYEKLKGSPEDNEQKQLFVEQHKHYLDEIIEQISEFSKRVILADANLDKVLSAYNKHRDKPIREQAENIIHLFTLTNLGAPAAFKYFDTTIDRKRYTSTKEVLDATLIHQSITGLYETRIDLSQLGGDGGGGSEAAAKPAPGGMNPLQLLQPLPAEVKGTKLLAHWNSGATITCIPESFLEDEQPIKQTLIKTIHGEKQQNVYYLTFKVKGRKVEAEVIASPYEYILLSPTDVPWLTQQPLQLTILVPLQEYQDRILNKTALPEEQKQQLKALFTKYDNLWQHWENQVGHRKIRPHNIATGDYPPRPQKQYPINPKAKPSIQIVIDDLLKQGVLTPQNSTMNTPVYPVPKPDGRWRMVLDYREVNKTIPLTAAQNQHSAGILATIVRQKYKTTLDLANGFWAHPITPDSYWLTAFTWQGKQYCWTRLPQGFLNSPALFNADAVDLLKEVPNVQVYVDDIYLSHDNPHEHIQQLEKVFQILLQAGYVVSLKKSEIGQRTVEFLGFNITKEGRGLTDTFKTKLLNVTPPKDLKQLQSILGLLNFARNFIPNFAELVQTLYNLIASSPGKYIEWTEDNTKQLNKVIEALNTASNLEERLPDQRLVIKVNTSPSAGYVRYYNESGKKPIMYLNYVFSKAELKFSMLEKLLTTMHKALIKAMDLAMGQEILVYSPIVSMTKIQKTPLPERKALPIRWITWMTYLEDPRIQFHYDKTLPELKHIPDVYTSSIPPLKHPSQYEGVFCTDGSAIKSPDPTKSNNAGMGIVHAIYNPEYKILNQWSIPLGHHTAQMAEIAAVEFACKKALKVPGPVLVITDSFYVAESANKELPYWKSNGFVNNKKEPLKHISKWKSIAECLSIKPDITIQHEKGHQPINTSIHTEGNALADKLATQGSYVVNAGKRTADGSEFEKRTADGSEFESPKKKAKVE

SEQ ID NO: 715 - protein, 2208 aa, synthetic construct
MPAAKRVKLDGGDKKYSIGLDIGTNSVGWAVITDEYKVPSKKFKVLGNTDRHSIKKNLIGALLFDSGETAEATRLKRTARRRYTRRKNRICYLQEIFSNEMAKVDDSFFHRLEESFLVEEDKKHERHPIFGNIVDEVAYHEKYPTIYHLRKKLVDSTDKADLRLIYLALAHMIKFRGHFLIEGDLNPDNSDVDKLFIQLVQTYNQLFEENPINASGVDAKAILSARLSKSRRLENLIAQLPGEKKNGLFGNLIALSLGLTPNFKSNFDLAEDAKLQLSKDTYDDDLDNLLAQIGDQYADLFLAAKNLSDAILLSDILRVNTEITKAPLSASMIKRYDEHHQDLTLLKALVRQQLPEKYKEIFFDQSKNGYAGYIDGGASQEEFYKFIKPILEKMDGTEELLVKLNREDLLRKQRTFDNGSIPHQIHLGELHAILRRQEDFYPFLKDNREKIEKILTFRIPYYVGPLARGNSRFAWMTRKSEETITPWNFEEVVDKGASAQSFIERMTNFDKNLPNEKVLPKHSLLYEYFTVYNELTKVKYVTEGMRKPAFLSGEQKKAIVDLLFKTNRKVTVKQLKEDYFKKIECFDSVEISGVEDRFNASLGTYHDLLKIIKDKDFLDNEENEDILEDIVLTLTLFEDREMIEERLKTYAHLFDDKVMKQLKRRRYTGWGRLSRKLINGIRDKQSGKTILDFLKSDGFANRNFMQLIHDDSLTFKEDIQKAQVSGQGDSLHEHIANLAGSPAIKKGILQTVKVVDELVKVMGRHKPENIVIEMARENQTTQKGQKNSRERMKRIEEGIKELGSQILKEHPVENTQLQNEKLYLYYLQNGRDMYVDQELDINRLSDYDVDHIVPQSFLKDDSIDNKVLTRSDKARGKSDNVPSEEVVKKMKNYWRQLLNAKLITQRKFDNLTKAERGGLSELDKAGFIKRQLVETRQITKHVAQILDSRMNTKYDENDKLIREVKVITLKSKLVSDFRKDFQFYKVREINNYHHAHDAYLNAVVGTALIKKYPKLESEFVYGDYKVYDVRKMIAKSEQEIGKATAKYFFYSNIMNFFKTEITLANGEIRKRPLIETNGETGEIVWDKGRDFATVRKVLSMPQVNIVKKTEVQTGGFSKESILPKRNSDKLIARKKDWDPKKYGGFDSPTVAYSVLVVAKVEKGKSKKLKSVKELLGITIMERSSFEKNPIDFLEAKGYKEVKKDLIIKLPKYSLFELENGRKRMLASAGELQKGNELALPSKYVNFLYLASHYEKLKGSPEDNEQKQLFVEQHKHYLDEIIEQISEFSKRVILADANLDKVLSAYNKHRDKPIREQAENIIHLFTLTNLGAPAAFKYFDTTIDRKRYTSTKEVLDATLIHQSITGLYETRIDLSQLGGDGGAEAAAKEAAAKEAAAKEAAAKALEAEAAAKEAAAKEAAAKEAAAKAGGMDLLKPLTVERKGVKIKGYWNSQADITCVPKDLLQGEEPVRQQNVTTIHGTQEGDVYYVNLKIDGRRINTEVIGTTLDYAIITPGDVPWILKKPLELTIKLDLEEQQGTLLNNSILSKKGKEELKQLFEKYSALWQSWENQVGHRRIRPHKIATGTVKPTPQKQYHINPKAKPDIQIVINDLLKQGVLIQKESTMNTPVYPVPKPNGRWRMVLDYRAVNKVTPLIAVQNQHSYGILGSLFKGRYKTTIDLSNGFWAHPIVPEDYWITAFTWQGKQYCWTVLPQGFLNSPGLFTGDVVDLLQGIPNVEVYVDDVYISHDSEKEHLEYLDILFNRLKEAGYIISLKKSNIANSIVDFLGFQITNEGRGLTDTFKEKLENITAPTTLKQLQSILGLLNFARNFIPDFTELIAPLYALIPKSTKNYVPWQIEHSTTLETLITKLNGAEYLQGRKGDKTLIMKVNASYTTGYIRYYNEGEKKPISYVSIVFSKTELKFTELEKLLTTVHKGLLKALDLSMGQNIHVYSPIVSMQNIQKTPQTAKKALASRWLSWLSYLEDPRIRFFYDPQMPALKDLPAVDTGKDNKKHPSNFQHIFYTDGSAITSPTKEGHLNAGMGIVYFINKDGNLQKQQEWSISLGNHTAQFAEIAAFEFALKKCLPLGGNILVVTDSNYVAKAYNEELDVWASNGFVNNRKKPLKHISKWKSVADLKRLRPDVVVTHEPGHQKLDSSPHAYGNNLADQLATQASFKVHAGKRTADGSEFEKRTADGSEFESPKKKAKVE

SEQ ID NO: 716 - protein, 2192 aa, synthetic construct
MPAAKRVKLDGGDKKYSIGLDIGTNSVGWAVITDEYKVPSKKFKVLGNTDRHSIKKNLIGALLFDSGETAEATRLKRTARRRYTRRKNRICYLQEIFSNEMAKVDDSFFHRLEESFLVEEDKKHERHPIFGNIVDEVAYHEKYPTIYHLRKKLVDSTDKADLRLIYLALAHMIKFRGHFLIEGDLNPDNSDVDKLFIQLVQTYNQLFEENPINASGVDAKAILSARLSKSRRLENLIAQLPGEKKNGLFGNLIALSLGLTPNFKSNFDLAEDAKLQLSKDTYDDDLDNLLAQIGDQYADLFLAAKNLSDAILLSDILRVNTEITKAPLSASMIKRYDEHHQDLTLLKALVRQQLPEKYKEIFFDQSKNGYAGYIDGGASQEEFYKFIKPILEKMDGTEELLVKLNREDLLRKQRTFDNGSIPHQIHLGELHAILRRQEDFYPFLKDNREKIEKILTFRIPYYVGPLARGNSRFAWMTRKSEETITPWNFEEVVDKGASAQSFIERMTNFDKNLPNEKVLPKHSLLYEYFTVYNELTKVKYVTEGMRKPAFLSGEQKKAIVDLLFKTNRKVTVKQLKEDYFKKIECFDSVEISGVEDRFNASLGTYHDLLKIIKDKDFLDNEENEDILEDIVLTLTLFEDREMIEERLKTYAHLFDDKVMKQLKRRRYTGWGRLSRKLINGIRDKQSGKTILDFLKSDGFANRNFMQLIHDDSLTFKEDIQKAQVSGQGDSLHEHIANLAGSPAIKKGILQTVKVVDELVKVMGRHKPENIVIEMARENQTTQKGQKNSRERMKRIEEGIKELGSQILKEHPVENTQLQNEKLYLYYLQNGRDMYVDQELDINRLSDYDVDHIVPQSFLKDDSIDNKVLTRSDKARGKSDNVPSEEVVKKMKNYWRQLLNAKLITQRKFDNLTKAERGGLSELDKAGFIKRQLVETRQITKHVAQILDSRMNTKYDENDKLIREVKVITLKSKLVSDFRKDFQFYKVREINNYHHAHDAYLNAVVGTALIKKYPKLESEFVYGDYKVYDVRKMIAKSEQEIGKATAKYFFYSNIMNFFKTEITLANGEIRKRPLIETNGETGEIVWDKGRDFATVRKVLSMPQVNIVKKTEVQTGGFSKESILPKRNSDKLIARKKDWDPKKYGGFDSPTVAYSVLVVAKVEKGKSKKLKSVKELLGITIMERSSFEKNPIDFLEAKGYKEVKKDLIIKLPKYSLFELENGRKRMLASAGELQKGNELALPSKYVNFLYLASHYEKLKGSPEDNEQKQLFVEQHKHYLDEIIEQISEFSKRVILADANLDKVLSAYNKHRDKPIREQAENIIHLFTLTNLGAPAAFKYFDTTIDRKRYTSTKEVLDATLIHQSITGLYETRIDLSQLGGDGGGGGGSGGGGSGGGGSGGGGSGGGGSGGGGSGGMDLLKPLTVERKGVKIKGYWNSQADITCVPKDLLQGEEPVRQQNVTTIHGTQEGDVYYVNLKIDGRRINTEVIGTTLDYAIITPGDVPWILKKPLELTIKLDLEEQQGTLLNNSILSKKGKEELKQLFEKYSALWQSWENQVGHRRIRPHKIATGTVKPTPQKQYHINPKAKPDIQIVINDLLKQGVLIQKESTMNTPVYPVPKPNGRWRMVLDYRAVNKVTPLIAVQNQHSYGILGSLFKGRYKTTIDLSNGFWAHPIVPEDYWITAFTWQGKQYCWTVLPQGFLNSPGLFTGDVVDLLQGIPNVEVYVDDVYISHDSEKEHLEYLDILFNRLKEAGYIISLKKSNIANSIVDFLGFQITNEGRGLTDTFKEKLENITAPTTLKQLQSILGLLNFARNFIPDFTELIAPLYALIPKSTKNYVPWQIEHSTTLETLITKLNGAEYLQGRKGDKTLIMKVNASYTTGYIRYYNEGEKKPISYVSIVFSKTELKFTELEKLLTTVHKGLLKALDLSMGQNIHVYSPIVSMQNIQKTPQTAKKALASRWLSWLSYLEDPRIRFFYDPQMPALKDLPAVDTGKDNKKHPSNFQHIFYTDGSAITSPTKEGHLNAGMGIVYFINKDGNLQKQQEWSISLGNHTAQFAEIAAFEFALKKCLPLGGNILVVTDSNYVAKAYNEELDVWASNGFVNNRKKPLKHISKWKSVADLKRLRPDVVVTHEPGHQKLDSSPHAYGNNLADQLATQASFKVHAGKRTADGSEFEKRTADGSEFESPKKKAKVE

SEQ ID NO: 717 - protein, 2171 aa, synthetic construct
MPAAKRVKLDGGDKKYSIGLDIGTNSVGWAVITDEYKVPSKKFKVLGNTDRHSIKKNLIGALLFDSGETAEATRLKRTARRRYTRRKNRICYLQEIFSNEMAKVDDSFFHRLEESFLVEEDKKHERHPIFGNIVDEVAYHEKYPTIYHLRKKLVDSTDKADLRLIYLALAHMIKFRGHFLIEGDLNPDNSDVDKLFIQLVQTYNQLFEENPINASGVDAKAILSARLSKSRRLENLIAQLPGEKKNGLFGNLIALSLGLTPNFKSNFDLAEDAKLQLSKDTYDDDLDNLLAQIGDQYADLFLAAKNLSDAILLSDILRVNTEITKAPLSASMIKRYDEHHQDLTLLKALVRQQLPEKYKEIFFDQSKNGYAGYIDGGASQEEFYKFIKPILEKMDGTEELLVKLNREDLLRKQRTFDNGSIPHQIHLGELHAILRRQEDFYPFLKDNREKIEKILTFRIPYYVGPLARGNSRFAWMTRKSEETITPWNFEEVVDKGASAQSFIERMTNFDKNLPNEKVLPKHSLLYEYFTVYNELTKVKYVTEGMRKPAFLSGEQKKAIVDLLFKTNRKVTVKQLKEDYFKKIECFDSVEISGVEDRFNASLGTYHDLLKIIKDKDFLDNEENEDILEDIVLTLTLFEDREMIEERLKTYAHLFDDKVMKQLKRRRYTGWGRLSRKLINGIRDKQSGKTILDFLKSDGFANRNFMQLIHDDSLTFKEDIQKAQVSGQGDSLHEHIANLAGSPAIKKGILQTVKVVDELVKVMGRHKPENIVIEMARENQTTQKGQKNSRERMKRIEEGIKELGSQILKEHPVENTQLQNEKLYLYYLQNGRDMYVDQELDINRLSDYDVDHIVPQSFLKDDSIDNKVLTRSDKARGKSDNVPSEEVVKKMKNYWRQLLNAKLITQRKFDNLTKAERGGLSELDKAGFIKRQLVETRQITKHVAQILDSRMNTKYDENDKLIREVKVITLKSKLVSDFRKDFQFYKVREINNYHHAHDAYLNAVVGTALIKKYPKLESEFVYGDYKVYDVRKMIAKSEQEIGKATAKYFFYSNIMNFFKTEITLANGEIRKRPLIETNGETGEIVWDKGRDFATVRKVLSMPQVNIVKKTEVQTGGFSKESILPKRNSDKLIARKKDWDPKKYGGFDSPTVAYSVLVVAKVEKGKSKKLKSVKELLGITIMERSSFEKNPIDFLEAKGYKEVKKDLIIKLPKYSLFELENGRKRMLASAGELQKGNELALPSKYVNFLYLASHYEKLKGSPEDNEQKQLFVEQHKHYLDEIIEQISEFSKRVILADANLDKVLSAYNKHRDKPIREQAENIIHLFTLTNLGAPAAFKYFDTTIDRKRYTSTKEVLDATLIHQSITGLYETRIDLSQLGGDGGGSSGGSPAPGGMDLLKPLTVERKGVKIKGYWNSQADITCVPKDLLQGEEPVRQQNVTTIHGTQEGDVYYVNLKIDGRRINTEVIGTTLDYAIITPGDVPWILKKPLELTIKLDLEEQQGTLLNNSILSKKGKEELKQLFEKYSALWQSWENQVGHRRIRPHKIATGTVKPTPQKQYHINPKAKPDIQIVINDLLKQGVLIQKESTMNTPVYPVPKPNGRWRMVLDYRAVNKVTPLIAVQNQHSYGILGSLFKGRYKTTIDLSNGFWAHPIVPEDYWITAFTWQGKQYCWTVLPQGFLNSPGLFTGDVVDLLQGIPNVEVYVDDVYISHDSEKEHLEYLDILFNRLKEAGYIISLKKSNIANSIVDFLGFQITNEGRGLTDTFKEKLENITAPTTLKQLQSILGLLNFARNFIPDFTELIAPLYALIPKSTKNYVPWQIEHSTTLETLITKLNGAEYLQGRKGDKTLIMKVNASYTTGYIRYYNEGEKKPISYVSIVFSKTELKFTELEKLLTTVHKGLLKALDLSMGQNIHVYSPIVSMQNIQKTPQTAKKALASRWLSWLSYLEDPRIRFFYDPQMPALKDLPAVDTGKDNKKHPSNFQHIFYTDGSAITSPTKEGHLNAGMGIVYFINKDGNLQKQQEWSISLGNHTAQFAEIAAFEFALKKCLPLGGNILVVTDSNYVAKAYNEELDVWASNGFVNNRKKPLKHISKWKSVADLKRLRPDVVVTHEPGHQKLDSSPHAYGNNLADQLATQASFKVHAGKRTADGSEFEKRTADGSEFESPKKKAKVE

SEQ ID NO: 718 - protein, 2177 aa, synthetic construct
MPAAKRVKLDGGDKKYSIGLDIGTNSVGWAVITDEYKVPSKKFKVLGNTDRHSIKKNLIGALLFDSGETAEATRLKRTARRRYTRRKNRICYLQEIFSNEMAKVDDSFFHRLEESFLVEEDKKHERHPIFGNIVDEVAYHEKYPTIYHLRKKLVDSTDKADLRLIYLALAHMIKFRGHFLIEGDLNPDNSDVDKLFIQLVQTYNQLFEENPINASGVDAKAILSARLSKSRRLENLIAQLPGEKKNGLFGNLIALSLGLTPNFKSNFDLAEDAKLQLSKDTYDDDLDNLLAQIGDQYADLFLAAKNLSDAILLSDILRVNTEITKAPLSASMIKRYDEHHQDLTLLKALVRQQLPEKYKEIFFDQSKNGYAGYIDGGASQEEFYKFIKPILEKMDGTEELLVKLNREDLLRKQRTFDNGSIPHQIHLGELHAILRRQEDFYPFLKDNREKIEKILTFRIPYYVGPLARGNSRFAWMTRKSEETITPWNFEEVVDKGASAQSFIERMTNFDKNLPNEKVLPKHSLLYEYFTVYNELTKVKYVTEGMRKPAFLSGEQKKAIVDLLFKTNRKVTVKQLKEDYFKKIECFDSVEISGVEDRFNASLGTYHDLLKIIKDKDFLDNEENEDILEDIVLTLTLFEDREMIEERLKTYAHLFDDKVMKQLKRRRYTGWGRLSRKLINGIRDKQSGKTILDFLKSDGFANRNFMQLIHDDSLTFKEDIQKAQVSGQGDSLHEHIANLAGSPAIKKGILQTVKVVDELVKVMGRHKPENIVIEMARENQTTQKGQKNSRERMKRIEEGIKELGSQILKEHPVENTQLQNEKLYLYYLQNGRDMYVDQELDINRLSDYDVDHIVPQSFLKDDSIDNKVLTRSDKARGKSDNVPSEEVVKKMKNYWRQLLNAKLITQRKFDNLTKAERGGLSELDKAGFIKRQLVETRQITKHVAQILDSRMNTKYDENDKLIREVKVITLKSKLVSDFRKDFQFYKVREINNYHHAHDAYLNAVVGTALIKKYPKLESEFVYGDYKVYDVRKMIAKSEQEIGKATAKYFFYSNIMNFFKTEITLANGEIRKRPLIETNGETGEIVWDKGRDFATVRKVLSMPQVNIVKKTEVQTGGFSKESILPKRNSDKLIARKKDWDPKKYGGFDSPTVAYSVLVVAKVEKGKSKKLKSVKELLGITIMERSSFEKNPIDFLEAKGYKEVKKDLIIKLPKYSLFELENGRKRMLASAGELQKGNELALPSKYVNFLYLASHYEKLKGSPEDNEQKQLFVEQHKHYLDEIIEQISEFSKRVILADANLDKVLSAYNKHRDKPIREQAENIIHLFTLTNLGAPAAFKYFDTTIDRKRYTSTKEVLDATLIHQSITGLYETRIDLSQLGGDGGEAAAKEAAAKEAAAKGGMDLLKPLTVERKGVKIKGYWNSQADITCVPKDLLQGEEPVRQQNVTTIHGTQEGDVYYVNLKIDGRRINTEVIGTTLDYAIITPGDVPWILKKPLELTIKLDLEEQQGTLLNNSILSKKGKEELKQLFEKYSALWQSWENQVGHRRIRPHKIATGTVKPTPQKQYHINPKAKPDIQIVINDLLKQGVLIQKESTMNTPVYPVPKPNGRWRMVLDYRAVNKVTPLIAVQNQHSYGILGSLFKGRYKTTIDLSNGFWAHPIVPEDYWITAFTWQGKQYCWTVLPQGFLNSPGLFTGDVVDLLQGIPNVEVYVDDVYISHDSEKEHLEYLDILFNRLKEAGYIISLKKSNIANSIVDFLGFQITNEGRGLTDTFKEKLENITAPTTLKQLQSILGLLNFARNFIPDFTELIAPLYALIPKSTKNYVPWQIEHSTTLETLITKLNGAEYLQGRKGDKTLIMKVNASYTTGYIRYYNEGEKKPISYVSIVFSKTELKFTELEKLLTTVHKGLLKALDLSMGQNIHVYSPIVSMQNIQKTPQTAKKALASRWLSWLSYLEDPRIRFFYDPQMPALKDLPAVDTGKDNKKHPSNFQHIFYTDGSAITSPTKEGHLNAGMGIVYFINKDGNLQKQQEWSISLGNHTAQFAEIAAFEFALKKCLPLGGNILVVTDSNYVAKAYNEELDVWASNGFVNNRKKPLKHISKWKSVADLKRLRPDVVVTHEPGHQKLDSSPHAYGNNLADQLATQASFKVHAGKRTADGSEFEKRTADGSEFESPKKKAKVE

SEQ ID NO: 719 - protein, 2177 aa, synthetic construct
MPAAKRVKLDGGDKKYSIGLDIGTNSVGWAVITDEYKVPSKKFKVLGNTDRHSIKKNLIGALLFDSGETAEATRLKRTARRRYTRRKNRICYLQEIFSNEMAKVDDSFFHRLEESFLVEEDKKHERHPIFGNIVDEVAYHEKYPTIYHLRKKLVDSTDKADLRLIYLALAHMIKFRGHFLIEGDLNPDNSDVDKLFIQLVQTYNQLFEENPINASGVDAKAILSARLSKSRRLENLIAQLPGEKKNGLFGNLIALSLGLTPNFKSNFDLAEDAKLQLSKDTYDDDLDNLLAQIGDQYADLFLAAKNLSDAILLSDILRVNTEITKAPLSASMIKRYDEHHQDLTLLKALVRQQLPEKYKEIFFDQSKNGYAGYIDGGASQEEFYKFIKPILEKMDGTEELLVKLNREDLLRKQRTFDNGSIPHQIHLGELHAILRRQEDFYPFLKDNREKIEKILTFRIPYYVGPLARGNSRFAWMTRKSEETITPWNFEEVVDKGASAQSFIERMTNFDKNLPNEKVLPKHSLLYEYFTVYNELTKVKYVTEGMRKPAFLSGEQKKAIVDLLFKTNRKVTVKQLKEDYFKKIECFDSVEISGVEDRFNASLGTYHDLLKIIKDKDFLDNEENEDILEDIVLTLTLFEDREMIEERLKTYAHLFDDKVMKQLKRRRYTGWGRLSRKLINGIRDKQSGKTILDFLKSDGFANRNFMQLIHDDSLTFKEDIQKAQVSGQGDSLHEHIANLAGSPAIKKGILQTVKVVDELVKVMGRHKPENIVIEMARENQTTQKGQKNSRERMKRIEEGIKELGSQILKEHPVENTQLQNEKLYLYYLQNGRDMYVDQELDINRLSDYDVDHIVPQSFLKDDSIDNKVLTRSDKARGKSDNVPSEEVVKKMKNYWRQLLNAKLITQRKFDNLTKAERGGLSELDKAGFIKRQLVETRQITKHVAQILDSRMNTKYDENDKLIREVKVITLKSKLVSDFRKDFQFYKVREINNYHHAHDAYLNAVVGTALIKKYPKLESEFVYGDYKVYDVRKMIAKSEQEIGKATAKYFFYSNIMNFFKTEITLANGEIRKRPLIETNGETGEIVWDKGRDFATVRKVLSMPQVNIVKKTEVQTGGFSKESILPKRNSDKLIARKKDWDPKKYGGFDSPTVAYSVLVVAKVEKGKSKKLKSVKELLGITIMERSSFEKNPIDFLEAKGYKEVKKDLIIKLPKYSLFELENGRKRMLASAGELQKGNELALPSKYVNFLYLASHYEKLKGSPEDNEQKQLFVEQHKHYLDEIIEQISEFSKRVILADANLDKVLSAYNKHRDKPIREQAENIIHLFTLTNLGAPAAFKYFDTTIDRKRYTSTKEVLDATLIHQSITGLYETRIDLSQLGGDGGGSSGSSGSSGSSGSSGGMDLLKPLTVERKGVKIKGYWNSQADITCVPKDLLQGEEPVRQQNVTTIHGTQEGDVYYVNLKIDGRRINTEVIGTTLDYAIITPGDVPWILKKPLELTIKLDLEEQQGTLLNNSILSKKGKEELKQLFEKYSALWQSWENQVGHRRIRPHKIATGTVKPTPQKQYHINPKAKPDIQIVINDLLKQGVLIQKESTMNTPVYPVPKPNGRWRMVLDYRAVNKVTPLIAVQNQHSYGILGSLFKGRYKTTIDLSNGFWAHPIVPEDYWITAFTWQGKQYCWTVLPQGFLNSPGLFTGDVVDLLQGIPNVEVYVDDVYISHDSEKEHLEYLDILFNRLKEAGYIISLKKSNIANSIVDFLGFQITNEGRGLTDTFKEKLENITAPTTLKQLQSILGLLNFARNFIPDFTELIAPLYALIPKSTKNYVPWQIEHSTTLETLITKLNGAEYLQGRKGDKTLIMKVNASYTTGYIRYYNEGEKKPISYVSIVFSKTELKFTELEKLLTTVHKGLLKALDLSMGQNIHVYSPIVSMQNIQKTPQTAKKALASRWLSWLSYLEDPRIRFFYDPQMPALKDLPAVDTGKDNKKHPSNFQHIFYTDGSAITSPTKEGHLNAGMGIVYFINKDGNLQKQQEWSISLGNHTAQFAEIAAFEFALKKCLPLGGNILVVTDSNYVAKAYNEELDVWASNGFVNNRKKPLKHISKWKSVADLKRLRPDVVVTHEPGHQKLDSSPHAYGNNLADQLATQASFKVHAGKRTADGSEFEKRTADGSEFESPKKKAKVE

SEQ ID NO: 720 - protein, 2171 aa, synthetic construct
MPAAKRVKLDGGDKKYSIGLDIGTNSVGWAVITDEYKVPSKKFKVLGNTDRHSIKKNLIGALLFDSGETAEATRLKRTARRRYTRRKNRICYLQEIFSNEMAKVDDSFFHRLEESFLVEEDKKHERHPIFGNIVDEVAYHEKYPTIYHLRKKLVDSTDKADLRLIYLALAHMIKFRGHFLIEGDLNPDNSDVDKLFIQLVQTYNQLFEENPINASGVDAKAILSARLSKSRRLENLIAQLPGEKKNGLFGNLIALSLGLTPNFKSNFDLAEDAKLQLSKDTYDDDLDNLLAQIGDQYADLFLAAKNLSDAILLSDILRVNTEITKAPLSASMIKRYDEHHQDLTLLKALVRQQLPEKYKEIFFDQSKNGYAGYIDGGASQEEFYKFIKPILEKMDGTEELLVKLNREDLLRKQRTFDNGSIPHQIHLGELHAILRRQEDFYPFLKDNREKIEKILTFRIPYYVGPLARGNSRFAWMTRKSEETITPWNFEEVVDKGASAQSFIERMTNFDKNLPNEKVLPKHSLLYEYFTVYNELTKVKYVTEGMRKPAFLSGEQKKAIVDLLFKTNRKVTVKQLKEDYFKKIECFDSVEISGVEDRFNASLGTYHDLLKIIKDKDFLDNEENEDILEDIVLTLTLFEDREMIEERLKTYAHLFDDKVMKQLKRRRYTGWGRLSRKLINGIRDKQSGKTILDFLKSDGFANRNFMQLIHDDSLTFKEDIQKAQVSGQGDSLHEHIANLAGSPAIKKGILQTVKVVDELVKVMGRHKPENIVIEMARENQTTQKGQKNSRERMKRIEEGIKELGSQILKEHPVENTQLQNEKLYLYYLQNGRDMYVDQELDINRLSDYDVDHIVPQSFLKDDSIDNKVLTRSDKARGKSDNVPSEEVVKKMKNYWRQLLNAKLITQRKFDNLTKAERGGLSELDKAGFIKRQLVETRQITKHVAQILDSRMNTKYDENDKLIREVKVITLKSKLVSDFRKDFQFYKVREINNYHHAHDAYLNAVVGTALIKKYPKLESEFVYGDYKVYDVRKMIAKSEQEIGKATAKYFFYSNIMNFFKTEITLANGEIRKRPLIETNGETGEIVWDKGRDFATVRKVLSMPQVNIVKKTEVQTGGFSKESILPKRNSDKLIARKKDWDPKKYGGFDSPTVAYSVLVVAKVEKGKSKKLKSVKELLGITIMERSSFEKNPIDFLEAKGYKEVKKDLIIKLPKYSLFELENGRKRMLASAGELQKGNELALPSKYVNFLYLASHYEKLKGSPEDNEQKQLFVEQHKHYLDEIIEQISEFSKRVILADANLDKVLSAYNKHRDKPIREQAENIIHLFTLTNLGAPAAFKYFDTTIDRKRYTSTKEVLDATLIHQSITGLYETRIDLSQLGGDGGGGGGSSPAPGGMDLLKPLTVERKGVKIKGYWNSQADITCVPKDLLQGEEPVRQQNVTTIHGTQEGDVYYVNLKIDGRRINTEVIGTTLDYAIITPGDVPWILKKPLELTIKLDLEEQQGTLLNNSILSKKGKEELKQLFEKYSALWQSWENQVGHRRIRPHKIATGTVKPTPQKQYHINPKAKPDIQIVINDLLKQGVLIQKESTMNTPVYPVPKPNGRWRMVLDYRAVNKVTPLIAVQNQHSYGILGSLFKGRYKTTIDLSNGFWAHPIVPEDYWITAFTWQGKQYCWTVLPQGFLNSPGLFTGDVVDLLQGIPNVEVYVDDVYISHDSEKEHLEYLDILFNRLKEAGYIISLKKSNIANSIVDFLGFQITNEGRGLTDTFKEKLENITAPTTLKQLQSILGLLNFARNFIPDFTELIAPLYALIPKSTKNYVPWQIEHSTTLETLITKLNGAEYLQGRKGDKTLIMKVNASYTTGYIRYYNEGEKKPISYVSIVFSKTELKFTELEKLLTTVHKGLLKALDLSMGQNIHVYSPIVSMQNIQKTPQTAKKALASRWLSWLSYLEDPRIRFFYDPQMPALKDLPAVDTGKDNKKHPSNFQHIFYTDGSAITSPTKEGHLNAGMGIVYFINKDGNLQKQQEWSISLGNHTAQFAEIAAFEFALKKCLPLGGNILVVTDSNYVAKAYNEELDVWASNGFVNNRKKPLKHISKWKSVADLKRLRPDVVVTHEPGHQKLDSSPHAYGNNLADQLATQASFKVHAGKRTADGSEFEKRTADGSEFESPKKKAKVE

SEQ ID NO: 721 - protein, 2173 aa, synthetic construct
MPAAKRVKLDGGDKKYSIGLDIGTNSVGWAVITDEYKVPSKKFKVLGNTDRHSIKKNLIGALLFDSGETAEATRLKRTARRRYTRRKNRICYLQEIFSNEMAKVDDSFFHRLEESFLVEEDKKHERHPIFGNIVDEVAYHEKYPTIYHLRKKLVDSTDKADLRLIYLALAHMIKFRGHFLIEGDLNPDNSDVDKLFIQLVQTYNQLFEENPINASGVDAKAILSARLSKSRRLENLIAQLPGEKKNGLFGNLIALSLGLTPNFKSNFDLAEDAKLQLSKDTYDDDLDNLLAQIGDQYADLFLAAKNLSDAILLSDILRVNTEITKAPLSASMIKRYDEHHQDLTLLKALVRQQLPEKYKEIFFDQSKNGYAGYIDGGASQEEFYKFIKPILEKMDGTEELLVKLNREDLLRKQRTFDNGSIPHQIHLGELHAILRRQEDFYPFLKDNREKIEKILTFRIPYYVGPLARGNSRFAWMTRKSEETITPWNFEEVVDKGASAQSFIERMTNFDKNLPNEKVLPKHSLLYEYFTVYNELTKVKYVTEGMRKPAFLSGEQKKAIVDLLFKTNRKVTVKQLKEDYFKKIECFDSVEISGVEDRFNASLGTYHDLLKIIKDKDFLDNEENEDILEDIVLTLTLFEDREMIEERLKTYAHLFDDKVMKQLKRRRYTGWGRLSRKLINGIRDKQSGKTILDFLKSDGFANRNFMQLIHDDSLTFKEDIQKAQVSGQGDSLHEHIANLAGSPAIKKGILQTVKVVDELVKVMGRHKPENIVIEMARENQTTQKGQKNSRERMKRIEEGIKELGSQILKEHPVENTQLQNEKLYLYYLQNGRDMYVDQELDINRLSDYDVDHIVPQSFLKDDSIDNKVLTRSDKARGKSDNVPSEEVVKKMKNYWRQLLNAKLITQRKFDNLTKAERGGLSELDKAGFIKRQLVETRQITKHVAQILDSRMNTKYDENDKLIREVKVITLKSKLVSDFRKDFQFYKVREINNYHHAHDAYLNAVVGTALIKKYPKLESEFVYGDYKVYDVRKMIAKSEQEIGKATAKYFFYSNIMNFFKTEITLANGEIRKRPLIETNGETGEIVWDKGRDFATVRKVLSMPQVNIVKKTEVQTGGFSKESILPKRNSDKLIARKKDWDPKKYGGFDSPTVAYSVLVVAKVEKGKSKKLKSVKELLGITIMERSSFEKNPIDFLEAKGYKEVKKDLIIKLPKYSLFELENGRKRMLASAGELQKGNELALPSKYVNFLYLASHYEKLKGSPEDNEQKQLFVEQHKHYLDEIIEQISEFSKRVILADANLDKVLSAYNKHRDKPIREQAENIIHLFTLTNLGAPAAFKYFDTTIDRKRYTSTKEVLDATLIHQSITGLYETRIDLSQLGGDGGEAAAKGSSPAPGGMDLLKPLTVERKGVKIKGYWNSQADITCVPKDLLQGEEPVRQQNVTTIHGTQEGDVYYVNLKIDGRRINTEVIGTTLDYAIITPGDVPWILKKPLELTIKLDLEEQQGTLLNNSILSKKGKEELKQLFEKYSALWQSWENQVGHRRIRPHKIATGTVKPTPQKQYHINPKAKPDIQIVINDLLKQGVLIQKESTMNTPVYPVPKPNGRWRMVLDYRAVNKVTPLIAVQNQHSYGILGSLFKGRYKTTIDLSNGFWAHPIVPEDYWITAFTWQGKQYCWTVLPQGFLNSPGLFTGDVVDLLQGIPNVEVYVDDVYISHDSEKEHLEYLDILFNRLKEAGYIISLKKSNIANSIVDFLGFQITNEGRGLTDTFKEKLENITAPTTLKQLQSILGLLNFARNFIPDFTELIAPLYALIPKSTKNYVPWQIEHSTTLETLITKLNGAEYLQGRKGDKTLIMKVNASYTTGYIRYYNEGEKKPISYVSIVFSKTELKFTELEKLLTTVHKGLLKALDLSMGQNIHVYSPIVSMQNIQKTPQTAKKALASRWLSWLSYLEDPRIRFFYDPQMPALKDLPAVDTGKDNKKHPSNFQHIFYTDGSAITSPTKEGHLNAGMGIVYFINKDGNLQKQQEWSISLGNHTAQFAEIAAFEFALKKCLPLGGNILVVTDSNYVAKAYNEELDVWASNGFVNNRKKPLKHISKWKSVADLKRLRPDVVVTHEPGHQKLDSSPHAYGNNLADQLATQASFKVHAGKRTADGSEFEKRTADGSEFESPKKKAKVE

SEQ ID NO: 722 - protein, 2180 aa, synthetic construct
MPAAKRVKLDGGDKKYSIGLDIGTNSVGWAVITDEYKVPSKKFKVLGNTDRHSIKKNLIGALLFDSGETAEATRLKRTARRRYTRRKNRICYLQEIFSNEMAKVDDSFFHRLEESFLVEEDKKHERHPIFGNIVDEVAYHEKYPTIYHLRKKLVDSTDKADLRLIYLALAHMIKFRGHFLIEGDLNPDNSDVDKLFIQLVQTYNQLFEENPINASGVDAKAILSARLSKSRRLENLIAQLPGEKKNGLFGNLIALSLGLTPNFKSNFDLAEDAKLQLSKDTYDDDLDNLLAQIGDQYADLFLAAKNLSDAILLSDILRVNTEITKAPLSASMIKRYDEHHQDLTLLKALVRQQLPEKYKEIFFDQSKNGYAGYIDGGASQEEFYKFIKPILEKMDGTEELLVKLNREDLLRKQRTFDNGSIPHQIHLGELHAILRRQEDFYPFLKDNREKIEKILTFRIPYYVGPLARGNSRFAWMTRKSEETITPWNFEEVVDKGASAQSFIERMTNFDKNLPNEKVLPKHSLLYEYFTVYNELTKVKYVTEGMRKPAFLSGEQKKAIVDLLFKTNRKVTVKQLKEDYFKKIECFDSVEISGVEDRFNASLGTYHDLLKIIKDKDFLDNEENEDILEDIVLTLTLFEDREMIEERLKTYAHLFDDKVMKQLKRRRYTGWGRLSRKLINGIRDKQSGKTILDFLKSDGFANRNFMQLIHDDSLTFKEDIQKAQVSGQGDSLHEHIANLAGSPAIKKGILQTVKVVDELVKVMGRHKPENIVIEMARENQTTQKGQKNSRERMKRIEEGIKELGSQILKEHPVENTQLQNEKLYLYYLQNGRDMYVDQELDINRLSDYDVDHIVPQSFLKDDSIDNKVLTRSDKARGKSDNVPSEEVVKKMKNYWRQLLNAKLITQRKFDNLTKAERGGLSELDKAGFIKRQLVETRQITKHVAQILDSRMNTKYDENDKLIREVKVITLKSKLVSDFRKDFQFYKVREINNYHHAHDAYLNAVVGTALIKKYPKLESEFVYGDYKVYDVRKMIAKSEQEIGKATAKYFFYSNIMNFFKTEITLANGEIRKRPLIETNGETGEIVWDKGRDFATVRKVLSMPQVNIVKKTEVQTGGFSKESILPKRNSDKLIARKKDWDPKKYGGFDSPTVAYSVLVVAKVEKGKSKKLKSVKELLGITIMERSSFEKNPIDFLEAKGYKEVKKDLIIKLPKYSLFELENGRKRMLASAGELQKGNELALPSKYVNFLYLASHYEKLKGSPEDNEQKQLFVEQHKHYLDEIIEQISEFSKRVILADANLDKVLSAYNKHRDKPIREQAENIIHLFTLTNLGAPAAFKYFDTTIDRKRYTSTKEVLDATLIHQSITGLYETRIDLSQLGGDGGGSSGSSGSSGSSGSSGSSGGMDLLKPLTVERKGVKIKGYWNSQADITCVPKDLLQGEEPVRQQNVTTIHGTQEGDVYYVNLKIDGRRINTEVIGTTLDYAIITPGDVPWILKKPLELTIKLDLEEQQGTLLNNSILSKKGKEELKQLFEKYSALWQSWENQVGHRRIRPHKIATGTVKPTPQKQYHINPKAKPDIQIVINDLLKQGVLIQKESTMNTPVYPVPKPNGRWRMVLDYRAVNKVTPLIAVQNQHSYGILGSLFKGRYKTTIDLSNGFWAHPIVPEDYWITAFTWQGKQYCWTVLPQGFLNSPGLFTGDVVDLLQGIPNVEVYVDDVYISHDSEKEHLEYLDILFNRLKEAGYIISLKKSNIANSIVDFLGFQITNEGRGLTDTFKEKLENITAPTTLKQLQSILGLLNFARNFIPDFTELIAPLYALIPKSTKNYVPWQIEHSTTLETLITKLNGAEYLQGRKGDKTLIMKVNASYTTGYIRYYNEGEKKPISYVSIVFSKTELKFTELEKLLTTVHKGLLKALDLSMGQNIHVYSPIVSMQNIQKTPQTAKKALASRWLSWLSYLEDPRIRFFYDPQMPALKDLPAVDTGKDNKKHPSNFQHIFYTDGSAITSPTKEGHLNAGMGIVYFINKDGNLQKQQEWSISLGNHTAQFAEIAAFEFALKKCLPLGGNILVVTDSNYVAKAYNEELDVWASNGFVNNRKKPLKHISKWKSVADLKRLRPDVVVTHEPGHQKLDSSPHAYGNNLADQLATQASFKVHAGKRTADGSEFEKRTADGSEFESPKKKAKVE

SEQ ID NO: 723 - protein, 2171 aa, synthetic construct
MPAAKRVKLDGGDKKYSIGLDIGTNSVGWAVITDEYKVPSKKFKVLGNTDRHSIKKNLIGALLFDSGETAEATRLKRTARRRYTRRKNRICYLQEIFSNEMAKVDDSFFHRLEESFLVEEDKKHERHPIFGNIVDEVAYHEKYPTIYHLRKKLVDSTDKADLRLIYLALAHMIKFRGHFLIEGDLNPDNSDVDKLFIQLVQTYNQLFEENPINASGVDAKAILSARLSKSRRLENLIAQLPGEKKNGLFGNLIALSLGLTPNFKSNFDLAEDAKLQLSKDTYDDDLDNLLAQIGDQYADLFLAAKNLSDAILLSDILRVNTEITKAPLSASMIKRYDEHHQDLTLLKALVRQQLPEKYKEIFFDQSKNGYAGYIDGGASQEEFYKFIKPILEKMDGTEELLVKLNREDLLRKQRTFDNGSIPHQIHLGELHAILRRQEDFYPFLKDNREKIEKILTFRIPYYVGPLARGNSRFAWMTRKSEETITPWNFEEVVDKGASAQSFIERMTNFDKNLPNEKVLPKHSLLYEYFTVYNELTKVKYVTEGMRKPAFLSGEQKKAIVDLLFKTNRKVTVKQLKEDYFKKIECFDSVEISGVEDRFNASLGTYHDLLKIIKDKDFLDNEENEDILEDIVLTLTLFEDREMIEERLKTYAHLFDDKVMKQLKRRRYTGWGRLSRKLINGIRDKQSGKTILDFLKSDGFANRNFMQLIHDDSLTFKEDIQKAQVSGQGDSLHEHIANLAGSPAIKKGILQTVKVVDELVKVMGRHKPENIVIEMARENQTTQKGQKNSRERMKRIEEGIKELGSQILKEHPVENTQLQNEKLYLYYLQNGRDMYVDQELDINRLSDYDVDHIVPQSFLKDDSIDNKVLTRSDKARGKSDNVPSEEVVKKMKNYWRQLLNAKLITQRKFDNLTKAERGGLSELDKAGFIKRQLVETRQITKHVAQILDSRMNTKYDENDKLIREVKVITLKSKLVSDFRKDFQFYKVREINNYHHAHDAYLNAVVGTALIKKYPKLESEFVYGDYKVYDVRKMIAKSEQEIGKATAKYFFYSNIMNFFKTEITLANGEIRKRPLIETNGETGEIVWDKGRDFATVRKVLSMPQVNIVKKTEVQTGGFSKESILPKRNSDKLIARKKDWDPKKYGGFDSPTVAYSVLVVAKVEKGKSKKLKSVKELLGITIMERSSFEKNPIDFLEAKGYKEVKKDLIIKLPKYSLFELENGRKRMLASAGELQKGNELALPSKYVNFLYLASHYEKLKGSPEDNEQKQLFVEQHKHYLDEIIEQISEFSKRVILADANLDKVLSAYNKHRDKPIREQAENIIHLFTLTNLGAPAAFKYFDTTIDRKRYTSTKEVLDATLIHQSITGLYETRIDLSQLGGDGGPAPAPAPAPGGMDLLKPLTVERKGVKIKGYWNSQADITCVPKDLLQGEEPVRQQNVTTIHGTQEGDVYYVNLKIDGRRINTEVIGTTLDYAIITPGDVPWILKKPLELTIKLDLEEQQGTLLNNSILSKKGKEELKQLFEKYSALWQSWENQVGHRRIRPHKIATGTVKPTPQKQYHINPKAKPDIQIVINDLLKQGVLIQKESTMNTPVYPVPKPNGRWRMVLDYRAVNKVTPLIAVQNQHSYGILGSLFKGRYKTTIDLSNGFWAHPIVPEDYWITAFTWQGKQYCWTVLPQGFLNSPGLFTGDVVDLLQGIPNVEVYVDDVYISHDSEKEHLEYLDILFNRLKEAGYIISLKKSNIANSIVDFLGFQITNEGRGLTDTFKEKLENITAPTTLKQLQSILGLLNFARNFIPDFTELIAPLYALIPKSTKNYVPWQIEHSTTLETLITKLNGAEYLQGRKGDKTLIMKVNASYTTGYIRYYNEGEKKPISYVSIVFSKTELKFTELEKLLTTVHKGLLKALDLSMGQNIHVYSPIVSMQNIQKTPQTAKKALASRWLSWLSYLEDPRIRFFYDPQMPALKDLPAVDTGKDNKKHPSNFQHIFYTDGSAITSPTKEGHLNAGMGIVYFINKDGNLQKQQEWSISLGNHTAQFAEIAAFEFALKKCLPLGGNILVVTDSNYVAKAYNEELDVWASNGFVNNRKKPLKHISKWKSVADLKRLRPDVVVTHEPGHQKLDSSPHAYGNNLADQLATQASFKVHAGKRTADGSEFEKRTADGSEFESPKKKAKVE

SEQ ID NO: 724 - protein, 2170 aa, synthetic construct
MPAAKRVKLDGGDKKYSIGLDIGTNSVGWAVITDEYKVPSKKFKVLGNTDRHSIKKNLIGALLFDSGETAEATRLKRTARRRYTRRKNRICYLQEIFSNEMAKVDDSFFHRLEESFLVEEDKKHERHPIFGNIVDEVAYHEKYPTIYHLRKKLVDSTDKADLRLIYLALAHMIKFRGHFLIEGDLNPDNSDVDKLFIQLVQTYNQLFEENPINASGVDAKAILSARLSKSRRLENLIAQLPGEKKNGLFGNLIALSLGLTPNFKSNFDLAEDAKLQLSKDTYDDDLDNLLAQIGDQYADLFLAAKNLSDAILLSDILRVNTEITKAPLSASMIKRYDEHHQDLTLLKALVRQQLPEKYKEIFFDQSKNGYAGYIDGGASQEEFYKFIKPILEKMDGTEELLVKLNREDLLRKQRTFDNGSIPHQIHLGELHAILRRQEDFYPFLKDNREKIEKILTFRIPYYVGPLARGNSRFAWMTRKSEETITPWNFEEVVDKGASAQSFIERMTNFDKNLPNEKVLPKHSLLYEYFTVYNELTKVKYVTEGMRKPAFLSGEQKKAIVDLLFKTNRKVTVKQLKEDYFKKIECFDSVEISGVEDRFNASLGTYHDLLKIIKDKDFLDNEENEDILEDIVLTLTLFEDREMIEERLKTYAHLFDDKVMKQLKRRRYTGWGRLSRKLINGIRDKQSGKTILDFLKSDGFANRNFMQLIHDDSLTFKEDIQKAQVSGQGDSLHEHIANLAGSPAIKKGILQTVKVVDELVKVMGRHKPENIVIEMARENQTTQKGQKNSRERMKRIEEGIKELGSQILKEHPVENTQLQNEKLYLYYLQNGRDMYVDQELDINRLSDYDVDHIVPQSFLKDDSIDNKVLTRSDKARGKSDNVPSEEVVKKMKNYWRQLLNAKLITQRKFDNLTKAERGGLSELDKAGFIKRQLVETRQITKHVAQILDSRMNTKYDENDKLIREVKVITLKSKLVSDFRKDFQFYKVREINNYHHAHDAYLNAVVGTALIKKYPKLESEFVYGDYKVYDVRKMIAKSEQEIGKATAKYFFYSNIMNFFKTEITLANGEIRKRPLIETNGETGEIVWDKGRDFATVRKVLSMPQVNIVKKTEVQTGGFSKESILPKRNSDKLIARKKDWDPKKYGGFDSPTVAYSVLVVAKVEKGKSKKLKSVKELLGITIMERSSFEKNPIDFLEAKGYKEVKKDLIIKLPKYSLFELENGRKRMLASAGELQKGNELALPSKYVNFLYLASHYEKLKGSPEDNEQKQLFVEQHKHYLDEIIEQISEFSKRVILADANLDKVLSAYNKHRDKPIREQAENIIHLFTLTNLGAPAAFKYFDTTIDRKRYTSTKEVLDATLIHQSITGLYETRIDLSQLGGDGGGSSEAAAKGGMDLLKPLTVERKGVKIKGYWNSQADITCVPKDLLQGEEPVRQQNVTTIHGTQEGDVYYVNLKIDGRRINTEVIGTTLDYAIITPGDVPWILKKPLELTIKLDLEEQQGTLLNNSILSKKGKEELKQLFEKYSALWQSWENQVGHRRIRPHKIATGTVKPTPQKQYHINPKAKPDIQIVINDLLKQGVLIQKESTMNTPVYPVPKPNGRWRMVLDYRAVNKVTPLIAVQNQHSYGILGSLFKGRYKTTIDLSNGFWAHPIVPEDYWITAFTWQGKQYCWTVLPQGFLNSPGLFTGDVVDLLQGIPNVEVYVDDVYISHDSEKEHLEYLDILFNRLKEAGYIISLKKSNIANSIVDFLGFQITNEGRGLTDTFKEKLENITAPTTLKQLQSILGLLNFARNFIPDFTELIAPLYALIPKSTKNYVPWQIEHSTTLETLITKLNGAEYLQGRKGDKTLIMKVNASYTTGYIRYYNEGEKKPISYVSIVFSKTELKFTELEKLLTTVHKGLLKALDLSMGQNIHVYSPIVSMQNIQKTPQTAKKALASRWLSWLSYLEDPRIRFFYDPQMPALKDLPAVDTGKDNKKHPSNFQHIFYTDGSAITSPTKEGHLNAGMGIVYFINKDGNLQKQQEWSISLGNHTAQFAEIAAFEFALKKCLPLGGNILVVTDSNYVAKAYNEELDVWASNGFVNNRKKPLKHISKWKSVADLKRLRPDVVVTHEPGHQKLDSSPHAYGNNLADQLATQASFKVHAGKRTADGSEFEKRTADGSEFESPKKKAKVE

SEQ ID NO: 725 - protein, 2165 aa, synthetic construct
MPAAKRVKLDGGDKKYSIGLDIGTNSVGWAVITDEYKVPSKKFKVLGNTDRHSIKKNLIGALLFDSGETAEATRLKRTARRRYTRRKNRICYLQEIFSNEMAKVDDSFFHRLEESFLVEEDKKHERHPIFGNIVDEVAYHEKYPTIYHLRKKLVDSTDKADLRLIYLALAHMIKFRGHFLIEGDLNPDNSDVDKLFIQLVQTYNQLFEENPINASGVDAKAILSARLSKSRRLENLIAQLPGEKKNGLFGNLIALSLGLTPNFKSNFDLAEDAKLQLSKDTYDDDLDNLLAQIGDQYADLFLAAKNLSDAILLSDILRVNTEITKAPLSASMIKRYDEHHQDLTLLKALVRQQLPEKYKEIFFDQSKNGYAGYIDGGASQEEFYKFIKPILEKMDGTEELLVKLNREDLLRKQRTFDNGSIPHQIHLGELHAILRRQEDFYPFLKDNREKIEKILTFRIPYYVGPLARGNSRFAWMTRKSEETITPWNFEEVVDKGASAQSFIERMTNFDKNLPNEKVLPKHSLLYEYFTVYNELTKVKYVTEGMRKPAFLSGEQKKAIVDLLFKTNRKVTVKQLKEDYFKKIECFDSVEISGVEDRFNASLGTYHDLLKIIKDKDFLDNEENEDILEDIVLTLTLFEDREMIEERLKTYAHLFDDKVMKQLKRRRYTGWGRLSRKLINGIRDKQSGKTILDFLKSDGFANRNFMQLIHDDSLTFKEDIQKAQVSGQGDSLHEHIANLAGSPAIKKGILQTVKVVDELVKVMGRHKPENIVIEMARENQTTQKGQKNSRERMKRIEEGIKELGSQILKEHPVENTQLQNEKLYLYYLQNGRDMYVDQELDINRLSDYDVDHIVPQSFLKDDSIDNKVLTRSDKARGKSDNVPSEEVVKKMKNYWRQLLNAKLITQRKFDNLTKAERGGLSELDKAGFIKRQLVETRQITKHVAQILDSRMNTKYDENDKLIREVKVITLKSKLVSDFRKDFQFYKVREINNYHHAHDAYLNAVVGTALIKKYPKLESEFVYGDYKVYDVRKMIAKSEQEIGKATAKYFFYSNIMNFFKTEITLANGEIRKRPLIETNGETGEIVWDKGRDFATVRKVLSMPQVNIVKKTEVQTGGFSKESILPKRNSDKLIARKKDWDPKKYGGFDSPTVAYSVLVVAKVEKGKSKKLKSVKELLGITIMERSSFEKNPIDFLEAKGYKEVKKDLIIKLPKYSLFELENGRKRMLASAGELQKGNELALPSKYVNFLYLASHYEKLKGSPEDNEQKQLFVEQHKHYLDEIIEQISEFSKRVILADANLDKVLSAYNKHRDKPIREQAENIIHLFTLTNLGAPAAFKYFDTTIDRKRYTSTKEVLDATLIHQSITGLYETRIDLSQLGGDGGGSSGGMDLLKPLTVERKGVKIKGYWNSQADITCVPKDLLQGEEPVRQQNVTTIHGTQEGDVYYVNLKIDGRRINTEVIGTTLDYAIITPGDVPWILKKPLELTIKLDLEEQQGTLLNNSILSKKGKEELKQLFEKYSALWQSWENQVGHRRIRPHKIATGTVKPTPQKQYHINPKAKPDIQIVINDLLKQGVLIQKESTMNTPVYPVPKPNGRWRMVLDYRAVNKVTPLIAVQNQHSYGILGSLFKGRYKTTIDLSNGFWAHPIVPEDYWITAFTWQGKQYCWTVLPQGFLNSPGLFTGDVVDLLQGIPNVEVYVDDVYISHDSEKEHLEYLDILFNRLKEAGYIISLKKSNIANSIVDFLGFQITNEGRGLTDTFKEKLENITAPTTLKQLQSILGLLNFARNFIPDFTELIAPLYALIPKSTKNYVPWQIEHSTTLETLITKLNGAEYLQGRKGDKTLIMKVNASYTTGYIRYYNEGEKKPISYVSIVFSKTELKFTELEKLLTTVHKGLLKALDLSMGQNIHVYSPIVSMQNIQKTPQTAKKALASRWLSWLSYLEDPRIRFFYDPQMPALKDLPAVDTGKDNKKHPSNFQHIFYTDGSAITSPTKEGHLNAGMGIVYFINKDGNLQKQQEWSISLGNHTAQFAEIAAFEFALKKCLPLGGNILVVTDSNYVAKAYNEELDVWASNGFVNNRKKPLKHISKWKSVADLKRLRPDVVVTHEPGHQKLDSSPHAYGNNLADQLATQASFKVHAGKRTADGSEFEKRTADGSEFESPKKKAKVE

SEQ ID NO: 726 - protein, 2173 aa, synthetic construct
MPAAKRVKLDGGDKKYSIGLDIGTNSVGWAVITDEYKVPSKKFKVLGNTDRHSIKKNLIGALLFDSGETAEATRLKRTARRRYTRRKNRICYLQEIFSNEMAKVDDSFFHRLEESFLVEEDKKHERHPIFGNIVDEVAYHEKYPTIYHLRKKLVDSTDKADLRLIYLALAHMIKFRGHFLIEGDLNPDNSDVDKLFIQLVQTYNQLFEENPINASGVDAKAILSARLSKSRRLENLIAQLPGEKKNGLFGNLIALSLGLTPNFKSNFDLAEDAKLQLSKDTYDDDLDNLLAQIGDQYADLFLAAKNLSDAILLSDILRVNTEITKAPLSASMIKRYDEHHQDLTLLKALVRQQLPEKYKEIFFDQSKNGYAGYIDGGASQEEFYKFIKPILEKMDGTEELLVKLNREDLLRKQRTFDNGSIPHQIHLGELHAILRRQEDFYPFLKDNREKIEKILTFRIPYYVGPLARGNSRFAWMTRKSEETITPWNFEEVVDKGASAQSFIERMTNFDKNLPNEKVLPKHSLLYEYFTVYNELTKVKYVTEGMRKPAFLSGEQKKAIVDLLFKTNRKVTVKQLKEDYFKKIECFDSVEISGVEDRFNASLGTYHDLLKIIKDKDFLDNEENEDILEDIVLTLTLFEDREMIEERLKTYAHLFDDKVMKQLKRRRYTGWGRLSRKLINGIRDKQSGKTILDFLKSDGFANRNFMQLIHDDSLTFKEDIQKAQVSGQGDSLHEHIANLAGSPAIKKGILQTVKVVDELVKVMGRHKPENIVIEMARENQTTQKGQKNSRERMKRIEEGIKELGSQILKEHPVENTQLQNEKLYLYYLQNGRDMYVDQELDINRLSDYDVDHIVPQSFLKDDSIDNKVLTRSDKARGKSDNVPSEEVVKKMKNYWRQLLNAKLITQRKFDNLTKAERGGLSELDKAGFIKRQLVETRQITKHVAQILDSRMNTKYDENDKLIREVKVITLKSKLVSDFRKDFQFYKVREINNYHHAHDAYLNAVVGTALIKKYPKLESEFVYGDYKVYDVRKMIAKSEQEIGKATAKYFFYSNIMNFFKTEITLANGEIRKRPLIETNGETGEIVWDKGRDFATVRKVLSMPQVNIVKKTEVQTGGFSKESILPKRNSDKLIARKKDWDPKKYGGFDSPTVAYSVLVVAKVEKGKSKKLKSVKELLGITIMERSSFEKNPIDFLEAKGYKEVKKDLIIKLPKYSLFELENGRKRMLASAGELQKGNELALPSKYVNFLYLASHYEKLKGSPEDNEQKQLFVEQHKHYLDEIIEQISEFSKRVILADANLDKVLSAYNKHRDKPIREQAENIIHLFTLTNLGAPAAFKYFDTTIDRKRYTSTKEVLDATLIHQSITGLYETRIDLSQLGGDGGEAAAKGGSGGGGGMDLLKPLTVERKGVKIKGYWNSQADITCVPKDLLQGEEPVRQQNVTTIHGTQEGDVYYVNLKIDGRRINTEVIGTTLDYAIITPGDVPWILKKPLELTIKLDLEEQQGTLLNNSILSKKGKEELKQLFEKYSALWQSWENQVGHRRIRPHKIATGTVKPTPQKQYHINPKAKPDIQIVINDLLKQGVLIQKESTMNTPVYPVPKPNGRWRMVLDYRAVNKVTPLIAVQNQHSYGILGSLFKGRYKTTIDLSNGFWAHPIVPEDYWITAFTWQGKQYCWTVLPQGFLNSPGLFTGDVVDLLQGIPNVEVYVDDVYISHDSEKEHLEYLDILFNRLKEAGYIISLKKSNIANSIVDFLGFQITNEGRGLTDTFKEKLENITAPTTLKQLQSILGLLNFARNFIPDFTELIAPLYALIPKSTKNYVPWQIEHSTTLETLITKLNGAEYLQGRKGDKTLIMKVNASYTTGYIRYYNEGEKKPISYVSIVFSKTELKFTELEKLLTTVHKGLLKALDLSMGQNIHVYSPIVSMQNIQKTPQTAKKALASRWLSWLSYLEDPRIRFFYDPQMPALKDLPAVDTGKDNKKHPSNFQHIFYTDGSAITSPTKEGHLNAGMGIVYFINKDGNLQKQQEWSISLGNHTAQFAEIAAFEFALKKCLPLGGNILVVTDSNYVAKAYNEELDVWASNGFVNNRKKPLKHISKWKSVADLKRLRPDVVVTHEPGHQKLDSSPHAYGNNLADQLATQASFKVHAGKRTADGSEFEKRTADGSEFESPKKKAKVE

SEQ ID NO: 727 - protein, 2173 aa, synthetic construct
MPAAKRVKLDGGDKKYSIGLDIGTNSVGWAVITDEYKVPSKKFKVLGNTDRHSIKKNLIGALLFDSGETAEATRLKRTARRRYTRRKNRICYLQEIFSNEMAKVDDSFFHRLEESFLVEEDKKHERHPIFGNIVDEVAYHEKYPTIYHLRKKLVDSTDKADLRLIYLALAHMIKFRGHFLIEGDLNPDNSDVDKLFIQLVQTYNQLFEENPINASGVDAKAILSARLSKSRRLENLIAQLPGEKKNGLFGNLIALSLGLTPNFKSNFDLAEDAKLQLSKDTYDDDLDNLLAQIGDQYADLFLAAKNLSDAILLSDILRVNTEITKAPLSASMIKRYDEHHQDLTLLKALVRQQLPEKYKEIFFDQSKNGYAGYIDGGASQEEFYKFIKPILEKMDGTEELLVKLNREDLLRKQRTFDNGSIPHQIHLGELHAILRRQEDFYPFLKDNREKIEKILTFRIPYYVGPLARGNSRFAWMTRKSEETITPWNFEEVVDKGASAQSFIERMTNFDKNLPNEKVLPKHSLLYEYFTVYNELTKVKYVTEGMRKPAFLSGEQKKAIVDLLFKTNRKVTVKQLKEDYFKKIECFDSVEISGVEDRFNASLGTYHDLLKIIKDKDFLDNEENEDILEDIVLTLTLFEDREMIEERLKTYAHLFDDKVMKQLKRRRYTGWGRLSRKLINGIRDKQSGKTILDFLKSDGFANRNFMQLIHDDSLTFKEDIQKAQVSGQGDSLHEHIANLAGSPAIKKGILQTVKVVDELVKVMGRHKPENIVIEMARENQTTQKGQKNSRERMKRIEEGIKELGSQILKEHPVENTQLQNEKLYLYYLQNGRDMYVDQELDINRLSDYDVDHIVPQSFLKDDSIDNKVLTRSDKARGKSDNVPSEEVVKKMKNYWRQLLNAKLITQRKFDNLTKAERGGLSELDKAGFIKRQLVETRQITKHVAQILDSRMNTKYDENDKLIREVKVITLKSKLVSDFRKDFQFYKVREINNYHHAHDAYLNAVVGTALIKKYPKLESEFVYGDYKVYDVRKMIAKSEQEIGKATAKYFFYSNIMNFFKTEITLANGEIRKRPLIETNGETGEIVWDKGRDFATVRKVLSMPQVNIVKKTEVQTGGFSKESILPKRNSDKLIARKKDWDPKKYGGFDSPTVAYSVLVVAKVEKGKSKKLKSVKELLGITIMERSSFEKNPIDFLEAKGYKEVKKDLIIKLPKYSLFELENGRKRMLASAGELQKGNELALPSKYVNFLYLASHYEKLKGSPEDNEQKQLFVEQHKHYLDEIIEQISEFSKRVILADANLDKVLSAYNKHRDKPIREQAENIIHLFTLTNLGAPAAFKYFDTTIDRKRYTSTKEVLDATLIHQSITGLYETRIDLSQLGGDGGGSSEAAAKPAPGGMDLLKPLTVERKGVKIKGYWNSQADITCVPKDLLQGEEPVRQQNVTTIHGTQEGDVYYVNLKIDGRRINTEVIGTTLDYAIITPGDVPWILKKPLELTIKLDLEEQQGTLLNNSILSKKGKEELKQLFEKYSALWQSWENQVGHRRIRPHKIATGTVKPTPQKQYHINPKAKPDIQIVINDLLKQGVLIQKESTMNTPVYPVPKPNGRWRMVLDYRAVNKVTPLIAVQNQHSYGILGSLFKGRYKTTIDLSNGFWAHPIVPEDYWITAFTWQGKQYCWTVLPQGFLNSPGLFTGDVVDLLQGIPNVEVYVDDVYISHDSEKEHLEYLDILFNRLKEAGYIISLKKSNIANSIVDFLGFQITNEGRGLTDTFKEKLENITAPTTLKQLQSILGLLNFARNFIPDFTELIAPLYALIPKSTKNYVPWQIEHSTTLETLITKLNGAEYLQGRKGDKTLIMKVNASYTTGYIRYYNEGEKKPISYVSIVFSKTELKFTELEKLLTTVHKGLLKALDLSMGQNIHVYSPIVSMQNIQKTPQTAKKALASRWLSWLSYLEDPRIRFFYDPQMPALKDLPAVDTGKDNKKHPSNFQHIFYTDGSAITSPTKEGHLNAGMGIVYFINKDGNLQKQQEWSISLGNHTAQFAEIAAFEFALKKCLPLGGNILVVTDSNYVAKAYNEELDVWASNGFVNNRKKPLKHISKWKSVADLKRLRPDVVVTHEPGHQKLDSSPHAYGNNLADQLATQASFKVHAGKRTADGSEFEKRTADGSEFESPKKKAKVE

SEQ ID NO: 728 - protein, 2173 aa, synthetic construct
MPAAKRVKLDGGDKKYSIGLDIGTNSVGWAVITDEYKVPSKKFKVLGNTDRHSIKKNLIGALLFDSGETAEATRLKRTARRRYTRRKNRICYLQEIFSNEMAKVDDSFFHRLEESFLVEEDKKHERHPIFGNIVDEVAYHEKYPTIYHLRKKLVDSTDKADLRLIYLALAHMIKFRGHFLIEGDLNPDNSDVDKLFIQLVQTYNQLFEENPINASGVDAKAILSARLSKSRRLENLIAQLPGEKKNGLFGNLIALSLGLTPNFKSNFDLAEDAKLQLSKDTYDDDLDNLLAQIGDQYADLFLAAKNLSDAILLSDILRVNTEITKAPLSASMIKRYDEHHQDLTLLKALVRQQLPEKYKEIFFDQSKNGYAGYIDGGASQEEFYKFIKPILEKMDGTEELLVKLNREDLLRKQRTFDNGSIPHQIHLGELHAILRRQEDFYPFLKDNREKIEKILTFRIPYYVGPLARGNSRFAWMTRKSEETITPWNFEEVVDKGASAQSFIERMTNFDKNLPNEKVLPKHSLLYEYFTVYNELTKVKYVTEGMRKPAFLSGEQKKAIVDLLFKTNRKVTVKQLKEDYFKKIECFDSVEISGVEDRFNASLGTYHDLLKIIKDKDFLDNEENEDILEDIVLTLTLFEDREMIEERLKTYAHLFDDKVMKQLKRRRYTGWGRLSRKLINGIRDKQSGKTILDFLKSDGFANRNFMQLIHDDSLTFKEDIQKAQVSGQGDSLHEHIANLAGSPAIKKGILQTVKVVDELVKVMGRHKPENIVIEMARENQTTQKGQKNSRERMKRIEEGIKELGSQILKEHPVENTQLQNEKLYLYYLQNGRDMYVDQELDINRLSDYDVDHIVPQSFLKDDSIDNKVLTRSDKARGKSDNVPSEEVVKKMKNYWRQLLNAKLITQRKFDNLTKAERGGLSELDKAGFIKRQLVETRQITKHVAQILDSRMNTKYDENDKLIREVKVITLKSKLVSDFRKDFQFYKVREINNYHHAHDAYLNAVVGTALIKKYPKLESEFVYGDYKVYDVRKMIAKSEQEIGKATAKYFFYSNIMNFFKTEITLANGEIRKRPLIETNGETGEIVWDKGRDFATVRKVLSMPQVNIVKKTEVQTGGFSKESILPKRNSDKLIARKKDWDPKKYGGFDSPTVAYSVLVVAKVEKGKSKKLKSVKELLGITIMERSSFEKNPIDFLEAKGYKEVKKDLIIKLPKYSLFELENGRKRMLASAGELQKGNELALPSKYVNFLYLASHYEKLKGSPEDNEQKQLFVEQHKHYLDEIIEQISEFSKRVILADANLDKVLSAYNKHRDKPIREQAENIIHLFTLTNLGAPAAFKYFDTTIDRKRYTSTKEVLDATLIHQSITGLYETRIDLSQLGGDGGGSSGGGEAAAKGGMDLLKPLTVERKGVKIKGYWNSQADITCVPKDLLQGEEPVRQQNVTTIHGTQEGDVYYVNLKIDGRRINTEVIGTTLDYAIITPGDVPWILKKPLELTIKLDLEEQQGTLLNNSILSKKGKEELKQLFEKYSALWQSWENQVGHRRIRPHKIATGTVKPTPQKQYHINPKAKPDIQIVINDLLKQGVLIQKESTMNTPVYPVPKPNGRWRMVLDYRAVNKVTPLIAVQNQHSYGILGSLFKGRYKTTIDLSNGFWAHPIVPEDYWITAFTWQGKQYCWTVLPQGFLNSPGLFTGDVVDLLQGIPNVEVYVDDVYISHDSEKEHLEYLDILFNRLKEAGYIISLKKSNIANSIVDFLGFQITNEGRGLTDTFKEKLENITAPTTLKQLQSILGLLNFARNFIPDFTELIAPLYALIPKSTKNYVPWQIEHSTTLETLITKLNGAEYLQGRKGDKTLIMKVNASYTTGYIRYYNEGEKKPISYVSIVFSKTELKFTELEKLLTTVHKGLLKALDLSMGQNIHVYSPIVSMQNIQKTPQTAKKALASRWLSWLSYLEDPRIRFFYDPQMPALKDLPAVDTGKDNKKHPSNFQHIFYTDGSAITSPTKEGHLNAGMGIVYFINKDGNLQKQQEWSISLGNHTAQFAEIAAFEFALKKCLPLGGNILVVTDSNYVAKAYNEELDVWASNGFVNNRKKPLKHISKWKSVADLKRLRPDVVVTHEPGHQKLDSSPHAYGNNLADQLATQASFKVHAGKRTADGSEFEKRTADGSEFESPKKKAKVE

SEQ ID NO: 729 - protein, 2171 aa, synthetic construct
MPAAKRVKLDGGDKKYSIGLDIGTNSVGWAVITDEYKVPSKKFKVLGNTDRHSIKKNLIGALLFDSGETAEATRLKRTARRRYTRRKNRICYLQEIFSNEMAKVDDSFFHRLEESFLVEEDKKHERHPIFGNIVDEVAYHEKYPTIYHLRKKLVDSTDKADLRLIYLALAHMIKFRGHFLIEGDLNPDNSDVDKLFIQLVQTYNQLFEENPINASGVDAKAILSARLSKSRRLENLIAQLPGEKKNGLFGNLIALSLGLTPNFKSNFDLAEDAKLQLSKDTYDDDLDNLLAQIGDQYADLFLAAKNLSDAILLSDILRVNTEITKAPLSASMIKRYDEHHQDLTLLKALVRQQLPEKYKEIFFDQSKNGYAGYIDGGASQEEFYKFIKPILEKMDGTEELLVKLNREDLLRKQRTFDNGSIPHQIHLGELHAILRRQEDFYPFLKDNREKIEKILTFRIPYYVGPLARGNSRFAWMTRKSEETITPWNFEEVVDKGASAQSFIERMTNFDKNLPNEKVLPKHSLLYEYFTVYNELTKVKYVTEGMRKPAFLSGEQKKAIVDLLFKTNRKVTVKQLKEDYFKKIECFDSVEISGVEDRFNASLGTYHDLLKIIKDKDFLDNEENEDILEDIVLTLTLFEDREMIEERLKTYAHLFDDKVMKQLKRRRYTGWGRLSRKLINGIRDKQSGKTILDFLKSDGFANRNFMQLIHDDSLTFKEDIQKAQVSGQGDSLHEHIANLAGSPAIKKGILQTVKVVDELVKVMGRHKPENIVIEMARENQTTQKGQKNSRERMKRIEEGIKELGSQILKEHPVENTQLQNEKLYLYYLQNGRDMYVDQELDINRLSDYDVDHIVPQSFLKDDSIDNKVLTRSDKARGKSDNVPSEEVVKKMKNYWRQLLNAKLITQRKFDNLTKAERGGLSELDKAGFIKRQLVETRQITKHVAQILDSRMNTKYDENDKLIREVKVITLKSKLVSDFRKDFQFYKVREINNYHHAHDAYLNAVVGTALIKKYPKLESEFVYGDYKVYDVRKMIAKSEQEIGKATAKYFFYSNIMNFFKTEITLANGEIRKRPLIETNGETGEIVWDKGRDFATVRKVLSMPQVNIVKKTEVQTGGFSKESILPKRNSDKLIARKKDWDPKKYGGFDSPTVAYSVLVVAKVEKGKSKKLKSVKELLGITIMERSSFEKNPIDFLEAKGYKEVKKDLIIKLPKYSLFELENGRKRMLASAGELQKGNELALPSKYVNFLYLASHYEKLKGSPEDNEQKQLFVEQHKHYLDEIIEQISEFSKRVILADANLDKVLSAYNKHRDKPIREQAENIIHLFTLTNLGAPAAFKYFDTTIDRKRYTSTKEVLDATLIHQSITGLYETRIDLSQLGGDGGGGSGSSGGGGGMDLLKPLTVERKGVKIKGYWNSQADITCVPKDLLQGEEPVRQQNVTTIHGTQEGDVYYVNLKIDGRRINTEVIGTTLDYAIITPGDVPWILKKPLELTIKLDLEEQQGTLLNNSILSKKGKEELKQLFEKYSALWQSWENQVGHRRIRPHKIATGTVKPTPQKQYHINPKAKPDIQIVINDLLKQGVLIQKESTMNTPVYPVPKPNGRWRMVLDYRAVNKVTPLIAVQNQHSYGILGSLFKGRYKTTIDLSNGFWAHPIVPEDYWITAFTWQGKQYCWTVLPQGFLNSPGLFTGDVVDLLQGIPNVEVYVDDVYISHDSEKEHLEYLDILFNRLKEAGYIISLKKSNIANSIVDFLGFQITNEGRGLTDTFKEKLENITAPTTLKQLQSILGLLNFARNFIPDFTELIAPLYALIPKSTKNYVPWQIEHSTTLETLITKLNGAEYLQGRKGDKTLIMKVNASYTTGYIRYYNEGEKKPISYVSIVFSKTELKFTELEKLLTTVHKGLLKALDLSMGQNIHVYSPIVSMQNIQKTPQTAKKALASRWLSWLSYLEDPRIRFFYDPQMPALKDLPAVDTGKDNKKHPSNFQHIFYTDGSAITSPTKEGHLNAGMGIVYFINKDGNLQKQQEWSISLGNHTAQFAEIAAFEFALKKCLPLGGNILVVTDSNYVAKAYNEELDVWASNGFVNNRKKPLKHISKWKSVADLKRLRPDVVVTHEPGHQKLDSSPHAYGNNLADQLATQASFKVHAGKRTADGSEFEKRTADGSEFESPKKKAKVE

SEQ ID NO: 730 - protein, 2173 aa, synthetic construct
MPAAKRVKLDGGDKKYSIGLDIGTNSVGWAVITDEYKVPSKKFKVLGNTDRHSIKKNLIGALLFDSGETAEATRLKRTARRRYTRRKNRICYLQEIFSNEMAKVDDSFFHRLEESFLVEEDKKHERHPIFGNIVDEVAYHEKYPTIYHLRKKLVDSTDKADLRLIYLALAHMIKFRGHFLIEGDLNPDNSDVDKLFIQLVQTYNQLFEENPINASGVDAKAILSARLSKSRRLENLIAQLPGEKKNGLFGNLIALSLGLTPNFKSNFDLAEDAKLQLSKDTYDDDLDNLLAQIGDQYADLFLAAKNLSDAILLSDILRVNTEITKAPLSASMIKRYDEHHQDLTLLKALVRQQLPEKYKEIFFDQSKNGYAGYIDGGASQEEFYKFIKPILEKMDGTEELLVKLNREDLLRKQRTFDNGSIPHQIHLGELHAILRRQEDFYPFLKDNREKIEKILTFRIPYYVGPLARGNSRFAWMTRKSEETITPWNFEEVVDKGASAQSFIERMTNFDKNLPNEKVLPKHSLLYEYFTVYNELTKVKYVTEGMRKPAFLSGEQKKAIVDLLFKTNRKVTVKQLKEDYFKKIECFDSVEISGVEDRFNASLGTYHDLLKIIKDKDFLDNEENEDILEDIVLTLTLFEDREMIEERLKTYAHLFDDKVMKQLKRRRYTGWGRLSRKLINGIRDKQSGKTILDFLKSDGFANRNFMQLIHDDSLTFKEDIQKAQVSGQGDSLHEHIANLAGSPAIKKGILQTVKVVDELVKVMGRHKPENIVIEMARENQTTQKGQKNSRERMKRIEEGIKELGSQILKEHPVENTQLQNEKLYLYYLQNGRDMYVDQELDINRLSDYDVDHIVPQSFLKDDSIDNKVLTRSDKARGKSDNVPSEEVVKKMKNYWRQLLNAKLITQRKFDNLTKAERGGLSELDKAGFIKRQLVETRQITKHVAQILDSRMNTKYDENDKLIREVKVITLKSKLVSDFRKDFQFYKVREINNYHHAHDAYLNAVVGTALIKKYPKLESEFVYGDYKVYDVRKMIAKSEQEIGKATAKYFFYSNIMNFFKTEITLANGEIRKRPLIETNGETGEIVWDKGRDFATVRKVLSMPQVNIVKKTEVQTGGFSKESILPKRNSDKLIARKKDWDPKKYGGFDSPTVAYSVLVVAKVEKGKSKKLKSVKELLGITIMERSSFEKNPIDFLEAKGYKEVKKDLIIKLPKYSLFELENGRKRMLASAGELQKGNELALPSKYVNFLYLASHYEKLKGSPEDNEQKQLFVEQHKHYLDEIIEQISEFSKRVILADANLDKVLSAYNKHRDKPIREQAENIIHLFTLTNLGAPAAFKYFDTTIDRKRYTSTKEVLDATLIHQSITGLYETRIDLSQLGGDGGGSSGGSEAAAKGGMDLLKPLTVERKGVKIKGYWNSQADITCVPKDLLQGEEPVRQQNVTTIHGTQEGDVYYVNLKIDGRRINTEVIGTTLDYAIITPGDVPWILKKPLELTIKLDLEEQQGTLLNNSILSKKGKEELKQLFEKYSALWQSWENQVGHRRIRPHKIATGTVKPTPQKQYHINPKAKPDIQIVINDLLKQGVLIQKESTMNTPVYPVPKPNGRWRMVLDYRAVNKVTPLIAVQNQHSYGILGSLFKGRYKTTIDLSNGFWAHPIVPEDYWITAFTWQGKQYCWTVLPQGFLNSPGLFTGDVVDLLQGIPNVEVYVDDVYISHDSEKEHLEYLDILFNRLKEAGYIISLKKSNIANSIVDFLGFQITNEGRGLTDTFKEKLENITAPTTLKQLQSILGLLNFARNFIPDFTELIAPLYALIPKSTKNYVPWQIEHSTTLETLITKLNGAEYLQGRKGDKTLIMKVNASYTTGYIRYYNEGEKKPISYVSIVFSKTELKFTELEKLLTTVHKGLLKALDLSMGQNIHVYSPIVSMQNIQKTPQTAKKALASRWLSWLSYLEDPRIRFFYDPQMPALKDLPAVDTGKDNKKHPSNFQHIFYTDGSAITSPTKEGHLNAGMGIVYFINKDGNLQKQQEWSISLGNHTAQFAEIAAFEFALKKCLPLGGNILVVTDSNYVAKAYNEELDVWASNGFVNNRKKPLKHISKWKSVADLKRLRPDVVVTHEPGHQKLDSSPHAYGNNLADQLATQASFKVHAGKRTADGSEFEKRTADGSEFESPKKKAKVE

SEQ ID NO: 731 - protein, 2171 aa, synthetic construct
MPAAKRVKLDGGDKKYSIGLDIGTNSVGWAVITDEYKVPSKKFKVLGNTDRHSIKKNLIGALLFDSGETAEATRLKRTARRRYTRRKNRICYLQEIFSNEMAKVDDSFFHRLEESFLVEEDKKHERHPIFGNIVDEVAYHEKYPTIYHLRKKLVDSTDKADLRLIYLALAHMIKFRGHFLIEGDLNPDNSDVDKLFIQLVQTYNQLFEENPINASGVDAKAILSARLSKSRRLENLIAQLPGEKKNGLFGNLIALSLGLTPNFKSNFDLAEDAKLQLSKDTYDDDLDNLLAQIGDQYADLFLAAKNLSDAILLSDILRVNTEITKAPLSASMIKRYDEHHQDLTLLKALVRQQLPEKYKEIFFDQSKNGYAGYIDGGASQEEFYKFIKPILEKMDGTEELLVKLNREDLLRKQRTFDNGSIPHQIHLGELHAILRRQEDFYPFLKDNREKIEKILTFRIPYYVGPLARGNSRFAWMTRKSEETITPWNFEEVVDKGASAQSFIERMTNFDKNLPNEKVLPKHSLLYEYFTVYNELTKVKYVTEGMRKPAFLSGEQKKAIVDLLFKTNRKVTVKQLKEDYFKKIECFDSVEISGVEDRFNASLGTYHDLLKIIKDKDFLDNEENEDILEDIVLTLTLFEDREMIEERLKTYAHLFDDKVMKQLKRRRYTGWGRLSRKLINGIRDKQSGKTILDFLKSDGFANRNFMQLIHDDSLTFKEDIQKAQVSGQGDSLHEHIANLAGSPAIKKGILQTVKVVDELVKVMGRHKPENIVIEMARENQTTQKGQKNSRERMKRIEEGIKELGSQILKEHPVENTQLQNEKLYLYYLQNGRDMYVDQELDINRLSDYDVDHIVPQSFLKDDSIDNKVLTRSDKARGKSDNVPSEEVVKKMKNYWRQLLNAKLITQRKFDNLTKAERGGLSELDKAGFIKRQLVETRQITKHVAQILDSRMNTKYDENDKLIREVKVITLKSKLVSDFRKDFQFYKVREINNYHHAHDAYLNAVVGTALIKKYPKLESEFVYGDYKVYDVRKMIAKSEQEIGKATAKYFFYSNIMNFFKTEITLANGEIRKRPLIETNGETGEIVWDKGRDFATVRKVLSMPQVNIVKKTEVQTGGFSKESILPKRNSDKLIARKKDWDPKKYGGFDSPTVAYSVLVVAKVEKGKSKKLKSVKELLGITIMERSSFEKNPIDFLEAKGYKEVKKDLIIKLPKYSLFELENGRKRMLASAGELQKGNELALPSKYVNFLYLASHYEKLKGSPEDNEQKQLFVEQHKHYLDEIIEQISEFSKRVILADANLDKVLSAYNKHRDKPIREQAENIIHLFTLTNLGAPAAFKYFDTTIDRKRYTSTKEVLDATLIHQSITGLYETRIDLSQLGGDGGGGSGGGPAPGGMDLLKPLTVERKGVKIKGYWNSQADITCVPKDLLQGEEPVRQQNVTTIHGTQEGDVYYVNLKIDGRRINTEVIGTTLDYAIITPGDVPWILKKPLELTIKLDLEEQQGTLLNNSILSKKGKEELKQLFEKYSALWQSWENQVGHRRIRPHKIATGTVKPTPQKQYHINPKAKPDIQIVINDLLKQGVLIQKESTMNTPVYPVPKPNGRWRMVLDYRAVNKVTPLIAVQNQHSYGILGSLFKGRYKTTIDLSNGFWAHPIVPEDYWITAFTWQGKQYCWTVLPQGFLNSPGLFTGDVVDLLQGIPNVEVYVDDVYISHDSEKEHLEYLDILFNRLKEAGYIISLKKSNIANSIVDFLGFQITNEGRGLTDTFKEKLENITAPTTLKQLQSILGLLNFARNFIPDFTELIAPLYALIPKSTKNYVPWQIEHSTTLETLITKLNGAEYLQGRKGDKTLIMKVNASYTTGYIRYYNEGEKKPISYVSIVFSKTELKFTELEKLLTTVHKGLLKALDLSMGQNIHVYSPIVSMQNIQKTPQTAKKALASRWLSWLSYLEDPRIRFFYDPQMPALKDLPAVDTGKDNKKHPSNFQHIFYTDGSAITSPTKEGHLNAGMGIVYFINKDGNLQKQQEWSISLGNHTAQFAEIAAFEFALKKCLPLGGNILVVTDSNYVAKAYNEELDVWASNGFVNNRKKPLKHISKWKSVADLKRLRPDVVVTHEPGHQKLDSSPHAYGNNLADQLATQASFKVHAGKRTADGSEFEKRTADGSEFESPKKKAKVE

SEQ ID NO: 732 - protein, 2173 aa, synthetic construct
MPAAKRVKLDGGDKKYSIGLDIGTNSVGWAVITDEYKVPSKKFKVLGNTDRHSIKKNLIGALLFDSGETAEATRLKRTARRRYTRRKNRICYLQEIFSNEMAKVDDSFFHRLEESFLVEEDKKHERHPIFGNIVDEVAYHEKYPTIYHLRKKLVDSTDKADLRLIYLALAHMIKFRGHFLIEGDLNPDNSDVDKLFIQLVQTYNQLFEENPINASGVDAKAILSARLSKSRRLENLIAQLPGEKKNGLFGNLIALSLGLTPNFKSNFDLAEDAKLQLSKDTYDDDLDNLLAQIGDQYADLFLAAKNLSDAILLSDILRVNTEITKAPLSASMIKRYDEHHQDLTLLKALVRQQLPEKYKEIFFDQSKNGYAGYIDGGASQEEFYKFIKPILEKMDGTEELLVKLNREDLLRKQRTFDNGSIPHQIHLGELHAILRRQEDFYPFLKDNREKIEKILTFRIPYYVGPLARGNSRFAWMTRKSEETITPWNFEEVVDKGASAQSFIERMTNFDKNLPNEKVLPKHSLLYEYFTVYNELTKVKYVTEGMRKPAFLSGEQKKAIVDLLFKTNRKVTVKQLKEDYFKKIECFDSVEISGVEDRFNASLGTYHDLLKIIKDKDFLDNEENEDILEDIVLTLTLFEDREMIEERLKTYAHLFDDKVMKQLKRRRYTGWGRLSRKLINGIRDKQSGKTILDFLKSDGFANRNFMQLIHDDSLTFKEDIQKAQVSGQGDSLHEHIANLAGSPAIKKGILQTVKVVDELVKVMGRHKPENIVIEMARENQTTQKGQKNSRERMKRIEEGIKELGSQILKEHPVENTQLQNEKLYLYYLQNGRDMYVDQELDINRLSDYDVDHIVPQSFLKDDSIDNKVLTRSDKARGKSDNVPSEEVVKKMKNYWRQLLNAKLITQRKFDNLTKAERGGLSELDKAGFIKRQLVETRQITKHVAQILDSRMNTKYDENDKLIREVKVITLKSKLVSDFRKDFQFYKVREINNYHHAHDAYLNAVVGTALIKKYPKLESEFVYGDYKVYDVRKMIAKSEQEIGKATAKYFFYSNIMNFFKTEITLANGEIRKRPLIETNGETGEIVWDKGRDFATVRKVLSMPQVNIVKKTEVQTGGFSKESILPKRNSDKLIARKKDWDPKKYGGFDSPTVAYSVLVVAKVEKGKSKKLKSVKELLGITIMERSSFEKNPIDFLEAKGYKEVKKDLIIKLPKYSLFELENGRKRMLASAGELQKGNELALPSKYVNFLYLASHYEKLKGSPEDNEQKQLFVEQHKHYLDEIIEQISEFSKRVILADANLDKVLSAYNKHRDKPIREQAENIIHLFTLTNLGAPAAFKYFDTTIDRKRYTSTKEVLDATLIHQSITGLYETRIDLSQLGGDGGGGGEAAAKPAPGGMDLLKPLTVERKGVKIKGYWNSQADITCVPKDLLQGEEPVRQQNVTTIHGTQEGDVYYVNLKIDGRRINTEVIGTTLDYAIITPGDVPWILKKPLELTIKLDLEEQQGTLLNNSILSKKGKEELKQLFEKYSALWQSWENQVGHRRIRPHKIATGTVKPTPQKQYHINPKAKPDIQIVINDLLKQGVLIQKESTMNTPVYPVPKPNGRWRMVLDYRAVNKVTPLIAVQNQHSYGILGSLFKGRYKTTIDLSNGFWAHPIVPEDYWITAFTWQGKQYCWTVLPQGFLNSPGLFTGDVVDLLQGIPNVEVYVDDVYISHDSEKEHLEYLDILFNRLKEAGYIISLKKSNIANSIVDFLGFQITNEGRGLTDTFKEKLENITAPTTLKQLQSILGLLNFARNFIPDFTELIAPLYALIPKSTKNYVPWQIEHSTTLETLITKLNGAEYLQGRKGDKTLIMKVNASYTTGYIRYYNEGEKKPISYVSIVFSKTELKFTELEKLLTTVHKGLLKALDLSMGQNIHVYSPIVSMQNIQKTPQTAKKALASRWLSWLSYLEDPRIRFFYDPQMPALKDLPAVDTGKDNKKHPSNFQHIFYTDGSAITSPTKEGHLNAGMGIVYFINKDGNLQKQQEWSISLGNHTAQFAEIAAFEFALKKCLPLGGNILVVTDSNYVAKAYNEELDVWASNGFVNNRKKPLKHISKWKSVADLKRLRPDVVVTHEPGHQKLDSSPHAYGNNLADQLATQASFKVHAGKRTADGSEFEKRTADGSEFESPKKKAKVE

SEQ ID NO: 733 - protein, 2167 aa, synthetic construct
MPAAKRVKLDGGDKKYSIGLDIGTNSVGWAVITDEYKVPSKKFKVLGNTDRHSIKKNLIGALLFDSGETAEATRLKRTARRRYTRRKNRICYLQEIFSNEMAKVDDSFFHRLEESFLVEEDKKHERHPIFGNIVDEVAYHEKYPTIYHLRKKLVDSTDKADLRLIYLALAHMIKFRGHFLIEGDLNPDNSDVDKLFIQLVQTYNQLFEENPINASGVDAKAILSARLSKSRRLENLIAQLPGEKKNGLFGNLIALSLGLTPNFKSNFDLAEDAKLQLSKDTYDDDLDNLLAQIGDQYADLFLAAKNLSDAILLSDILRVNTEITKAPLSASMIKRYDEHHQDLTLLKALVRQQLPEKYKEIFFDQSKNGYAGYIDGGASQEEFYKFIKPILEKMDGTEELLVKLNREDLLRKQRTFDNGSIPHQIHLGELHAILRRQEDFYPFLKDNREKIEKILTFRIPYYVGPLARGNSRFAWMTRKSEETITPWNFEEVVDKGASAQSFIERMTNFDKNLPNEKVLPKHSLLYEYFTVYNELTKVKYVTEGMRKPAFLSGEQKKAIVDLLFKTNRKVTVKQLKEDYFKKIECFDSVEISGVEDRFNASLGTYHDLLKIIKDKDFLDNEENEDILEDIVLTLTLFEDREMIEERLKTYAHLFDDKVMKQLKRRRYTGWGRLSRKLINGIRDKQSGKTILDFLKSDGFANRNFMQLIHDDSLTFKEDIQKAQVSGQGDSLHEHIANLAGSPAIKKGILQTVKVVDELVKVMGRHKPENIVIEMARENQTTQKGQKNSRERMKRIEEGIKELGSQILKEHPVENTQLQNEKLYLYYLQNGRDMYVDQELDINRLSDYDVDHIVPQSFLKDDSIDNKVLTRSDKARGKSDNVPSEEVVKKMKNYWRQLLNAKLITQRKFDNLTKAERGGLSELDKAGFIKRQLVETRQITKHVAQILDSRMNTKYDENDKLIREVKVITLKSKLVSDFRKDFQFYKVREINNYHHAHDAYLNAVVGTALIKKYPKLESEFVYGDYKVYDVRKMIAKSEQEIGKATAKYFFYSNIMNFFKTEITLANGEIRKRPLIETNGETGEIVWDKGRDFATVRKVLSMPQVNIVKKTEVQTGGFSKESILPKRNSDKLIARKKDWDPKKYGGFDSPTVAYSVLVVAKVEKGKSKKLKSVKELLGITIMERSSFEKNPIDFLEAKGYKEVKKDLIIKLPKYSLFELENGRKRMLASAGELQKGNELALPSKYVNFLYLASHYEKLKGSPEDNEQKQLFVEQHKHYLDEIIEQISEFSKRVILADANLDKVLSAYNKHRDKPIREQAENIIHLFTLTNLGAPAAFKYFDTTIDRKRYTSTKEVLDATLIHQSITGLYETRIDLSQLGGDGGGGGGGGGMDLLKPLTVERKGVKIKGYWNSQADITCVPKDLLQGEEPVRQQNVTTIHGTQEGDVYYVNLKIDGRRINTEVIGTTLDYAIITPGDVPWILKKPLELTIKLDLEEQQGTLLNNSILSKKGKEELKQLFEKYSALWQSWENQVGHRRIRPHKIATGTVKPTPQKQYHINPKAKPDIQIVINDLLKQGVLIQKESTMNTPVYPVPKPNGRWRMVLDYRAVNKVTPLIAVQNQHSYGILGSLFKGRYKTTIDLSNGFWAHPIVPEDYWITAFTWQGKQYCWTVLPQGFLNSPGLFTGDVVDLLQGIPNVEVYVDDVYISHDSEKEHLEYLDILFNRLKEAGYIISLKKSNIANSIVDFLGFQITNEGRGLTDTFKEKLENITAPTTLKQLQSILGLLNFARNFIPDFTELIAPLYALIPKSTKNYVPWQIEHSTTLETLITKLNGAEYLQGRKGDKTLIMKVNASYTTGYIRYYNEGEKKPISYVSIVFSKTELKFTELEKLLTTVHKGLLKALDLSMGQNIHVYSPIVSMQNIQKTPQTAKKALASRWLSWLSYLEDPRIRFFYDPQMPALKDLPAVDTGKDNKKHPSNFQHIFYTDGSAITSPTKEGHLNAGMGIVYFINKDGNLQKQQEWSISLGNHTAQFAEIAAFEFALKKCLPLGGNILVVTDSNYVAKAYNEELDVWASNGFVNNRKKPLKHISKWKSVADLKRLRPDVVVTHEPGHQKLDSSPHAYGNNLADQLATQASFKVHAGKRTADGSEFEKRTADGSEFESPKKKAKVE

SEQ ID NO: 734 - protein, 2165 aa, synthetic construct
MPAAKRVKLDGGDKKYSIGLDIGTNSVGWAVITDEYKVPSKKFKVLGNTDRHSIKKNLIGALLFDSGETAEATRLKRTARRRYTRRKNRICYLQEIFSNEMAKVDDSFFHRLEESFLVEEDKKHERHPIFGNIVDEVAYHEKYPTIYHLRKKLVDSTDKADLRLIYLALAHMIKFRGHFLIEGDLNPDNSDVDKLFIQLVQTYNQLFEENPINASGVDAKAILSARLSKSRRLENLIAQLPGEKKNGLFGNLIALSLGLTPNFKSNFDLAEDAKLQLSKDTYDDDLDNLLAQIGDQYADLFLAAKNLSDAILLSDILRVNTEITKAPLSASMIKRYDEHHQDLTLLKALVRQQLPEKYKEIFFDQSKNGYAGYIDGGASQEEFYKFIKPILEKMDGTEELLVKLNREDLLRKQRTFDNGSIPHQIHLGELHAILRRQEDFYPFLKDNREKIEKILTFRIPYYVGPLARGNSRFAWMTRKSEETITPWNFEEVVDKGASAQSFIERMTNFDKNLPNEKVLPKHSLLYEYFTVYNELTKVKYVTEGMRKPAFLSGEQKKAIVDLLFKTNRKVTVKQLKEDYFKKIECFDSVEISGVEDRFNASLGTYHDLLKIIKDKDFLDNEENEDILEDIVLTLTLFEDREMIEERLKTYAHLFDDKVMKQLKRRRYTGWGRLSRKLINGIRDKQSGKTILDFLKSDGFANRNFMQLIHDDSLTFKEDIQKAQVSGQGDSLHEHIANLAGSPAIKKGILQTVKVVDELVKVMGRHKPENIVIEMARENQTTQKGQKNSRERMKRIEEGIKELGSQILKEHPVENTQLQNEKLYLYYLQNGRDMYVDQELDINRLSDYDVDHIVPQSFLKDDSIDNKVLTRSDKARGKSDNVPSEEVVKKMKNYWRQLLNAKLITQRKFDNLTKAERGGLSELDKAGFIKRQLVETRQITKHVAQILDSRMNTKYDENDKLIREVKVITLKSKLVSDFRKDFQFYKVREINNYHHAHDAYLNAVVGTALIKKYPKLESEFVYGDYKVYDVRKMIAKSEQEIGKATAKYFFYSNIMNFFKTEITLANGEIRKRPLIETNGETGEIVWDKGRDFATVRKVLSMPQVNIVKKTEVQTGGFSKESILPKRNSDKLIARKKDWDPKKYGGFDSPTVAYSVLVVAKVEKGKSKKLKSVKELLGITIMERSSFEKNPIDFLEAKGYKEVKKDLIIKLPKYSLFELENGRKRMLASAGELQKGNELALPSKYVNFLYLASHYEKLKGSPEDNEQKQLFVEQHKHYLDEIIEQISEFSKRVILADANLDKVLSAYNKHRDKPIREQAENIIHLFTLTNLGAPAAFKYFDTTIDRKRYTSTKEVLDATLIHQSITGLYETRIDLSQLGGDGGGGGGGMDLLKPLTVERKGVKIKGYWNSQADITCVPKDLLQGEEPVRQQNVTTIHGTQEGDVYYVNLKIDGRRINTEVIGTTLDYAIITPGDVPWILKKPLELTIKLDLEEQQGTLLNNSILSKKGKEELKQLFEKYSALWQSWENQVGHRRIRPHKIATGTVKPTPQKQYHINPKAKPDIQIVINDLLKQGVLIQKESTMNTPVYPVPKPNGRWRMVLDYRAVNKVTPLIAVQNQHSYGILGSLFKGRYKTTIDLSNGFWAHPIVPEDYWITAFTWQGKQYCWTVLPQGFLNSPGLFTGDVVDLLQGIPNVEVYVDDVYISHDSEKEHLEYLDILFNRLKEAGYIISLKKSNIANSIVDFLGFQITNEGRGLTDTFKEKLENITAPTTLKQLQSILGLLNFARNFIPDFTELIAPLYALIPKSTKNYVPWQIEHSTTLETLITKLNGAEYLQGRKGDKTLIMKVNASYTTGYIRYYNEGEKKPISYVSIVFSKTELKFTELEKLLTTVHKGLLKALDLSMGQNIHVYSPIVSMQNIQKTPQTAKKALASRWLSWLSYLEDPRIRFFYDPQMPALKDLPAVDTGKDNKKHPSNFQHIFYTDGSAITSPTKEGHLNAGMGIVYFINKDGNLQKQQEWSISLGNHTAQFAEIAAFEFALKKCLPLGGNILVVTDSNYVAKAYNEELDVWASNGFVNNRKKPLKHISKWKSVADLKRLRPDVVVTHEPGHQKLDSSPHAYGNNLADQLATQASFKVHAGKRTADGSEFEKRTADGSEFESPKKKAKVE

SEQ ID NO: 735 - protein, 2167 aa, synthetic construct
MPAAKRVKLDGGDKKYSIGLDIGTNSVGWAVITDEYKVPSKKFKVLGNTDRHSIKKNLIGALLFDSGETAEATRLKRTARRRYTRRKNRICYLQEIFSNEMAKVDDSFFHRLEESFLVEEDKKHERHPIFGNIVDEVAYHEKYPTIYHLRKKLVDSTDKADLRLIYLALAHMIKFRGHFLIEGDLNPDNSDVDKLFIQLVQTYNQLFEENPINASGVDAKAILSARLSKSRRLENLIAQLPGEKKNGLFGNLIALSLGLTPNFKSNFDLAEDAKLQLSKDTYDDDLDNLLAQIGDQYADLFLAAKNLSDAILLSDILRVNTEITKAPLSASMIKRYDEHHQDLTLLKALVRQQLPEKYKEIFFDQSKNGYAGYIDGGASQEEFYKFIKPILEKMDGTEELLVKLNREDLLRKQRTFDNGSIPHQIHLGELHAILRRQEDFYPFLKDNREKIEKILTFRIPYYVGPLARGNSRFAWMTRKSEETITPWNFEEVVDKGASAQSFIERMTNFDKNLPNEKVLPKHSLLYEYFTVYNELTKVKYVTEGMRKPAFLSGEQKKAIVDLLFKTNRKVTVKQLKEDYFKKIECFDSVEISGVEDRFNASLGTYHDLLKIIKDKDFLDNEENEDILEDIVLTLTLFEDREMIEERLKTYAHLFDDKVMKQLKRRRYTGWGRLSRKLINGIRDKQSGKTILDFLKSDGFANRNFMQLIHDDSLTFKEDIQKAQVSGQGDSLHEHIANLAGSPAIKKGILQTVKVVDELVKVMGRHKPENIVIEMARENQTTQKGQKNSRERMKRIEEGIKELGSQILKEHPVENTQLQNEKLYLYYLQNGRDMYVDQELDINRLSDYDVDHIVPQSFLKDDSIDNKVLTRSDKARGKSDNVPSEEVVKKMKNYWRQLLNAKLITQRKFDNLTKAERGGLSELDKAGFIKRQLVETRQITKHVAQILDSRMNTKYDENDKLIREVKVITLKSKLVSDFRKDFQFYKVREINNYHHAHDAYLNAVVGTALIKKYPKLESEFVYGDYKVYDVRKMIAKSEQEIGKATAKYFFYSNIMNFFKTEITLANGEIRKRPLIETNGETGEIVWDKGRDFATVRKVLSMPQVNIVKKTEVQTGGFSKESILPKRNSDKLIARKKDWDPKKYGGFDSPTVAYSVLVVAKVEKGKSKKLKSVKELLGITIMERSSFEKNPIDFLEAKGYKEVKKDLIIKLPKYSLFELENGRKRMLASAGELQKGNELALPSKYVNFLYLASHYEKLKGSPEDNEQKQLFVEQHKHYLDEIIEQISEFSKRVILADANLDKVLSAYNKHRDKPIREQAENIIHLFTLTNLGAPAAFKYFDTTIDRKRYTSTKEVLDATLIHQSITGLYETRIDLSQLGGDGGPAPAPGGMDLLKPLTVERKGVKIKGYWNSQADITCVPKDLLQGEEPVRQQNVTTIHGTQEGDVYYVNLKIDGRRINTEVIGTTLDYAIITPGDVPWILKKPLELTIKLDLEEQQGTLLNNSILSKKGKEELKQLFEKYSALWQSWENQVGHRRIRPHKIATGTVKPTPQKQYHINPKAKPDIQIVINDLLKQGVLIQKESTMNTPVYPVPKPNGRWRMVLDYRAVNKVTPLIAVQNQHSYGILGSLFKGRYKTTIDLSNGFWAHPIVPEDYWITAFTWQGKQYCWTVLPQGFLNSPGLFTGDVVDLLQGIPNVEVYVDDVYISHDSEKEHLEYLDILFNRLKEAGYIISLKKSNIANSIVDFLGFQITNEGRGLTDTFKEKLENITAPTTLKQLQSILGLLNFARNFIPDFTELIAPLYALIPKSTKNYVPWQIEHSTTLETLITKLNGAEYLQGRKGDKTLIMKVNASYTTGYIRYYNEGEKKPISYVSIVFSKTELKFTELEKLLTTVHKGLLKALDLSMGQNIHVYSPIVSMQNIQKTPQTAKKALASRWLSWLSYLEDPRIRFFYDPQMPALKDLPAVDTGKDNKKHPSNFQHIFYTDGSAITSPTKEGHLNAGMGIVYFINKDGNLQKQQEWSISLGNHTAQFAEIAAFEFALKKCLPLGGNILVVTDSNYVAKAYNEELDVWASNGFVNNRKKPLKHISKWKSVADLKRLRPDVVVTHEPGHQKLDSSPHAYGNNLADQLATQASFKVHAGKRTADGSEFEKRTADGSEFESPKKKAKVE

SEQ ID NO: 736 - protein, 2171 aa, synthetic construct
MPAAKRVKLDGGDKKYSIGLDIGTNSVGWAVITDEYKVPSKKFKVLGNTDRHSIKKNLIGALLFDSGETAEATRLKRTARRRYTRRKNRICYLQEIFSNEMAKVDDSFFHRLEESFLVEEDKKHERHPIFGNIVDEVAYHEKYPTIYHLRKKLVDSTDKADLRLIYLALAHMIKFRGHFLIEGDLNPDNSDVDKLFIQLVQTYNQLFEENPINASGVDAKAILSARLSKSRRLENLIAQLPGEKKNGLFGNLIALSLGLTPNFKSNFDLAEDAKLQLSKDTYDDDLDNLLAQIGDQYADLFLAAKNLSDAILLSDILRVNTEITKAPLSASMIKRYDEHHQDLTLLKALVRQQLPEKYKEIFFDQSKNGYAGYIDGGASQEEFYKFIKPILEKMDGTEELLVKLNREDLLRKQRTFDNGSIPHQIHLGELHAILRRQEDFYPFLKDNREKIEKILTFRIPYYVGPLARGNSRFAWMTRKSEETITPWNFEEVVDKGASAQSFIERMTNFDKNLPNEKVLPKHSLLYEYFTVYNELTKVKYVTEGMRKPAFLSGEQKKAIVDLLFKTNRKVTVKQLKEDYFKKIECFDSVEISGVEDRFNASLGTYHDLLKIIKDKDFLDNEENEDILEDIVLTLTLFEDREMIEERLKTYAHLFDDKVMKQLKRRRYTGWGRLSRKLINGIRDKQSGKTILDFLKSDGFANRNFMQLIHDDSLTFKEDIQKAQVSGQGDSLHEHIANLAGSPAIKKGILQTVKVVDELVKVMGRHKPENIVIEMARENQTTQKGQKNSRERMKRIEEGIKELGSQILKEHPVENTQLQNEKLYLYYLQNGRDMYVDQELDINRLSDYDVDHIVPQSFLKDDSIDNKVLTRSDKARGKSDNVPSEEVVKKMKNYWRQLLNAKLITQRKFDNLTKAERGGLSELDKAGFIKRQLVETRQITKHVAQILDSRMNTKYDENDKLIREVKVITLKSKLVSDFRKDFQFYKVREINNYHHAHDAYLNAVVGTALIKKYPKLESEFVYGDYKVYDVRKMIAKSEQEIGKATAKYFFYSNIMNFFKTEITLANGEIRKRPLIETNGETGEIVWDKGRDFATVRKVLSMPQVNIVKKTEVQTGGFSKESILPKRNSDKLIARKKDWDPKKYGGFDSPTVAYSVLVVAKVEKGKSKKLKSVKELLGITIMERSSFEKNPIDFLEAKGYKEVKKDLIIKLPKYSLFELENGRKRMLASAGELQKGNELALPSKYVNFLYLASHYEKLKGSPEDNEQKQLFVEQHKHYLDEIIEQISEFSKRVILADANLDKVLSAYNKHRDKPIREQAENIIHLFTLTNLGAPAAFKYFDTTIDRKRYTSTKEVLDATLIHQSITGLYETRIDLSQLGGDGGGSSGGGGGSGGMDLLKPLTVERKGVKIKGYWNSQADITCVPKDLLQGEEPVRQQNVTTIHGTQEGDVYYVNLKIDGRRINTEVIGTTLDYAIITPGDVPWILKKPLELTIKLDLEEQQGTLLNNSILSKKGKEELKQLFEKYSALWQSWENQVGHRRIRPHKIATGTVKPTPQKQYHINPKAKPDIQIVINDLLKQGVLIQKESTMNTPVYPVPKPNGRWRMVLDYRAVNKVTPLIAVQNQHSYGILGSLFKGRYKTTIDLSNGFWAHPIVPEDYWITAFTWQGKQYCWTVLPQGFLNSPGLFTGDVVDLLQGIPNVEVYVDDVYISHDSEKEHLEYLDILFNRLKEAGYIISLKKSNIANSIVDFLGFQITNEGRGLTDTFKEKLENITAPTTLKQLQSILGLLNFARNFIPDFTELIAPLYALIPKSTKNYVPWQIEHSTTLETLITKLNGAEYLQGRKGDKTLIMKVNASYTTGYIRYYNEGEKKPISYVSIVFSKTELKFTELEKLLTTVHKGLLKALDLSMGQNIHVYSPIVSMQNIQKTPQTAKKALASRWLSWLSYLEDPRIRFFYDPQMPALKDLPAVDTGKDNKKHPSNFQHIFYTDGSAITSPTKEGHLNAGMGIVYFINKDGNLQKQQEWSISLGNHTAQFAEIAAFEFALKKCLPLGGNILVVTDSNYVAKAYNEELDVWASNGFVNNRKKPLKHISKWKSVADLKRLRPDVVVTHEPGHQKLDSSPHAYGNNLADQLATQASFKVHAGKRTADGSEFEKRTADGSEFESPKKKAKVE

SEQ ID NO: 737 - protein, 2171 aa, synthetic construct
MPAAKRVKLDGGDKKYSIGLDIGTNSVGWAVITDEYKVPSKKFKVLGNTDRHSIKKNLIGALLFDSGETAEATRLKRTARRRYTRRKNRICYLQEIFSNEMAKVDDSFFHRLEESFLVEEDKKHERHPIFGNIVDEVAYHEKYPTIYHLRKKLVDSTDKADLRLIYLALAHMIKFRGHFLIEGDLNPDNSDVDKLFIQLVQTYNQLFEENPINASGVDAKAILSARLSKSRRLENLIAQLPGEKKNGLFGNLIALSLGLTPNFKSNFDLAEDAKLQLSKDTYDDDLDNLLAQIGDQYADLFLAAKNLSDAILLSDILRVNTEITKAPLSASMIKRYDEHHQDLTLLKALVRQQLPEKYKEIFFDQSKNGYAGYIDGGASQEEFYKFIKPILEKMDGTEELLVKLNREDLLRKQRTFDNGSIPHQIHLGELHAILRRQEDFYPFLKDNREKIEKILTFRIPYYVGPLARGNSRFAWMTRKSEETITPWNFEEVVDKGASAQSFIERMTNFDKNLPNEKVLPKHSLLYEYFTVYNELTKVKYVTEGMRKPAFLSGEQKKAIVDLLFKTNRKVTVKQLKEDYFKKIECFDSVEISGVEDRFNASLGTYHDLLKIIKDKDFLDNEENEDILEDIVLTLTLFEDREMIEERLKTYAHLFDDKVMKQLKRRRYTGWGRLSRKLINGIRDKQSGKTILDFLKSDGFANRNFMQLIHDDSLTFKEDIQKAQVSGQGDSLHEHIANLAGSPAIKKGILQTVKVVDELVKVMGRHKPENIVIEMARENQTTQKGQKNSRERMKRIEEGIKELGSQILKEHPVENTQLQNEKLYLYYLQNGRDMYVDQELDINRLSDYDVDHIVPQSFLKDDSIDNKVLTRSDKARGKSDNVPSEEVVKKMKNYWRQLLNAKLITQRKFDNLTKAERGGLSELDKAGFIKRQLVETRQITKHVAQILDSRMNTKYDENDKLIREVKVITLKSKLVSDFRKDFQFYKVREINNYHHAHDAYLNAVVGTALIKKYPKLESEFVYGDYKVYDVRKMIAKSEQEIGKATAKYFFYSNIMNFFKTEITLANGEIRKRPLIETNGETGEIVWDKGRDFATVRKVLSMPQVNIVKKTEVQTGGFSKESILPKRNSDKLIARKKDWDPKKYGGFDSPTVAYSVLVVAKVEKGKSKKLKSVKELLGITIMERSSFEKNPIDFLEAKGYKEVKKDLIIKLPKYSLFELENGRKRMLASAGELQKGNELALPSKYVNFLYLASHYEKLKGSPEDNEQKQLFVEQHKHYLDEIIEQISEFSKRVILADANLDKVLSAYNKHRDKPIREQAENIIHLFTLTNLGAPAAFKYFDTTIDRKRYTSTKEVLDATLIHQSITGLYETRIDLSQLGGDGGPAPGGSGSSGGMDLLKPLTVERKGVKIKGYWNSQADITCVPKDLLQGEEPVRQQNVTTIHGTQEGDVYYVNLKIDGRRINTEVIGTTLDYAIITPGDVPWILKKPLELTIKLDLEEQQGTLLNNSILSKKGKEELKQLFEKYSALWQSWENQVGHRRIRPHKIATGTVKPTPQKQYHINPKAKPDIQIVINDLLKQGVLIQKESTMNTPVYPVPKPNGRWRMVLDYRAVNKVTPLIAVQNQHSYGILGSLFKGRYKTTIDLSNGFWAHPIVPEDYWITAFTWQGKQYCWTVLPQGFLNSPGLFTGDVVDLLQGIPNVEVYVDDVYISHDSEKEHLEYLDILFNRLKEAGYIISLKKSNIANSIVDFLGFQITNEGRGLTDTFKEKLENITAPTTLKQLQSILGLLNFARNFIPDFTELIAPLYALIPKSTKNYVPWQIEHSTTLETLITKLNGAEYLQGRKGDKTLIMKVNASYTTGYIRYYNEGEKKPISYVSIVFSKTELKFTELEKLLTTVHKGLLKALDLSMGQNIHVYSPIVSMQNIQKTPQTAKKALASRWLSWLSYLEDPRIRFFYDPQMPALKDLPAVDTGKDNKKHPSNFQHIFYTDGSAITSPTKEGHLNAGMGIVYFINKDGNLQKQQEWSISLGNHTAQFAEIAAFEFALKKCLPLGGNILVVTDSNYVAKAYNEELDVWASNGFVNNRKKPLKHISKWKSVADLKRLRPDVVVTHEPGHQKLDSSPHAYGNNLADQLATQASFKVHAGKRTADGSEFEKRTADGSEFESPKKKAKVE

SEQ ID NO: 738 - protein, 2185 aa, synthetic construct
MPAAKRVKLDGGDKKYSIGLDIGTNSVGWAVITDEYKVPSKKFKVLGNTDRHSIKKNLIGALLFDSGETAEATRLKRTARRRYTRRKNRICYLQEIFSNEMAKVDDSFFHRLEESFLVEEDKKHERHPIFGNIVDEVAYHEKYPTIYHLRKKLVDSTDKADLRLIYLALAHMIKFRGHFLIEGDLNPDNSDVDKLFIQLVQTYNQLFEENPINASGVDAKAILSARLSKSRRLENLIAQLPGEKKNGLFGNLIALSLGLTPNFKSNFDLAEDAKLQLSKDTYDDDLDNLLAQIGDQYADLFLAAKNLSDAILLSDILRVNTEITKAPLSASMIKRYDEHHQDLTLLKALVRQQLPEKYKEIFFDQSKNGYAGYIDGGASQEEFYKFIKPILEKMDGTEELLVKLNREDLLRKQRTFDNGSIPHQIHLGELHAILRRQEDFYPFLKDNREKIEKILTFRIPYYVGPLARGNSRFAWMTRKSEETITPWNFEEVVDKGASAQSFIERMTNFDKNLPNEKVLPKHSLLYEYFTVYNELTKVKYVTEGMRKPAFLSGEQKKAIVDLLFKTNRKVTVKQLKEDYFKKIECFDSVEISGVEDRFNASLGTYHDLLKIIKDKDFLDNEENEDILEDIVLTLTLFEDREMIEERLKTYAHLFDDKVMKQLKRRRYTGWGRLSRKLINGIRDKQSGKTILDFLKSDGFANRNFMQLIHDDSLTFKEDIQKAQVSGQGDSLHEHIANLAGSPAIKKGILQTVKVVDELVKVMGRHKPENIVIEMARENQTTQKGQKNSRERMKRIEEGIKELGSQILKEHPVENTQLQNEKLYLYYLQNGRDMYVDQELDINRLSDYDVDHIVPQSFLKDDSIDNKVLTRSDKARGKSDNVPSEEVVKKMKNYWRQLLNAKLITQRKFDNLTKAERGGLSELDKAGFIKRQLVETRQITKHVAQILDSRMNTKYDENDKLIREVKVITLKSKLVSDFRKDFQFYKVREINNYHHAHDAYLNAVVGTALIKKYPKLESEFVYGDYKVYDVRKMIAKSEQEIGKATAKYFFYSNIMNFFKTEITLANGEIRKRPLIETNGETGEIVWDKGRDFATVRKVLSMPQVNIVKKTEVQTGGFSKESILPKRNSDKLIARKKDWDPKKYGGFDSPTVAYSVLVVAKVEKGKSKKLKSVKELLGITIMERSSFEKNPIDFLEAKGYKEVKKDLIIKLPKYSLFELENGRKRMLASAGELQKGNELALPSKYVNFLYLASHYEKLKGSPEDNEQKQLFVEQHKHYLDEIIEQISEFSKRVILADANLDKVLSAYNKHRDKPIREQAENIIHLFTLTNLGAPAAFKYFDTTIDRKRYTSTKEVLDATLIHQSITGLYETRIDLSQLGGDGGGGGGSGGGGSGGGGSGGGGSGGMNPLQLLQPLPAEVKGTKLLAHWNSGATITCIPESFLEDEQPIKQTLIKTIHGEKQQNVYYLTFKVKGRKVEAEVIASPYEYILLSPTDVPWLTQQPLQLTILVPLQEYQDRILNKTALPEEQKQQLKALFTKYDNLWQHWENQVGHRKIRPHNIATGDYPPRPQKQYPINPKAKPSIQIVIDDLLKQGVLTPQNSTMNTPVYPVPKPDGRWRMVLDYREVNKTIPLTAAQNQHSAGILATIVRQKYKTTLDLANGFWAHPITPDSYWLTAFTWQGKQYCWTRLPQGFLNSPALFNADAVDLLKEVPNVQVYVDDIYLSHDNPHEHIQQLEKVFQILLQAGYVVSLKKSEIGQRTVEFLGFNITKEGRGLTDTFKTKLLNVTPPKDLKQLQSILGKLNFARNFIPNFAELVQTLYNLIASSPGKYIEWTEDNTKQLNKVIEALNTASNLEERLPDQRLVIKVNTSPSAGYVRYYNESGKKPIMYLNYVFSKAELKFSMLEKLLTTMHKALIKAMDLAMGQEILVYSPIVSMTKIQKTPLPERKALPIRWITWMTYLEDPRIQFHYDKTLPELKHIPDVYTSSIPPLKHPSQYEGVFCTDGSAIKSPDPTKSNNAGMGIVHAIYNPEYKILNQWSIPLGHHTAQMAEIAAVEFACKKALKVPGPVLVITDSFYVAESANKELPYWKSNGFVNNKKEPLKHISKWKSIAECLSIKPDITIQHEKGHQPINTSIHTEGNALADKLATQGSYVVNAGKRTADGSEFEKRTADGSEFESPKKKAKVE

SEQ ID NO: 739 - protein, 2175 aa, synthetic construct
MPAAKRVKLDGGDKKYSIGLDIGTNSVGWAVITDEYKVPSKKFKVLGNTDRHSIKKNLIGALLFDSGETAEATRLKRTARRRYTRRKNRICYLQEIFSNEMAKVDDSFFHRLEESFLVEEDKKHERHPIFGNIVDEVAYHEKYPTIYHLRKKLVDSTDKADLRLIYLALAHMIKFRGHFLIEGDLNPDNSDVDKLFIQLVQTYNQLFEENPINASGVDAKAILSARLSKSRRLENLIAQLPGEKKNGLFGNLIALSLGLTPNFKSNFDLAEDAKLQLSKDTYDDDLDNLLAQIGDQYADLFLAAKNLSDAILLSDILRVNTEITKAPLSASMIKRYDEHHQDLTLLKALVRQQLPEKYKEIFFDQSKNGYAGYIDGGASQEEFYKFIKPILEKMDGTEELLVKLNREDLLRKQRTFDNGSIPHQIHLGELHAILRRQEDFYPFLKDNREKIEKILTFRIPYYVGPLARGNSRFAWMTRKSEETITPWNFEEVVDKGASAQSFIERMTNFDKNLPNEKVLPKHSLLYEYFTVYNELTKVKYVTEGMRKPAFLSGEQKKAIVDLLFKTNRKVTVKQLKEDYFKKIECFDSVEISGVEDRFNASLGTYHDLLKIIKDKDFLDNEENEDILEDIVLTLTLFEDREMIEERLKTYAHLFDDKVMKQLKRRRYTGWGRLSRKLINGIRDKQSGKTILDFLKSDGFANRNFMQLIHDDSLTFKEDIQKAQVSGQGDSLHEHIANLAGSPAIKKGILQTVKVVDELVKVMGRHKPENIVIEMARENQTTQKGQKNSRERMKRIEEGIKELGSQILKEHPVENTQLQNEKLYLYYLQNGRDMYVDQELDINRLSDYDVDHIVPQSFLKDDSIDNKVLTRSDKARGKSDNVPSEEVVKKMKNYWRQLLNAKLITQRKFDNLTKAERGGLSELDKAGFIKRQLVETRQITKHVAQILDSRMNTKYDENDKLIREVKVITLKSKLVSDFRKDFQFYKVREINNYHHAHDAYLNAVVGTALIKKYPKLESEFVYGDYKVYDVRKMIAKSEQEIGKATAKYFFYSNIMNFFKTEITLANGEIRKRPLIETNGETGEIVWDKGRDFATVRKVLSMPQVNIVKKTEVQTGGFSKESILPKRNSDKLIARKKDWDPKKYGGFDSPTVAYSVLVVAKVEKGKSKKLKSVKELLGITIMERSSFEKNPIDFLEAKGYKEVKKDLIIKLPKYSLFELENGRKRMLASAGELQKGNELALPSKYVNFLYLASHYEKLKGSPEDNEQKQLFVEQHKHYLDEIIEQISEFSKRVILADANLDKVLSAYNKHRDKPIREQAENIIHLFTLTNLGAPAAFKYFDTTIDRKRYTSTKEVLDATLIHQSITGLYETRIDLSQLGGDGGGGGGSGGGGSGGMNPLQLLQPLPAEVKGTKLLAHWNSGATITCIPESFLEDEQPIKQTLIKTIHGEKQQNVYYLTFKVKGRKVEAEVIASPYEYILLSPTDVPWLTQQPLQLTILVPLQEYQDRILNKTALPEEQKQQLKALFTKYDNLWQHWENQVGHRKIRPHNIATGDYPPRPQKQYPINPKAKPSIQIVIDDLLKQGVLTPQNSTMNTPVYPVPKPDGRWRMVLDYREVNKTIPLTAAQNQHSAGILATIVRQKYKTTLDLANGFWAHPITPDSYWLTAFTWQGKQYCWTRLPQGFLNSPALFNADAVDLLKEVPNVQVYVDDIYLSHDNPHEHIQQLEKVFQILLQAGYVVSLKKSEIGQRTVEFLGFNITKEGRGLTDTFKTKLLNVTPPKDLKQLQSILGKLNFARNFIPNFAELVQTLYNLIASSPGKYIEWTEDNTKQLNKVIEALNTASNLEERLPDQRLVIKVNTSPSAGYVRYYNESGKKPIMYLNYVFSKAELKFSMLEKLLTTMHKALIKAMDLAMGQEILVYSPIVSMTKIQKTPLPERKALPIRWITWMTYLEDPRIQFHYDKTLPELKHIPDVYTSSIPPLKHPSQYEGVFCTDGSAIKSPDPTKSNNAGMGIVHAIYNPEYKILNQWSIPLGHHTAQMAEIAAVEFACKKALKVPGPVLVITDSFYVAESANKELPYWKSNGFVNNKKEPLKHISKWKSIAECLSIKPDITIQHEKGHQPINTSIHTEGNALADKLATQGSYVVNAGKRTADGSEFEKRTADGSEFESPKKKAKVE

SEQ ID NO: 740 - protein, 2176 aa, synthetic construct
MPAAKRVKLDGGDKKYSIGLDIGTNSVGWAVITDEYKVPSKKFKVLGNTDRHSIKKNLIGALLFDSGETAEATRLKRTARRRYTRRKNRICYLQEIFSNEMAKVDDSFFHRLEESFLVEEDKKHERHPIFGNIVDEVAYHEKYPTIYHLRKKLVDSTDKADLRLIYLALAHMIKFRGHFLIEGDLNPDNSDVDKLFIQLVQTYNQLFEENPINASGVDAKAILSARLSKSRRLENLIAQLPGEKKNGLFGNLIALSLGLTPNFKSNFDLAEDAKLQLSKDTYDDDLDNLLAQIGDQYADLFLAAKNLSDAILLSDILRVNTEITKAPLSASMIKRYDEHHQDLTLLKALVRQQLPEKYKEIFFDQSKNGYAGYIDGGASQEEFYKFIKPILEKMDGTEELLVKLNREDLLRKQRTFDNGSIPHQIHLGELHAILRRQEDFYPFLKDNREKIEKILTFRIPYYVGPLARGNSRFAWMTRKSEETITPWNFEEVVDKGASAQSFIERMTNFDKNLPNEKVLPKHSLLYEYFTVYNELTKVKYVTEGMRKPAFLSGEQKKAIVDLLFKTNRKVTVKQLKEDYFKKIECFDSVEISGVEDRFNASLGTYHDLLKIIKDKDFLDNEENEDILEDIVLTLTLFEDREMIEERLKTYAHLFDDKVMKQLKRRRYTGWGRLSRKLINGIRDKQSGKTILDFLKSDGFANRNFMQLIHDDSLTFKEDIQKAQVSGQGDSLHEHIANLAGSPAIKKGILQTVKVVDELVKVMGRHKPENIVIEMARENQTTQKGQKNSRERMKRIEEGIKELGSQILKEHPVENTQLQNEKLYLYYLQNGRDMYVDQELDINRLSDYDVDHIVPQSFLKDDSIDNKVLTRSDKARGKSDNVPSEEVVKKMKNYWRQLLNAKLITQRKFDNLTKAERGGLSELDKAGFIKRQLVETRQITKHVAQILDSRMNTKYDENDKLIREVKVITLKSKLVSDFRKDFQFYKVREINNYHHAHDAYLNAVVGTALIKKYPKLESEFVYGDYKVYDVRKMIAKSEQEIGKATAKYFFYSNIMNFFKTEITLANGEIRKRPLIETNGETGEIVWDKGRDFATVRKVLSMPQVNIVKKTEVQTGGFSKESILPKRNSDKLIARKKDWDPKKYGGFDSPTVAYSVLVVAKVEKGKSKKLKSVKELLGITIMERSSFEKNPIDFLEAKGYKEVKKDLIIKLPKYSLFELENGRKRMLASAGELQKGNELALPSKYVNFLYLASHYEKLKGSPEDNEQKQLFVEQHKHYLDEIIEQISEFSKRVILADANLDKVLSAYNKHRDKPIREQAENIIHLFTLTNLGAPAAFKYFDTTIDRKRYTSTKEVLDATLIHQSITGLYETRIDLSQLGGDGGGGGEAAAKGGSGGMNPLQLLQPLPAEVKGTKLLAHWNSGATITCIPESFLEDEQPIKQTLIKTIHGEKQQNVYYLTFKVKGRKVEAEVIASPYEYILLSPTDVPWLTQQPLQLTILVPLQEYQDRILNKTALPEEQKQQLKALFTKYDNLWQHWENQVGHRKIRPHNIATGDYPPRPQKQYPINPKAKPSIQIVIDDLLKQGVLTPQNSTMNTPVYPVPKPDGRWRMVLDYREVNKTIPLTAAQNQHSAGILATIVRQKYKTTLDLANGFWAHPITPDSYWLTAFTWQGKQYCWTRLPQGFLNSPALFNADAVDLLKEVPNVQVYVDDIYLSHDNPHEHIQQLEKVFQILLQAGYVVSLKKSEIGQRTVEFLGFNITKEGRGLTDTFKTKLLNVTPPKDLKQLQSILGKLNFARNFIPNFAELVQTLYNLIASSPGKYIEWTEDNTKQLNKVIEALNTASNLEERLPDQRLVIKVNTSPSAGYVRYYNESGKKPIMYLNYVFSKAELKFSMLEKLLTTMHKALIKAMDLAMGQEILVYSPIVSMTKIQKTPLPERKALPIRWITWMTYLEDPRIQFHYDKTLPELKHIPDVYTSSIPPLKHPSQYEGVFCTDGSAIKSPDPTKSNNAGMGIVHAIYNPEYKILNQWSIPLGHHTAQMAEIAAVEFACKKALKVPGPVLVITDSFYVAESANKELPYWKSNGFVNNKKEPLKHISKWKSIAECLSIKPDITIQHEKGHQPINTSIHTEGNALADKLATQGSYVVNAGKRTADGSEFEKRTADGSEFESPKKKAKVE

SEQ ID NO: 741 - protein, 2012 aa, synthetic construct
MPAAKRVKLDGGDKKYSIGLDIGTNSVGWAVITDEYKVPSKKFKVLGNTDRHSIKKNLIGALLFDSGETAEATRLKRTARRRYTRRKNRICYLQEIFSNEMAKVDDSFFHRLEESFLVEEDKKHERHPIFGNIVDEVAYHEKYPTIYHLRKKLVDSTDKADLRLIYLALAHMIKFRGHFLIEGDLNPDNSDVDKLFIQLVQTYNQLFEENPINASGVDAKAILSARLSKSRRLENLIAQLPGEKKNGLFGNLIALSLGLTPNFKSNFDLAEDAKLQLSKDTYDDDLDNLLAQIGDQYADLFLAAKNLSDAILLSDILRVNTEITKAPLSASMIKRYDEHHQDLTLLKALVRQQLPEKYKEIFFDQSKNGYAGYIDGGASQEEFYKFIKPILEKMDGTEELLVKLNREDLLRKQRTFDNGSIPHQIHLGELHAILRRQEDFYPFLKDNREKIEKILTFRIPYYVGPLARGNSRFAWMTRKSEETITPWNFEEVVDKGASAQSFIERMTNFDKNLPNEKVLPKHSLLYEYFTVYNELTKVKYVTEGMRKPAFLSGEQKKAIVDLLFKTNRKVTVKQLKEDYFKKIECFDSVEISGVEDRFNASLGTYHDLLKIIKDKDFLDNEENEDILEDIVLTLTLFEDREMIEERLKTYAHLFDDKVMKQLKRRRYTGWGRLSRKLINGIRDKQSGKTILDFLKSDGFANRNFMQLIHDDSLTFKEDIQKAQVSGQGDSLHEHIANLAGSPAIKKGILQTVKVVDELVKVMGRHKPENIVIEMARENQTTQKGQKNSRERMKRIEEGIKELGSQILKEHPVENTQLQNEKLYLYYLQNGRDMYVDQELDINRLSDYDVDHIVPQSFLKDDSIDNKVLTRSDKARGKSDNVPSEEVVKKMKNYWRQLLNAKLITQRKFDNLTKAERGGLSELDKAGFIKRQLVETRQITKHVAQILDSRMNTKYDENDKLIREVKVITLKSKLVSDFRKDFQFYKVREINNYHHAHDAYLNAVVGTALIKKYPKLESEFVYGDYKVYDVRKMIAKSEQEIGKATAKYFFYSNIMNFFKTEITLANGEIRKRPLIETNGETGEIVWDKGRDFATVRKVLSMPQVNIVKKTEVQTGGFSKESILPKRNSDKLIARKKDWDPKKYGGFDSPTVAYSVLVVAKVEKGKSKKLKSVKELLGITIMERSSFEKNPIDFLEAKGYKEVKKDLIIKLPKYSLFELENGRKRMLASAGELQKGNELALPSKYVNFLYLASHYEKLKGSPEDNEQKQLFVEQHKHYLDEIIEQISEFSKRVILADANLDKVLSAYNKHRDKPIREQAENIIHLFTLTNLGAPAAFKYFDTTIDRKRYTSTKEVLDATLIHQSITGLYETRIDLSQLGGDGGPAPGGGGGPRSRAIDIPVPHADKISWKITDPVWVDQWPLTYEKTLAAIALVQEQLAAGHIEPTNSPWNTPIFIIKKKSGSWRLLQDLRAVNKVMVPMGALQPGLPSPVAIPLNYHKIVIDLKDCFFTIPLHPEDRPYFAFSVPQINFQSPMPRYQWKVLPQGMANSPTLCQKFVAAAIAPVRSQWPEAYILHYMDDILLACDSAEAAKACYAHIISCLTSYGLKIAPDKVQVSEPFSYLGFELHHQQVFTPRVCLKTDHLKTLNDFQKLLGDIQWLRPYLKLPTSALVPLNNILKGDPNPLSVRALTPEAKQSLALINKAIQNQSVQQISYNLPLVLLLLPTPHTPTAVFWQPNGTDPTKNGSPLLWLHLPASPSKVLLTYPSLLAMLIIKGRYTGRQLFGRDPHSIIIPYTQDQLTWLLQTSDEWAIALSSFTGDIDNHYPSDPVIQFAKLHQFIFPKITKCAPIPQATLVFTDGSSNGIAAYVIDNQPISIKSPYLSAQLVELYAILQVFTVLAHQPFNLYTDSAYIAQSVPLLETVPFIKSSTNATPLFSKLQQLILNRQHPFFIGHLRAHLNLPGPLAEGNALADAATQIFPIISDAGKRTADGSEFEKRTADGSEFESPKKKAKVE

SEQ ID NO: 742 - protein, 2012 aa, synthetic construct
MPAAKRVKLDGGDKKYSIGLDIGTNSVGWAVITDEYKVPSKKFKVLGNTDRHSIKKNLIGALLFDSGETAEATRLKRTARRRYTRRKNRICYLQEIFSNEMAKVDDSFFHRLEESFLVEEDKKHERHPIFGNIVDEVAYHEKYPTIYHLRKKLVDSTDKADLRLIYLALAHMIKFRGHFLIEGDLNPDNSDVDKLFIQLVQTYNQLFEENPINASGVDAKAILSARLSKSRRLENLIAQLPGEKKNGLFGNLIALSLGLTPNFKSNFDLAEDAKLQLSKDTYDDDLDNLLAQIGDQYADLFLAAKNLSDAILLSDILRVNTEITKAPLSASMIKRYDEHHQDLTLLKALVRQQLPEKYKEIFFDQSKNGYAGYIDGGASQEEFYKFIKPILEKMDGTEELLVKLNREDLLRKQRTFDNGSIPHQIHLGELHAILRRQEDFYPFLKDNREKIEKILTFRIPYYVGPLARGNSRFAWMTRKSEETITPWNFEEVVDKGASAQSFIERMTNFDKNLPNEKVLPKHSLLYEYFTVYNELTKVKYVTEGMRKPAFLSGEQKKAIVDLLFKTNRKVTVKQLKEDYFKKIECFDSVEISGVEDRFNASLGTYHDLLKIIKDKDFLDNEENEDILEDIVLTLTLFEDREMIEERLKTYAHLFDDKVMKQLKRRRYTGWGRLSRKLINGIRDKQSGKTILDFLKSDGFANRNFMQLIHDDSLTFKEDIQKAQVSGQGDSLHEHIANLAGSPAIKKGILQTVKVVDELVKVMGRHKPENIVIEMARENQTTQKGQKNSRERMKRIEEGIKELGSQILKEHPVENTQLQNEKLYLYYLQNGRDMYVDQELDINRLSDYDVDHIVPQSFLKDDSIDNKVLTRSDKARGKSDNVPSEEVVKKMKNYWRQLLNAKLITQRKFDNLTKAERGGLSELDKAGFIKRQLVETRQITKHVAQILDSRMNTKYDENDKLIREVKVITLKSKLVSDFRKDFQFYKVREINNYHHAHDAYLNAVVGTALIKKYPKLESEFVYGDYKVYDVRKMIAKSEQEIGKATAKYFFYSNIMNFFKTEITLANGEIRKRPLIETNGETGEIVWDKGRDFATVRKVLSMPQVNIVKKTEVQTGGFSKESILPKRNSDKLIARKKDWDPKKYGGFDSPTVAYSVLVVAKVEKGKSKKLKSVKELLGITIMERSSFEKNPIDFLEAKGYKEVKKDLIIKLPKYSLFELENGRKRMLASAGELQKGNELALPSKYVNFLYLASHYEKLKGSPEDNEQKQLFVEQHKHYLDEIIEQISEFSKRVILADANLDKVLSAYNKHRDKPIREQAENIIHLFTLTNLGAPAAFKYFDTTIDRKRYTSTKEVLDATLIHQSITGLYETRIDLSQLGGDGGGGGGGGGGPRSRAIDIPVPHADKISWKITDPVWVDQWPLTYEKTLAAIALVQEQLAAGHIEPTNSPWNTPIFIIKKKSGSWRLLQDLRAVNKVMVPMGALQPGLPSPVAIPLNYHKIVIDLKDCFFTIPLHPEDRPYFAFSVPQINFQSPMPRYQWKVLPQGMANSPTLCQKFVAAAIAPVRSQWPEAYILHYMDDILLACDSAEAAKACYAHIISCLTSYGLKIAPDKVQVSEPFSYLGFELHHQQVFTPRVCLKTDHLKTLNDFQKLLGDIQWLRPYLKLPTSALVPLNNILKPDPNPLSVRALTPEAKQSLALINKAIQNQSVQQISYNLPLVLLLLPTPHTPTAVFWQPNGTDPTKNGSPLLWLHLPASPSKVLLTYPSLLAMLIIKGRYTGRQLFGRDPHSIIIPYTQDQLTWLLQTSDEWAIALSSFTGDIDNHYPSDPVIQFAKLHQFIFPKITKCAPIPQATLVFTDGSSNGIAAYVIDNQPISIKSPYLSAQLVELYAILQVFTVLAHQPFNLYTDSAYIAQSVPLLETVPFIKSSTNATPLFSKLQQLILNRQHPFFIGHLRAHLNLPGPLAEGNALADAATQIFPIISDAGKRTADGSEFEKRTADGSEFESPKKKAKVE

SEQ ID NO: 743 - protein, 2021 aa, synthetic construct
MPAAKRVKLDGGDKKYSIGLDIGTNSVGWAVITDEYKVPSKKFKVLGNTDRHSIKKNLIGALLFDSGETAEATRLKRTARRRYTRRKNRICYLQEIFSNEMAKVDDSFFHRLEESFLVEEDKKHERHPIFGNIVDEVAYHEKYPTIYHLRKKLVDSTDKADLRLIYLALAHMIKFRGHFLIEGDLNPDNSDVDKLFIQLVQTYNQLFEENPINASGVDAKAILSARLSKSRRLENLIAQLPGEKKNGLFGNLIALSLGLTPNFKSNFDLAEDAKLQLSKDTYDDDLDNLLAQIGDQYADLFLAAKNLSDAILLSDILRVNTEITKAPLSASMIKRYDEHHQDLTLLKALVRQQLPEKYKEIFFDQSKNGYAGYIDGGASQEEFYKFIKPILEKMDGTEELLVKLNREDLLRKQRTFDNGSIPHQIHLGELHAILRRQEDFYPFLKDNREKIEKILTFRIPYYVGPLARGNSRFAWMTRKSEETITPWNFEEVVDKGASAQSFIERMTNFDKNLPNEKVLPKHSLLYEYFTVYNELTKVKYVTEGMRKPAFLSGEQKKAIVDLLFKTNRKVTVKQLKEDYFKKIECFDSVEISGVEDRFNASLGTYHDLLKIIKDKDFLDNEENEDILEDIVLTLTLFEDREMIEERLKTYAHLFDDKVMKQLKRRRYTGWGRLSRKLINGIRDKQSGKTILDFLKSDGFANRNFMQLIHDDSLTFKEDIQKAQVSGQGDSLHEHIANLAGSPAIKKGILQTVKVVDELVKVMGRHKPENIVIEMARENQTTQKGQKNSRERMKRIEEGIKELGSQILKEHPVENTQLQNEKLYLYYLQNGRDMYVDQELDINRLSDYDVDHIVPQSFLKDDSIDNKVLTRSDKARGKSDNVPSEEVVKKMKNYWRQLLNAKLITQRKFDNLTKAERGGLSELDKAGFIKRQLVETRQITKHVAQILDSRMNTKYDENDKLIREVKVITLKSKLVSDFRKDFQFYKVREINNYHHAHDAYLNAVVGTALIKKYPKLESEFVYGDYKVYDVRKMIAKSEQEIGKATAKYFFYSNIMNFFKTEITLANGEIRKRPLIETNGETGEIVWDKGRDFATVRKVLSMPQVNIVKKTEVQTGGFSKESILPKRNSDKLIARKKDWDPKKYGGFDSPTVAYSVLVVAKVEKGKSKKLKSVKELLGITIMERSSFEKNPIDFLEAKGYKEVKKDLIIKLPKYSLFELENGRKRMLASAGELQKGNELALPSKYVNFLYLASHYEKLKGSPEDNEQKQLFVEQHKHYLDEIIEQISEFSKRVILADANLDKVLSAYNKHRDKPIREQAENIIHLFTLTNLGAPAAFKYFDTTIDRKRYTSTKEVLDATLIHQSITGLYETRIDLSQLGGDGGGGSGGSGGSGGSGGSGGPRSRAIDIPVPHADKISWKITDPVWVDQWPLTYEKTLAAIALVQEQLAAGHIEPTNSPWNTPIFIIKKKSGSWRLLQDLRAVNKVMVPMGALQPGLPSPVAPPLNYHKIVIDLKDCFFTIPLHPEDRPYFAFSVPQINFQSPMPRYQWKVLPQGMANSPTLCQKFVAAAIAPVRSQWPEAYILHYMDDILLACDSAEAAKACYAHIISCLTSYGLKIAPDKVQVSEPFSYLGFELHHQQVFTPRVCLKTDHLKTLNDFQKLLGDIQWLRPYLKLPTSALVPLNNILKPDPNPLSVRALTPEAKQSLALINKAIQNQSVQQISYNLPLVLLLLPTPHTPTAVFWQPNGTDPTKNGSPLLWLHLPASPSKVLLTYPSLLAMLIIKGRYTGRQLFGRDPHSIIIPYTQDQLTWLLQTSDEWAIALSSFTGDIDNHYPSDPVIQFAKLHQFIFPKITKCAPIPQATLVFTDGSSNGIAAYVIDNQPISIKSPYLSAQLVELYAILQVFTVLAHQPFNLYTDSAYIAQSVPLLETVPFIKSSTNATPLFSKLQQLILNRQHPFFIGHLRAHLNLPGPLAEGNALADAATQIFPIISDAGKRTADGSEFEKRTADGSEFESPKKKAKVE

SEQ ID NO: 744 - protein, 2017 aa, synthetic construct
MPAAKRVKLDGGDKKYSIGLDIGTNSVGWAVITDEYKVPSKKFKVLGNTDRHSIKKNLIGALLFDSGETAEATRLKRTARRRYTRRKNRICYLQEIFSNEMAKVDDSFFHRLEESFLVEEDKKHERHPIFGNIVDEVAYHEKYPTIYHLRKKLVDSTDKADLRLIYLALAHMIKFRGHFLIEGDLNPDNSDVDKLFIQLVQTYNQLFEENPINASGVDAKAILSARLSKSRRLENLIAQLPGEKKNGLFGNLIALSLGLTPNFKSNFDLAEDAKLQLSKDTYDDDLDNLLAQIGDQYADLFLAAKNLSDAILLSDILRVNTEITKAPLSASMIKRYDEHHQDLTLLKALVRQQLPEKYKEIFFDQSKNGYAGYIDGGASQEEFYKFIKPILEKMDGTEELLVKLNREDLLRKQRTFDNGSIPHQIHLGELHAILRRQEDFYPFLKDNREKIEKILTFRIPYYVGPLARGNSRFAWMTRKSEETITPWNFEEVVDKGASAQSFIERMTNFDKNLPNEKVLPKHSLLYEYFTVYNELTKVKYVTEGMRKPAFLSGEQKKAIVDLLFKTNRKVTVKQLKEDYFKKIECFDSVEISGVEDRFNASLGTYHDLLKIIKDKDFLDNEENEDILEDIVLTLTLFEDREMIEERLKTYAHLFDDKVMKQLKRRRYTGWGRLSRKLINGIRDKQSGKTILDFLKSDGFANRNFMQLIHDDSLTFKEDIQKAQVSGQGDSLHEHIANLAGSPAIKKGILQTVKVVDELVKVMGRHKPENIVIEMARENQTTQKGQKNSRERMKRIEEGIKELGSQILKEHPVENTQLQNEKLYLYYLQNGRDMYVDQELDINRLSDYDVDHIVPQSFLKDDSIDNKVLTRSDKARGKSDNVPSEEVVKKMKNYWRQLLNAKLITQRKFDNLTKAERGGLSELDKAGFIKRQLVETRQITKHVAQILDSRMNTKYDENDKLIREVKVITLKSKLVSDFRKDFQFYKVREINNYHHAHDAYLNAVVGTALIKKYPKLESEFVYGDYKVYDVRKMIAKSEQEIGKATAKYFFYSNIMNFFKTEITLANGEIRKRPLIETNGETGEIVWDKGRDFATVRKVLSMPQVNIVKKTEVQTGGFSKESILPKRNSDKLIARKKDWDPKKYGGFDSPTVAYSVLVVAKVEKGKSKKLKSVKELLGITIMERSSFEKNPIDFLEAKGYKEVKKDLIIKLPKYSLFELENGRKRMLASAGELQKGNELALPSKYVNFLYLASHYEKLKGSPEDNEQKQLFVEQHKHYLDEIIEQISEFSKRVILADANLDKVLSAYNKHRDKPIREQAENIIHLFTLTNLGAPAAFKYFDTTIDRKRYTSTKEVLDATLIHQSITGLYETRIDLSQLGGDGGGSSPAPEAAAKGGPRSRAIDIPVPHADKISWKITDPVWVDQWPLTYEKTLAAIALVQEQLAAGHIEPTNSPWNTPIFIIKKKSGSWRLLQDLRAVNKVMVPMGALQPGLPSPVAPPLNYHKIVIDLKDCFFTIPLHPEDRPYFAFSVPQINFQSPMPRYQWKVLPQGMANSPTLCQKFVAAAIAPVRSQWPEAYILHYMDDILLACDSAEAAKACYAHIISCLTSYGLKIAPDKVQVSEPFSYLGFELHHQQVFTPRVCLKTDHLKTLNDFQKLLGDIQWLRPYLKLPTSALVPLNNILKPDPNPLSVRALTPEAKQSLALINKAIQNQSVQQISYNLPLVLLLLPTPHTPTAVFWQPNGTDPTKNGSPLLWLHLPASPSKVLLTYPSLLAMLIIKGRYTGRQLFGRDPHSIIIPYTQDQLTWLLQTSDEWAIALSSFTGDIDNHYPSDPVIQFAKLHQFIFPKITKCAPIPQATLVFTDGSSNGIAAYVIDNQPISIKSPYLSAQLVELYAILQVFTVLAHQPFNLYTDSAYIAQSVPLLETVPFIKSSTNATPLFSKLQQLILNRQHPFFIGHLRAHLNLPGPLAEGNALADAATQIFPIISDAGKRTADGSEFEKRTADGSEFESPKKKAKVE

SEQ ID NO: 745 - protein, 2032 aa, synthetic construct
MPAAKRVKLDGGDKKYSIGLDIGTNSVGWAVITDEYKVPSKKFKVLGNTDRHSIKKNLIGALLFDSGETAEATRLKRTARRRYTRRKNRICYLQEIFSNEMAKVDDSFFHRLEESFLVEEDKKHERHPIFGNIVDEVAYHEKYPTIYHLRKKLVDSTDKADLRLIYLALAHMIKFRGHFLIEGDLNPDNSDVDKLFIQLVQTYNQLFEENPINASGVDAKAILSARLSKSRRLENLIAQLPGEKKNGLFGNLIALSLGLTPNFKSNFDLAEDAKLQLSKDTYDDDLDNLLAQIGDQYADLFLAAKNLSDAILLSDILRVNTEITKAPLSASMIKRYDEHHQDLTLLKALVRQQLPEKYKEIFFDQSKNGYAGYIDGGASQEEFYKFIKPILEKMDGTEELLVKLNREDLLRKQRTFDNGSIPHQIHLGELHAILRRQEDFYPFLKDNREKIEKILTFRIPYYVGPLARGNSRFAWMTRKSEETITPWNFEEVVDKGASAQSFIERMTNFDKNLPNEKVLPKHSLLYEYFTVYNELTKVKYVTEGMRKPAFLSGEQKKAIVDLLFKTNRKVTVKQLKEDYFKKIECFDSVEISGVEDRFNASLGTYHDLLKIIKDKDFLDNEENEDILEDIVLTLTLFEDREMIEERLKTYAHLFDDKVMKQLKRRRYTGWGRLSRKLINGIRDKQSGKTILDFLKSDGFANRNFMQLIHDDSLTFKEDIQKAQVSGQGDSLHEHIANLAGSPAIKKGILQTVKVVDELVKVMGRHKPENIVIEMARENQTTQKGQKNSRERMKRIEEGIKELGSQILKEHPVENTQLQNEKLYLYYLQNGRDMYVDQELDINRLSDYDVDHIVPQSFLKDDSIDNKVLTRSDKARGKSDNVPSEEVVKKMKNYWRQLLNAKLITQRKFDNLTKAERGGLSELDKAGFIKRQLVETRQITKHVAQILDSRMNTKYDENDKLIREVKVITLKSKLVSDFRKDFQFYKVREINNYHHAHDAYLNAVVGTALIKKYPKLESEFVYGDYKVYDVRKMIAKSEQEIGKATAKYFFYSNIMNFFKTEITLANGEIRKRPLIETNGETGEIVWDKGRDFATVRKVLSMPQVNIVKKTEVQTGGFSKESILPKRNSDKLIARKKDWDPKKYGGFDSPTVAYSVLVVAKVEKGKSKKLKSVKELLGITIMERSSFEKNPIDFLEAKGYKEVKKDLIIKLPKYSLFELENGRKRMLASAGELQKGNELALPSKYVNFLYLASHYEKLKGSPEDNEQKQLFVEQHKHYLDEIIEQISEFSKRVILADANLDKVLSAYNKHRDKPIREQAENIIHLFTLTNLGAPAAFKYFDTTIDRKRYTSTKEVLDATLIHQSITGLYETRIDLSQLGGDGGSGGSSGGSSGSETPGTSESATPESSGGSSGGSSGGLATAVDILAPQRYADPITWKSDEPVWVDQWPLTQEKLAAAQQLVQEQLQAGHIIESNSPWNTPIFVIKKKSGKWRLLQDLRAVNATMVLMGALQPGLPSPVAIPQGYFKIVIDLKDCFFTIPLQPVDQKRFAFSLPSTNFKQPMKRYQWKVLPQGMANSPTLCQKYVAAAIEPVRKSWAQMYIIHYMDDILIAGKLGEQVLQCFAQLKQALTTTGLQIAPEKVQLQDPYTYLGFQINGPKITNQKAVIRRDKLQTLNDFQKLLGDINWLRPYLHLTTGDLKPLFDILKGDSNPNSPRSLSEAALASLQKVETAIAEQFVTQIDYTQPLTFLIFNTTLTPTGLFWQNNPVMWVHLPASPKKVLLPYYDAIADLIILGRDNSKKYFGLEPSTIIQPYSKSQIHWLMQNTETWPIACASYAGNIDNHYPPNKLIQFCKLHAVVFPRIISKTPLDNALLVFTDGSSTGIAAYTFEKTTVRFKTSHTSAQLVELQALIAVLSAFPHRALNVYTDSAYLAHSIPLLETVSHIKHISDTAKFFLQCQQLIYNRSIPFYLGHIRAHSGLPGPLSQGNHITDLATKVVATTLTTAGKRTADGSEFEKRTADGSEFESPKKKAKVE

SEQ ID NO: 746 - protein, 2045 aa, synthetic construct
MPAAKRVKLDGGDKKYSIGLDIGTNSVGWAVITDEYKVPSKKFKVLGNTDRHSIKKNLIGALLFDSGETAEATRLKRTARRRYTRRKNRICYLQEIFSNEMAKVDDSFFHRLEESFLVEEDKKHERHPIFGNIVDEVAYHEKYPTIYHLRKKLVDSTDKADLRLIYLALAHMIKFRGHFLIEGDLNPDNSDVDKLFIQLVQTYNQLFEENPINASGVDAKAILSARLSKSRRLENLIAQLPGEKKNGLFGNLIALSLGLTPNFKSNFDLAEDAKLQLSKDTYDDDLDNLLAQIGDQYADLFLAAKNLSDAILLSDILRVNTEITKAPLSASMIKRYDEHHQDLTLLKALVRQQLPEKYKEIFFDQSKNGYAGYIDGGASQEEFYKFIKPILEKMDGTEELLVKLNREDLLRKQRTFDNGSIPHQIHLGELHAILRRQEDFYPFLKDNREKIEKILTFRIPYYVGPLARGNSRFAWMTRKSEETITPWNFEEVVDKGASAQSFIERMTNFDKNLPNEKVLPKHSLLYEYFTVYNELTKVKYVTEGMRKPAFLSGEQKKAIVDLLFKTNRKVTVKQLKEDYFKKIECFDSVEISGVEDRFNASLGTYHDLLKIIKDKDFLDNEENEDILEDIVLTLTLFEDREMIEERLKTYAHLFDDKVMKQLKRRRYTGWGRLSRKLINGIRDKQSGKTILDFLKSDGFANRNFMQLIHDDSLTFKEDIQKAQVSGQGDSLHEHIANLAGSPAIKKGILQTVKVVDELVKVMGRHKPENIVIEMARENQTTQKGQKNSRERMKRIEEGIKELGSQILKEHPVENTQLQNEKLYLYYLQNGRDMYVDQELDINRLSDYDVDHIVPQSFLKDDSIDNKVLTRSDKARGKSDNVPSEEVVKKMKNYWRQLLNAKLITQRKFDNLTKAERGGLSELDKAGFIKRQLVETRQITKHVAQILDSRMNTKYDENDKLIREVKVITLKSKLVSDFRKDFQFYKVREINNYHHAHDAYLNAVVGTALIKKYPKLESEFVYGDYKVYDVRKMIAKSEQEIGKATAKYFFYSNIMNFFKTEITLANGEIRKRPLIETNGETGEIVWDKGRDFATVRKVLSMPQVNIVKKTEVQTGGFSKESILPKRNSDKLIARKKDWDPKKYGGFDSPTVAYSVLVVAKVEKGKSKKLKSVKELLGITIMERSSFEKNPIDFLEAKGYKEVKKDLIIKLPKYSLFELENGRKRMLASAGELQKGNELALPSKYVNFLYLASHYEKLKGSPEDNEQKQLFVEQHKHYLDEIIEQISEFSKRVILADANLDKVLSAYNKHRDKPIREQAENIIHLFTLTNLGAPAAFKYFDTTIDRKRYTSTKEVLDATLIHQSITGLYETRIDLSQLGGDGGAEAAAKEAAAKEAAAKEAAAKALEAEAAAKEAAAKEAAAKEAAAKAGGLATAVDILAPQRYADPITWKSDEPVWVDQWPLTQEKLAAAQQLVQEQLQAGHIIESNSPWNTPIFVIKKKSGKWRLLQDLRAVNATMVLMGALQPGLPSPVAIPQGYFKIVIDLKDCFFTIPLQPVDQKRFAFSLPSTNFKQPMKRYQWKVLPQGMANSPTLCQKYVAAAIEPVRKSWAQMYIIHYMDDILIAGKLGEQVLQCFAQLKQALTTTGLQIAPEKVQLQDPYTYLGFQINGPKITNQKAVIRRDKLQTLNDFQKLLGDINWLRPYLHLTTGDLKPLFDILKGDSNPNSPRSLSEAALASLQKVETAIAEQFVTQIDYTQPLTFLIFNTTLTPTGLFWQNNPVMWVHLPASPKKVLLPYYDAIADLIILGRDNSKKYFGLEPSTIIQPYSKSQIHWLMQNTETWPIACASYAGNIDNHYPPNKLIQFCKLHAVVFPRIISKTPLDNALLVFTDGSSTGIAAYTFEKTTVRFKTSHTSAQLVELQALIAVLSAFPHRALNVYTDSAYLAHSIPLLETVSHIKHISDTAKFFLQCQQLIYNRSIPFYLGHIRAHSGLPGPLSQGNHITDLATKVVATTLTTAGKRTADGSEFEKRTADGSEFESPKKKAKVE

SEQ ID NO: 747 - protein, 2029 aa, synthetic construct
MPAAKRVKLDGGDKKYSIGLDIGTNSVGWAVITDEYKVPSKKFKVLGNTDRHSIKKNLIGALLFDSGETAEATRLKRTARRRYTRRKNRICYLQEIFSNEMAKVDDSFFHRLEESFLVEEDKKHERHPIFGNIVDEVAYHEKYPTIYHLRKKLVDSTDKADLRLIYLALAHMIKFRGHFLIEGDLNPDNSDVDKLFIQLVQTYNQLFEENPINASGVDAKAILSARLSKSRRLENLIAQLPGEKKNGLFGNLIALSLGLTPNFKSNFDLAEDAKLQLSKDTYDDDLDNLLAQIGDQYADLFLAAKNLSDAILLSDILRVNTEITKAPLSASMIKRYDEHHQDLTLLKALVRQQLPEKYKEIFFDQSKNGYAGYIDGGASQEEFYKFIKPILEKMDGTEELLVKLNREDLLRKQRTFDNGSIPHQIHLGELHAILRRQEDFYPFLKDNREKIEKILTFRIPYYVGPLARGNSRFAWMTRKSEETITPWNFEEVVDKGASAQSFIERMTNFDKNLPNEKVLPKHSLLYEYFTVYNELTKVKYVTEGMRKPAFLSGEQKKAIVDLLFKTNRKVTVKQLKEDYFKKIECFDSVEISGVEDRFNASLGTYHDLLKIIKDKDFLDNEENEDILEDIVLTLTLFEDREMIEERLKTYAHLFDDKVMKQLKRRRYTGWGRLSRKLINGIRDKQSGKTILDFLKSDGFANRNFMQLIHDDSLTFKEDIQKAQVSGQGDSLHEHIANLAGSPAIKKGILQTVKVVDELVKVMGRHKPENIVIEMARENQTTQKGQKNSRERMKRIEEGIKELGSQILKEHPVENTQLQNEKLYLYYLQNGRDMYVDQELDINRLSDYDVDHIVPQSFLKDDSIDNKVLTRSDKARGKSDNVPSEEVVKKMKNYWRQLLNAKLITQRKFDNLTKAERGGLSELDKAGFIKRQLVETRQITKHVAQILDSRMNTKYDENDKLIREVKVITLKSKLVSDFRKDFQFYKVREINNYHHAHDAYLNAVVGTALIKKYPKLESEFVYGDYKVYDVRKMIAKSEQEIGKATAKYFFYSNIMNFFKTEITLANGEIRKRPLIETNGETGEIVWDKGRDFATVRKVLSMPQVNIVKKTEVQTGGFSKESILPKRNSDKLIARKKDWDPKKYGGFDSPTVAYSVLVVAKVEKGKSKKLKSVKELLGITIMERSSFEKNPIDFLEAKGYKEVKKDLIIKLPKYSLFELENGRKRMLASAGELQKGNELALPSKYVNFLYLASHYEKLKGSPEDNEQKQLFVEQHKHYLDEIIEQISEFSKRVILADANLDKVLSAYNKHRDKPIREQAENIIHLFTLTNLGAPAAFKYFDTTIDRKRYTSTKEVLDATLIHQSITGLYETRIDLSQLGGDGGEAAAKEAAAKEAAAKEAAAKEAAAKEAAAKGGLATAVDILAPQRYADPITWKSDEPVWVDQWPLTQEKLAAAQQLVQEQLQAGHIIESNSPWNTPIFVIKKKSGKWRLLQDLRAVNATMVLMGALQPGLPSPVAIPQGYFKIVIDLKDCFFTIPLQPVDQKRFAFSLPSTNFKQPMKRYQWKVLPQGMANSPTLCQKYVAAAIEPVRKSWAQMYIIHYMDDILIAGKLGEQVLQCFAQLKQALTTTGLQIAPEKVQLQDPYTYLGFQINGPKITNQKAVIRRDKLQTLNDFQKLLGDINWLRPYLHLTTGDLKPLFDILKGDSNPNSPRSLSEAALASLQKVETAIAEQFVTQIDYTQPLTFLIFNTTLTPTGLFWQNNPVMWVHLPASPKKVLLPYYDAIADLIILGRDNSKKYFGLEPSTIIQPYSKSQIHWLMQNTETWPIACASYAGNIDNHYPPNKLIQFCKLHAVVFPRIISKTPLDNALLVFTDGSSTGIAAYTFEKTTVRFKTSHTSAQLVELQALIAVLSAFPHRALNVYTDSAYLAHSIPLLETVSHIKHISDTAKFFLQCQQLIYNRSIPFYLGHIRAHSGLPGPLSQGNHITDLATKVVATTLTTAGKRTADGSEFEKRTADGSEFESPKKKAKVE

SEQ ID NO: 748 - protein, 2024 aa, synthetic construct
MPAAKRVKLDGGDKKYSIGLDIGTNSVGWAVITDEYKVPSKKFKVLGNTDRHSIKKNLIGALLFDSGETAEATRLKRTARRRYTRRKNRICYLQEIFSNEMAKVDDSFFHRLEESFLVEEDKKHERHPIFGNIVDEVAYHEKYPTIYHLRKKLVDSTDKADLRLIYLALAHMIKFRGHFLIEGDLNPDNSDVDKLFIQLVQTYNQLFEENPINASGVDAKAILSARLSKSRRLENLIAQLPGEKKNGLFGNLIALSLGLTPNFKSNFDLAEDAKLQLSKDTYDDDLDNLLAQIGDQYADLFLAAKNLSDAILLSDILRVNTEITKAPLSASMIKRYDEHHQDLTLLKALVRQQLPEKYKEIFFDQSKNGYAGYIDGGASQEEFYKFIKPILEKMDGTEELLVKLNREDLLRKQRTFDNGSIPHQIHLGELHAILRRQEDFYPFLKDNREKIEKILTFRIPYYVGPLARGNSRFAWMTRKSEETITPWNFEEVVDKGASAQSFIERMTNFDKNLPNEKVLPKHSLLYEYFTVYNELTKVKYVTEGMRKPAFLSGEQKKAIVDLLFKTNRKVTVKQLKEDYFKKIECFDSVEISGVEDRFNASLGTYHDLLKIIKDKDFLDNEENEDILEDIVLTLTLFEDREMIEERLKTYAHLFDDKVMKQLKRRRYTGWGRLSRKLINGIRDKQSGKTILDFLKSDGFANRNFMQLIHDDSLTFKEDIQKAQVSGQGDSLHEHIANLAGSPAIKKGILQTVKVVDELVKVMGRHKPENIVIEMARENQTTQKGQKNSRERMKRIEEGIKELGSQILKEHPVENTQLQNEKLYLYYLQNGRDMYVDQELDINRLSDYDVDHIVPQSFLKDDSIDNKVLTRSDKARGKSDNVPSEEVVKKMKNYWRQLLNAKLITQRKFDNLTKAERGGLSELDKAGFIKRQLVETRQITKHVAQILDSRMNTKYDENDKLIREVKVITLKSKLVSDFRKDFQFYKVREINNYHHAHDAYLNAVVGTALIKKYPKLESEFVYGDYKVYDVRKMIAKSEQEIGKATAKYFFYSNIMNFFKTEITLANGEIRKRPLIETNGETGEIVWDKGRDFATVRKVLSMPQVNIVKKTEVQTGGFSKESILPKRNSDKLIARKKDWDPKKYGGFDSPTVAYSVLVVAKVEKGKSKKLKSVKELLGITIMERSSFEKNPIDFLEAKGYKEVKKDLIIKLPKYSLFELENGRKRMLASAGELQKGNELALPSKYVNFLYLASHYEKLKGSPEDNEQKQLFVEQHKHYLDEIIEQISEFSKRVILADANLDKVLSAYNKHRDKPIREQAENIIHLFTLTNLGAPAAFKYFDTTIDRKRYTSTKEVLDATLIHQSITGLYETRIDLSQLGGDGGEAAAKEAAAKEAAAKEAAAKEAAAKGGLATAVDILAPQRYADPITWKSDEPVWVDQWPLTQEKLAAAQQLVQEQLQAGHIIESNSPWNTPIFVIKKKSGKWRLLQDLRAVNATMVLMGALQPGLPSPVAIPQGYFKIVIDLKDCFFTIPLQPVDQKRFAFSLPSTNFKQPMKRYQWKVLPQGMANSPTLCQKYVAAAIEPVRKSWAQMYIIHYMDDILIAGKLGEQVLQCFAQLKQALTTTGLQIAPEKVQLQDPYTYLGFQINGPKITNQKAVIRRDKLQTLNDFQKLLGDINWLRPYLHLTTGDLKPLFDILKGDSNPNSPRSLSEAALASLQKVETAIAEQFVTQIDYTQPLTFLIFNTTLTPTGLFWQNNPVMWVHLPASPKKVLLPYYDAIADLIILGRDNSKKYFGLEPSTIIQPYSKSQIHWLMQNTETWPIACASYAGNIDNHYPPNKLIQFCKLHAVVFPRIISKTPLDNALLVFTDGSSTGIAAYTFEKTTVRFKTSHTSAQLVELQALIAVLSAFPHRALNVYTDSAYLAHSIPLLETVSHIKHISDTAKFFLQCQQLIYNRSIPFYLGHIRAHSGLPGPLSQGNHITDLATKVVATTLTTAGKRTADGSEFEKRTADGSEFESPKKKAKVE

SEQ ID NO: 749 - protein, 2012 aa, synthetic construct
MPAAKRVKLDGGDKKYSIGLDIGTNSVGWAVITDEYKVPSKKFKVLGNTDRHSIKKNLIGALLFDSGETAEATRLKRTARRRYTRRKNRICYLQEIFSNEMAKVDDSFFHRLEESFLVEEDKKHERHPIFGNIVDEVAYHEKYPTIYHLRKKLVDSTDKADLRLIYLALAHMIKFRGHFLIEGDLNPDNSDVDKLFIQLVQTYNQLFEENPINASGVDAKAILSARLSKSRRLENLIAQLPGEKKNGLFGNLIALSLGLTPNFKSNFDLAEDAKLQLSKDTYDDDLDNLLAQIGDQYADLFLAAKNLSDAILLSDILRVNTEITKAPLSASMIKRYDEHHQDLTLLKALVRQQLPEKYKEIFFDQSKNGYAGYIDGGASQEEFYKFIKPILEKMDGTEELLVKLNREDLLRKQRTFDNGSIPHQIHLGELHAILRRQEDFYPFLKDNREKIEKILTFRIPYYVGPLARGNSRFAWMTRKSEETITPWNFEEVVDKGASAQSFIERMTNFDKNLPNEKVLPKHSLLYEYFTVYNELTKVKYVTEGMRKPAFLSGEQKKAIVDLLFKTNRKVTVKQLKEDYFKKIECFDSVEISGVEDRFNASLGTYHDLLKIIKDKDFLDNEENEDILEDIVLTLTLFEDREMIEERLKTYAHLFDDKVMKQLKRRRYTGWGRLSRKLINGIRDKQSGKTILDFLKSDGFANRNFMQLIHDDSLTFKEDIQKAQVSGQGDSLHEHIANLAGSPAIKKGILQTVKVVDELVKVMGRHKPENIVIEMARENQTTQKGQKNSRERMKRIEEGIKELGSQILKEHPVENTQLQNEKLYLYYLQNGRDMYVDQELDINRLSDYDVDHIVPQSFLKDDSIDNKVLTRSDKARGKSDNVPSEEVVKKMKNYWRQLLNAKLITQRKFDNLTKAERGGLSELDKAGFIKRQLVETRQITKHVAQILDSRMNTKYDENDKLIREVKVITLKSKLVSDFRKDFQFYKVREINNYHHAHDAYLNAVVGTALIKKYPKLESEFVYGDYKVYDVRKMIAKSEQEIGKATAKYFFYSNIMNFFKTEITLANGEIRKRPLIETNGETGEIVWDKGRDFATVRKVLSMPQVNIVKKTEVQTGGFSKESILPKRNSDKLIARKKDWDPKKYGGFDSPTVAYSVLVVAKVEKGKSKKLKSVKELLGITIMERSSFEKNPIDFLEAKGYKEVKKDLIIKLPKYSLFELENGRKRMLASAGELQKGNELALPSKYVNFLYLASHYEKLKGSPEDNEQKQLFVEQHKHYLDEIIEQISEFSKRVILADANLDKVLSAYNKHRDKPIREQAENIIHLFTLTNLGAPAAFKYFDTTIDRKRYTSTKEVLDATLIHQSITGLYETRIDLSQLGGDGGPAPAPAPAPAPAPGGLATAVDILAPQRYADPITWKSDEPVWVDQWPLTQEKLAAAQQLVQEQLQAGHIIESNSPWNTPIFVIKKKSGKWRLLQDLRAVNATMVLMGALQPGLPSPVAIPQGYFKIVIDLKDCFFTIPLQPVDQKRFAFSLPSTNFKQPMKRYQWKVLPQGMANSPTLCQKYVAAAIEPVRKSWAQMYIIHYMDDILIAGKLGEQVLQCFAQLKQALTTTGLQIAPEKVQLQDPYTYLGFQINGPKITNQKAVIRRDKLQTLNDFQKLLGDINWLRPYLHLTTGDLKPLFDILKGDSNPNSPRSLSEAALASLQKVETAIAEQFVTQIDYTQPLTFLIFNTTLTPTGLFWQNNPVMWVHLPASPKKVLLPYYDAIADLIILGRDNSKKYFGLEPSTIIQPYSKSQIHWLMQNTETWPIACASYAGNIDNHYPPNKLIQFCKLHAVVFPRIISKTPLDNALLVFTDGSSTGIAAYTFEKTTVRFKTSHTSAQLVELQALIAVLSAFPHRALNVYTDSAYLAHSIPLLETVSHIKHISDTAKFFLQCQQLIYNRSIPFYLGHIRAHSGLPGPLSQGNHITDLATKVVATTLTTAGKRTADGSEFEKRTADGSEFESPKKKAKVE

SEQ ID NO: 750 - protein, 2010 aa, synthetic construct
MPAAKRVKLDGGDKKYSIGLDIGTNSVGWAVITDEYKVPSKKFKVLGNTDRHSIKKNLIGALLFDSGETAEATRLKRTARRRYTRRKNRICYLQEIFSNEMAKVDDSFFHRLEESFLVEEDKKHERHPIFGNIVDEVAYHEKYPTIYHLRKKLVDSTDKADLRLIYLALAHMIKFRGHFLIEGDLNPDNSDVDKLFIQLVQTYNQLFEENPINASGVDAKAILSARLSKSRRLENLIAQLPGEKKNGLFGNLIALSLGLTPNFKSNFDLAEDAKLQLSKDTYDDDLDNLLAQIGDQYADLFLAAKNLSDAILLSDILRVNTEITKAPLSASMIKRYDEHHQDLTLLKALVRQQLPEKYKEIFFDQSKNGYAGYIDGGASQEEFYKFIKPILEKMDGTEELLVKLNREDLLRKQRTFDNGSIPHQIHLGELHAILRRQEDFYPFLKDNREKIEKILTFRIPYYVGPLARGNSRFAWMTRKSEETITPWNFEEVVDKGASAQSFIERMTNFDKNLPNEKVLPKHSLLYEYFTVYNELTKVKYVTEGMRKPAFLSGEQKKAIVDLLFKTNRKVTVKQLKEDYFKKIECFDSVEISGVEDRFNASLGTYHDLLKIIKDKDFLDNEENEDILEDIVLTLTLFEDREMIEERLKTYAHLFDDKVMKQLKRRRYTGWGRLSRKLINGIRDKQSGKTILDFLKSDGFANRNFMQLIHDDSLTFKEDIQKAQVSGQGDSLHEHIANLAGSPAIKKGILQTVKVVDELVKVMGRHKPENIVIEMARENQTTQKGQKNSRERMKRIEEGIKELGSQILKEHPVENTQLQNEKLYLYYLQNGRDMYVDQELDINRLSDYDVDHIVPQSFLKDDSIDNKVLTRSDKARGKSDNVPSEEVVKKMKNYWRQLLNAKLITQRKFDNLTKAERGGLSELDKAGFIKRQLVETRQITKHVAQILDSRMNTKYDENDKLIREVKVITLKSKLVSDFRKDFQFYKVREINNYHHAHDAYLNAVVGTALIKKYPKLESEFVYGDYKVYDVRKMIAKSEQEIGKATAKYFFYSNIMNFFKTEITLANGEIRKRPLIETNGETGEIVWDKGRDFATVRKVLSMPQVNIVKKTEVQTGGFSKESILPKRNSDKLIARKKDWDPKKYGGFDSPTVAYSVLVVAKVEKGKSKKLKSVKELLGITIMERSSFEKNPIDFLEAKGYKEVKKDLIIKLPKYSLFELENGRKRMLASAGELQKGNELALPSKYVNFLYLASHYEKLKGSPEDNEQKQLFVEQHKHYLDEIIEQISEFSKRVILADANLDKVLSAYNKHRDKPIREQAENIIHLFTLTNLGAPAAFKYFDTTIDRKRYTSTKEVLDATLIHQSITGLYETRIDLSQLGGDGGPAPAPAPAPAPGGLATAVDILAPQRYADPITWKSDEPVWVDQWPLTQEKLAAAQQLVQEQLQAGHIIESNSPWNTPIFVIKKKSGKWRLLQDLRAVNATMVLMGALQPGLPSPVAIPQGYFKIVIDLKDCFFTIPLQPVDQKRFAFSLPSTNFKQPMKRYQWKVLPQGMANSPTLCQKYVAAAIEPVRKSWAQMYIIHYMDDILIAGKLGEQVLQCFAQLKQALTTTGLQIAPEKVQLQDPYTYLGFQINGPKITNQKAVIRRDKLQTLNDFQKLLGDINWLRPYLHLTTGDLKPLFDILKGDSNPNSPRSLSEAALASLQKVETAIAEQFVTQIDYTQPLTFLIFNTTLTPTGLFWQNNPVMWVHLPASPKKVLLPYYDAIADLIILGRDNSKKYFGLEPSTIIQPYSKSQIHWLMQNTETWPIACASYAGNIDNHYPPNKLIQFCKLHAVVFPRIISKTPLDNALLVFTDGSSTGIAAYTFEKTTVRFKTSHTSAQLVELQALIAVLSAFPHRALNVYTDSAYLAHSIPLLETVSHIKHISDTAKFFLQCQQLIYNRSIPFYLGHIRAHSGLPGPLSQGNHITDLATKVVATTLTTAGKRTADGSEFEKRTADGSEFESPKKKAKVE

SEQ ID NO: 751 - protein, 2014 aa, synthetic construct
MPAAKRVKLDGGDKKYSIGLDIGTNSVGWAVITDEYKVPSKKFKVLGNTDRHSIKKNLIGALLFDSGETAEATRLKRTARRRYTRRKNRICYLQEIFSNEMAKVDDSFFHRLEESFLVEEDKKHERHPIFGNIVDEVAYHEKYPTIYHLRKKLVDSTDKADLRLIYLALAHMIKFRGHFLIEGDLNPDNSDVDKLFIQLVQTYNQLFEENPINASGVDAKAILSARLSKSRRLENLIAQLPGEKKNGLFGNLIALSLGLTPNFKSNFDLAEDAKLQLSKDTYDDDLDNLLAQIGDQYADLFLAAKNLSDAILLSDILRVNTEITKAPLSASMIKRYDEHHQDLTLLKALVRQQLPEKYKEIFFDQSKNGYAGYIDGGASQEEFYKFIKPILEKMDGTEELLVKLNREDLLRKQRTFDNGSIPHQIHLGELHAILRRQEDFYPFLKDNREKIEKILTFRIPYYVGPLARGNSRFAWMTRKSEETITPWNFEEVVDKGASAQSFIERMTNFDKNLPNEKVLPKHSLLYEYFTVYNELTKVKYVTEGMRKPAFLSGEQKKAIVDLLFKTNRKVTVKQLKEDYFKKIECFDSVEISGVEDRFNASLGTYHDLLKIIKDKDFLDNEENEDILEDIVLTLTLFEDREMIEERLKTYAHLFDDKVMKQLKRRRYTGWGRLSRKLINGIRDKQSGKTILDFLKSDGFANRNFMQLIHDDSLTFKEDIQKAQVSGQGDSLHEHIANLAGSPAIKKGILQTVKVVDELVKVMGRHKPENIVIEMARENQTTQKGQKNSRERMKRIEEGIKELGSQILKEHPVENTQLQNEKLYLYYLQNGRDMYVDQELDINRLSDYDVDHIVPQSFLKDDSIDNKVLTRSDKARGKSDNVPSEEVVKKMKNYWRQLLNAKLITQRKFDNLTKAERGGLSELDKAGFIKRQLVETRQITKHVAQILDSRMNTKYDENDKLIREVKVITLKSKLVSDFRKDFQFYKVREINNYHHAHDAYLNAVVGTALIKKYPKLESEFVYGDYKVYDVRKMIAKSEQEIGKATAKYFFYSNIMNFFKTEITLANGEIRKRPLIETNGETGEIVWDKGRDFATVRKVLSMPQVNIVKKTEVQTGGFSKESILPKRNSDKLIARKKDWDPKKYGGFDSPTVAYSVLVVAKVEKGKSKKLKSVKELLGITIMERSSFEKNPIDFLEAKGYKEVKKDLIIKLPKYSLFELENGRKRMLASAGELQKGNELALPSKYVNFLYLASHYEKLKGSPEDNEQKQLFVEQHKHYLDEIIEQISEFSKRVILADANLDKVLSAYNKHRDKPIREQAENIIHLFTLTNLGAPAAFKYFDTTIDRKRYTSTKEVLDATLIHQSITGLYETRIDLSQLGGDGGGSSGSSGSSGSSGSSGGLATAVDILAPQRYADPITWKSDEPVWVDQWPLTQEKLAAAQQLVQEQLQAGHIIESNSPWNTPIFVIKKKSGKWRLLQDLRAVNATMVLMGALQPGLPSPVAIPQGYFKIVIDLKDCFFTIPLQPVDQKRFAFSLPSTNFKQPMKRYQWKVLPQGMANSPTLCQKYVAAAIEPVRKSWAQMYIIHYMDDILIAGKLGEQVLQCFAQLKQALTTTGLQIAPEKVQLQDPYTYLGFQINGPKITNQKAVIRRDKLQTLNDFQKLLGDINWLRPYLHLTTGDLKPLFDILKGDSNPNSPRSLSEAALASLQKVETAIAEQFVTQIDYTQPLTFLIFNTTLTPTGLFWQNNPVMWVHLPASPKKVLLPYYDAIADLIILGRDNSKKYFGLEPSTIIQPYSKSQIHWLMQNTETWPIACASYAGNIDNHYPPNKLIQFCKLHAVVFPRIISKTPLDNALLVFTDGSSTGIAAYTFEKTTVRFKTSHTSAQLVELQALIAVLSAFPHRALNVYTDSAYLAHSIPLLETVSHIKHISDTAKFFLQCQQLIYNRSIPFYLGHIRAHSGLPGPLSQGNHITDLATKVVATTLTTAGKRTADGSEFEKRTADGSEFESPKKKAKVE

SEQ ID NO: 752 - protein, 2015 aa, synthetic construct
MPAAKRVKLDGGDKKYSIGLDIGTNSVGWAVITDEYKVPSKKFKVLGNTDRHSIKKNLIGALLFDSGETAEATRLKRTARRRYTRRKNRICYLQEIFSNEMAKVDDSFFHRLEESFLVEEDKKHERHPIFGNIVDEVAYHEKYPTIYHLRKKLVDSTDKADLRLIYLALAHMIKFRGHFLIEGDLNPDNSDVDKLFIQLVQTYNQLFEENPINASGVDAKAILSARLSKSRRLENLIAQLPGEKKNGLFGNLIALSLGLTPNFKSNFDLAEDAKLQLSKDTYDDDLDNLLAQIGDQYADLFLAAKNLSDAILLSDILRVNTEITKAPLSASMIKRYDEHHQDLTLLKALVRQQLPEKYKEIFFDQSKNGYAGYIDGGASQEEFYKFIKPILEKMDGTEELLVKLNREDLLRKQRTFDNGSIPHQIHLGELHAILRRQEDFYPFLKDNREKIEKILTFRIPYYVGPLARGNSRFAWMTRKSEETITPWNFEEVVDKGASAQSFIERMTNFDKNLPNEKVLPKHSLLYEYFTVYNELTKVKYVTEGMRKPAFLSGEQKKAIVDLLFKTNRKVTVKQLKEDYFKKIECFDSVEISGVEDRFNASLGTYHDLLKIIKDKDFLDNEENEDILEDIVLTLTLFEDREMIEERLKTYAHLFDDKVMKQLKRRRYTGWGRLSRKLINGIRDKQSGKTILDFLKSDGFANRNFMQLIHDDSLTFKEDIQKAQVSGQGDSLHEHIANLAGSPAIKKGILQTVKVVDELVKVMGRHKPENIVIEMARENQTTQKGQKNSRERMKRIEEGIKELGSQILKEHPVENTQLQNEKLYLYYLQNGRDMYVDQELDINRLSDYDVDHIVPQSFLKDDSIDNKVLTRSDKARGKSDNVPSEEVVKKMKNYWRQLLNAKLITQRKFDNLTKAERGGLSELDKAGFIKRQLVETRQITKHVAQILDSRMNTKYDENDKLIREVKVITLKSKLVSDFRKDFQFYKVREINNYHHAHDAYLNAVVGTALIKKYPKLESEFVYGDYKVYDVRKMIAKSEQEIGKATAKYFFYSNIMNFFKTEITLANGEIRKRPLIETNGETGEIVWDKGRDFATVRKVLSMPQVNIVKKTEVQTGGFSKESILPKRNSDKLIARKKDWDPKKYGGFDSPTVAYSVLVVAKVEKGKSKKLKSVKELLGITIMERSSFEKNPIDFLEAKGYKEVKKDLIIKLPKYSLFELENGRKRMLASAGELQKGNELALPSKYVNFLYLASHYEKLKGSPEDNEQKQLFVEQHKHYLDEIIEQISEFSKRVILADANLDKVLSAYNKHRDKPIREQAENIIHLFTLTNLGAPAAFKYFDTTIDRKRYTSTKEVLDATLIHQSITGLYETRIDLSQLGGDGGSGSETPGTSESATPESGGLATAVDILAPQRYADPITWKSDEPVWVDQWPLTQEKLAAAQQLVQEQLQAGHIIESNSPWNTPIFVIKKKSGKWRLLQDLRAVNATMVLMGALQPGLPSPVAIPQGYFKIVIDLKDCFFTIPLQPVDQKRFAFSLPSTNFKQPMKRYQWKVLPQGMANSPTLCQKYVAAAIEPVRKSWAQMYIIHYMDDILIAGKLGEQVLQCFAQLKQALTTTGLQIAPEKVQLQDPYTYLGFQINGPKITNQKAVIRRDKLQTLNDFQKLLGDINWLRPYLHLTTGDLKPLFDILKGDSNPNSPRSLSEAALASLQKVETAIAEQFVTQIDYTQPLTFLIFNTTLTPTGLFWQNNPVMWVHLPASPKKVLLPYYDAIADLIILGRDNSKKYFGLEPSTIIQPYSKSQIHWLMQNTETWPIACASYAGNIDNHYPPNKLIQFCKLHAVVFPRIISKTPLDNALLVFTDGSSTGIAAYTFEKTTVRFKTSHTSAQLVELQALIAVLSAFPHRALNVYTDSAYLAHSIPLLETVSHIKHISDTAKFFLQCQQLIYNRSIPFYLGHIRAHSGLPGPLSQGNHITDLATKVVATTLTTAGKRTADGSEFEKRTADGSEFESPKKKAKVE

SEQ ID NO: 753 - protein, 2010 aa, synthetic construct
MPAAKRVKLDGGDKKYSIGLDIGTNSVGWAVITDEYKVPSKKFKVLGNTDRHSIKKNLIGALLFDSGETAEATRLKRTARRRYTRRKNRICYLQEIFSNEMAKVDDSFFHRLEESFLVEEDKKHERHPIFGNIVDEVAYHEKYPTIYHLRKKLVDSTDKADLRLIYLALAHMIKFRGHFLIEGDLNPDNSDVDKLFIQLVQTYNQLFEENPINASGVDAKAILSARLSKSRRLENLIAQLPGEKKNGLFGNLIALSLGLTPNFKSNFDLAEDAKLQLSKDTYDDDLDNLLAQIGDQYADLFLAAKNLSDAILLSDILRVNTEITKAPLSASMIKRYDEHHQDLTLLKALVRQQLPEKYKEIFFDQSKNGYAGYIDGGASQEEFYKFIKPILEKMDGTEELLVKLNREDLLRKQRTFDNGSIPHQIHLGELHAILRRQEDFYPFLKDNREKIEKILTFRIPYYVGPLARGNSRFAWMTRKSEETITPWNFEEVVDKGASAQSFIERMTNFDKNLPNEKVLPKHSLLYEYFTVYNELTKVKYVTEGMRKPAFLSGEQKKAIVDLLFKTNRKVTVKQLKEDYFKKIECFDSVEISGVEDRFNASLGTYHDLLKIIKDKDFLDNEENEDILEDIVLTLTLFEDREMIEERLKTYAHLFDDKVMKQLKRRRYTGWGRLSRKLINGIRDKQSGKTILDFLKSDGFANRNFMQLIHDDSLTFKEDIQKAQVSGQGDSLHEHIANLAGSPAIKKGILQTVKVVDELVKVMGRHKPENIVIEMARENQTTQKGQKNSRERMKRIEEGIKELGSQILKEHPVENTQLQNEKLYLYYLQNGRDMYVDQELDINRLSDYDVDHIVPQSFLKDDSIDNKVLTRSDKARGKSDNVPSEEVVKKMKNYWRQLLNAKLITQRKFDNLTKAERGGLSELDKAGFIKRQLVETRQITKHVAQILDSRMNTKYDENDKLIREVKVITLKSKLVSDFRKDFQFYKVREINNYHHAHDAYLNAVVGTALIKKYPKLESEFVYGDYKVYDVRKMIAKSEQEIGKATAKYFFYSNIMNFFKTEITLANGEIRKRPLIETNGETGEIVWDKGRDFATVRKVLSMPQVNIVKKTEVQTGGFSKESILPKRNSDKLIARKKDWDPKKYGGFDSPTVAYSVLVVAKVEKGKSKKLKSVKELLGITIMERSSFEKNPIDFLEAKGYKEVKKDLIIKLPKYSLFELENGRKRMLASAGELQKGNELALPSKYVNFLYLASHYEKLKGSPEDNEQKQLFVEQHKHYLDEIIEQISEFSKRVILADANLDKVLSAYNKHRDKPIREQAENIIHLFTLTNLGAPAAFKYFDTTIDRKRYTSTKEVLDATLIHQSITGLYETRIDLSQLGGDGGGSSPAPEAAAKGGLATAVDILAPQRYADPITWKSDEPVWVDQWPLTQEKLAAAQQLVQEQLQAGHIIESNSPWNTPIFVIKKKSGKWRLLQDLRAVNATMVLMGALQPGLPSPVAIPQGYFKIVIDLKDCFFTIPLQPVDQKRFAFSLPSTNFKQPMKRYQWKVLPQGMANSPTLCQKYVAAAIEPVRKSWAQMYIIHYMDDILIAGKLGEQVLQCFAQLKQALTTTGLQIAPEKVQLQDPYTYLGFQINGPKITNQKAVIRRDKLQTLNDFQKLLGDINWLRPYLHLTTGDLKPLFDILKGDSNPNSPRSLSEAALASLQKVETAIAEQFVTQIDYTQPLTFLIFNTTLTPTGLFWQNNPVMWVHLPASPKKVLLPYYDAIADLIILGRDNSKKYFGLEPSTIIQPYSKSQIHWLMQNTETWPIACASYAGNIDNHYPPNKLIQFCKLHAVVFPRIISKTPLDNALLVFTDGSSTGIAAYTFEKTTVRFKTSHTSAQLVELQALIAVLSAFPHRALNVYTDSAYLAHSIPLLETVSHIKHISDTAKFFLQCQQLIYNRSIPFYLGHIRAHSGLPGPLSQGNHITDLATKVVATTLTTAGKRTADGSEFEKRTADGSEFESPKKKAKVE

SEQ ID NO: 754 - protein, 2010 aa, synthetic construct
MPAAKRVKLDGGDKKYSIGLDIGTNSVGWAVITDEYKVPSKKFKVLGNTDRHSIKKNLIGALLFDSGETAEATRLKRTARRRYTRRKNRICYLQEIFSNEMAKVDDSFFHRLEESFLVEEDKKHERHPIFGNIVDEVAYHEKYPTIYHLRKKLVDSTDKADLRLIYLALAHMIKFRGHFLIEGDLNPDNSDVDKLFIQLVQTYNQLFEENPINASGVDAKAILSARLSKSRRLENLIAQLPGEKKNGLFGNLIALSLGLTPNFKSNFDLAEDAKLQLSKDTYDDDLDNLLAQIGDQYADLFLAAKNLSDAILLSDILRVNTEITKAPLSASMIKRYDEHHQDLTLLKALVRQQLPEKYKEIFFDQSKNGYAGYIDGGASQEEFYKFIKPILEKMDGTEELLVKLNREDLLRKQRTFDNGSIPHQIHLGELHAILRRQEDFYPFLKDNREKIEKILTFRIPYYVGPLARGNSRFAWMTRKSEETITPWNFEEVVDKGASAQSFIERMTNFDKNLPNEKVLPKHSLLYEYFTVYNELTKVKYVTEGMRKPAFLSGEQKKAIVDLLFKTNRKVTVKQLKEDYFKKIECFDSVEISGVEDRFNASLGTYHDLLKIIKDKDFLDNEENEDILEDIVLTLTLFEDREMIEERLKTYAHLFDDKVMKQLKRRRYTGWGRLSRKLINGIRDKQSGKTILDFLKSDGFANRNFMQLIHDDSLTFKEDIQKAQVSGQGDSLHEHIANLAGSPAIKKGILQTVKVVDELVKVMGRHKPENIVIEMARENQTTQKGQKNSRERMKRIEEGIKELGSQILKEHPVENTQLQNEKLYLYYLQNGRDMYVDQELDINRLSDYDVDHIVPQSFLKDDSIDNKVLTRSDKARGKSDNVPSEEVVKKMKNYWRQLLNAKLITQRKFDNLTKAERGGLSELDKAGFIKRQLVETRQITKHVAQILDSRMNTKYDENDKLIREVKVITLKSKLVSDFRKDFQFYKVREINNYHHAHDAYLNAVVGTALIKKYPKLESEFVYGDYKVYDVRKMIAKSEQEIGKATAKYFFYSNIMNFFKTEITLANGEIRKRPLIETNGETGEIVWDKGRDFATVRKVLSMPQVNIVKKTEVQTGGFSKESILPKRNSDKLIARKKDWDPKKYGGFDSPTVAYSVLVVAKVEKGKSKKLKSVKELLGITIMERSSFEKNPIDFLEAKGYKEVKKDLIIKLPKYSLFELENGRKRMLASAGELQKGNELALPSKYVNFLYLASHYEKLKGSPEDNEQKQLFVEQHKHYLDEIIEQISEFSKRVILADANLDKVLSAYNKHRDKPIREQAENIIHLFTLTNLGAPAAFKYFDTTIDRKRYTSTKEVLDATLIHQSITGLYETRIDLSQLGGDGGGSSGGSEAAAKGGLATAVDILAPQRYADPITWKSDEPVWVDQWPLTQEKLAAAQQLVQEQLQAGHIIESNSPWNTPIFVIKKKSGKWRLLQDLRAVNATMVLMGALQPGLPSPVAIPQGYFKIVIDLKDCFFTIPLQPVDQKRFAFSLPSTNFKQPMKRYQWKVLPQGMANSPTLCQKYVAAAIEPVRKSWAQMYIIHYMDDILIAGKLGEQVLQCFAQLKQALTTTGLQIAPEKVQLQDPYTYLGFQINGPKITNQKAVIRRDKLQTLNDFQKLLGDINWLRPYLHLTTGDLKPLFDILKGDSNPNSPRSLSEAALASLQKVETAIAEQFVTQIDYTQPLTFLIFNTTLTPTGLFWQNNPVMWVHLPASPKKVLLPYYDAIADLIILGRDNSKKYFGLEPSTIIQPYSKSQIHWLMQNTETWPIACASYAGNIDNHYPPNKLIQFCKLHAVVFPRIISKTPLDNALLVFTDGSSTGIAAYTFEKTTVRFKTSHTSAQLVELQALIAVLSAFPHRALNVYTDSAYLAHSIPLLETVSHIKHISDTAKFFLQCQQLIYNRSIPFYLGHIRAHSGLPGPLSQGNHITDLATKVVATTLTTAGKRTADGSEFEKRTADGSEFESPKKKAKVE

SEQ ID NO: 755 - protein, 2008 aa, synthetic construct
MPAAKRVKLDGGDKKYSIGLDIGTNSVGWAVITDEYKVPSKKFKVLGNTDRHSIKKNLIGALLFDSGETAEATRLKRTARRRYTRRKNRICYLQEIFSNEMAKVDDSFFHRLEESFLVEEDKKHERHPIFGNIVDEVAYHEKYPTIYHLRKKLVDSTDKADLRLIYLALAHMIKFRGHFLIEGDLNPDNSDVDKLFIQLVQTYNQLFEENPINASGVDAKAILSARLSKSRRLENLIAQLPGEKKNGLFGNLIALSLGLTPNFKSNFDLAEDAKLQLSKDTYDDDLDNLLAQIGDQYADLFLAAKNLSDAILLSDILRVNTEITKAPLSASMIKRYDEHHQDLTLLKALVRQQLPEKYKEIFFDQSKNGYAGYIDGGASQEEFYKFIKPILEKMDGTEELLVKLNREDLLRKQRTFDNGSIPHQIHLGELHAILRRQEDFYPFLKDNREKIEKILTFRIPYYVGPLARGNSRFAWMTRKSEETITPWNFEEVVDKGASAQSFIERMTNFDKNLPNEKVLPKHSLLYEYFTVYNELTKVKYVTEGMRKPAFLSGEQKKAIVDLLFKTNRKVTVKQLKEDYFKKIECFDSVEISGVEDRFNASLGTYHDLLKIIKDKDFLDNEENEDILEDIVLTLTLFEDREMIEERLKTYAHLFDDKVMKQLKRRRYTGWGRLSRKLINGIRDKQSGKTILDFLKSDGFANRNFMQLIHDDSLTFKEDIQKAQVSGQGDSLHEHIANLAGSPAIKKGILQTVKVVDELVKVMGRHKPENIVIEMARENQTTQKGQKNSRERMKRIEEGIKELGSQILKEHPVENTQLQNEKLYLYYLQNGRDMYVDQELDINRLSDYDVDHIVPQSFLKDDSIDNKVLTRSDKARGKSDNVPSEEVVKKMKNYWRQLLNAKLITQRKFDNLTKAERGGLSELDKAGFIKRQLVETRQITKHVAQILDSRMNTKYDENDKLIREVKVITLKSKLVSDFRKDFQFYKVREINNYHHAHDAYLNAVVGTALIKKYPKLESEFVYGDYKVYDVRKMIAKSEQEIGKATAKYFFYSNIMNFFKTEITLANGEIRKRPLIETNGETGEIVWDKGRDFATVRKVLSMPQVNIVKKTEVQTGGFSKESILPKRNSDKLIARKKDWDPKKYGGFDSPTVAYSVLVVAKVEKGKSKKLKSVKELLGITIMERSSFEKNPIDFLEAKGYKEVKKDLIIKLPKYSLFELENGRKRMLASAGELQKGNELALPSKYVNFLYLASHYEKLKGSPEDNEQKQLFVEQHKHYLDEIIEQISEFSKRVILADANLDKVLSAYNKHRDKPIREQAENIIHLFTLTNLGAPAAFKYFDTTIDRKRYTSTKEVLDATLIHQSITGLYETRIDLSQLGGDGGPAPGGGGGSGGLATAVDILAPQRYADPITWKSDEPVWVDQWPLTQEKLAAAQQLVQEQLQAGHIIESNSPWNTPIFVIKKKSGKWRLLQDLRAVNATMVLMGALQPGLPSPVAIPQGYFKIVIDLKDCFFTIPLQPVDQKRFAFSLPSTNFKQPMKRYQWKVLPQGMANSPTLCQKYVAAAIEPVRKSWAQMYIIHYMDDILIAGKLGEQVLQCFAQLKQALTTTGLQIAPEKVQLQDPYTYLGFQINGPKITNQKAVIRRDKLQTLNDFQKLLGDINWLRPYLHLTTGDLKPLFDILKGDSNPNSPRSLSEAALASLQKVETAIAEQFVTQIDYTQPLTFLIFNTTLTPTGLFWQNNPVMWVHLPASPKKVLLPYYDAIADLIILGRDNSKKYFGLEPSTIIQPYSKSQIHWLMQNTETWPIACASYAGNIDNHYPPNKLIQFCKLHAVVFPRIISKTPLDNALLVFTDGSSTGIAAYTFEKTTVRFKTSHTSAQLVELQALIAVLSAFPHRALNVYTDSAYLAHSIPLLETVSHIKHISDTAKFFLQCQQLIYNRSIPFYLGHIRAHSGLPGPLSQGNHITDLATKVVATTLTTAGKRTADGSEFEKRTADGSEFESPKKKAKVE

SEQ ID NO: 756 - protein, 2005 aa, synthetic construct
MPAAKRVKLDGGDKKYSIGLDIGTNSVGWAVITDEYKVPSKKFKVLGNTDRHSIKKNLIGALLFDSGETAEATRLKRTARRRYTRRKNRICYLQEIFSNEMAKVDDSFFHRLEESFLVEEDKKHERHPIFGNIVDEVAYHEKYPTIYHLRKKLVDSTDKADLRLIYLALAHMIKFRGHFLIEGDLNPDNSDVDKLFIQLVQTYNQLFEENPINASGVDAKAILSARLSKSRRLENLIAQLPGEKKNGLFGNLIALSLGLTPNFKSNFDLAEDAKLQLSKDTYDDDLDNLLAQIGDQYADLFLAAKNLSDAILLSDILRVNTEITKAPLSASMIKRYDEHHQDLTLLKALVRQQLPEKYKEIFFDQSKNGYAGYIDGGASQEEFYKFIKPILEKMDGTEELLVKLNREDLLRKQRTFDNGSIPHQIHLGELHAILRRQEDFYPFLKDNREKIEKILTFRIPYYVGPLARGNSRFAWMTRKSEETITPWNFEEVVDKGASAQSFIERMTNFDKNLPNEKVLPKHSLLYEYFTVYNELTKVKYVTEGMRKPAFLSGEQKKAIVDLLFKTNRKVTVKQLKEDYFKKIECFDSVEISGVEDRFNASLGTYHDLLKIIKDKDFLDNEENEDILEDIVLTLTLFEDREMIEERLKTYAHLFDDKVMKQLKRRRYTGWGRLSRKLINGIRDKQSGKTILDFLKSDGFANRNFMQLIHDDSLTFKEDIQKAQVSGQGDSLHEHIANLAGSPAIKKGILQTVKVVDELVKVMGRHKPENIVIEMARENQTTQKGQKNSRERMKRIEEGIKELGSQILKEHPVENTQLQNEKLYLYYLQNGRDMYVDQELDINRLSDYDVDHIVPQSFLKDDSIDNKVLTRSDKARGKSDNVPSEEVVKKMKNYWRQLLNAKLITQRKFDNLTKAERGGLSELDKAGFIKRQLVETRQITKHVAQILDSRMNTKYDENDKLIREVKVITLKSKLVSDFRKDFQFYKVREINNYHHAHDAYLNAVVGTALIKKYPKLESEFVYGDYKVYDVRKMIAKSEQEIGKATAKYFFYSNIMNFFKTEITLANGEIRKRPLIETNGETGEIVWDKGRDFATVRKVLSMPQVNIVKKTEVQTGGFSKESILPKRNSDKLIARKKDWDPKKYGGFDSPTVAYSVLVVAKVEKGKSKKLKSVKELLGITIMERSSFEKNPIDFLEAKGYKEVKKDLIIKLPKYSLFELENGRKRMLASAGELQKGNELALPSKYVNFLYLASHYEKLKGSPEDNEQKQLFVEQHKHYLDEIIEQISEFSKRVILADANLDKVLSAYNKHRDKPIREQAENIIHLFTLTNLGAPAAFKYFDTTIDRKRYTSTKEVLDATLIHQSITGLYETRIDLSQLGGDGGGGGGGSGGLATAVDILAPQRYADPITWKSDEPVWVDQWPLTQEKLAAAQQLVQEQLQAGHIIESNSPWNTPIFVIKKKSGKWRLLQDLRAVNATMVLMGALQPGLPSPVAIPQGYFKIVIDLKDCFFTIPLQPVDQKRFAFSLPSTNFKQPMKRYQWKVLPQGMANSPTLCQKYVAAAIEPVRKSWAQMYIIHYMDDILIAGKLGEQVLQCFAQLKQALTTTGLQIAPEKVQLQDPYTYLGFQINGPKITNQKAVIRRDKLQTLNDFQKLLGDINWLRPYLHLTTGDLKPLFDILKGDSNPNSPRSLSEAALASLQKVETAIAEQFVTQIDYTQPLTFLIFNTTLTPTGLFWQNNPVMWVHLPASPKKVLLPYYDAIADLIILGRDNSKKYFGLEPSTIIQPYSKSQIHWLMQNTETWPIACASYAGNIDNHYPPNKLIQFCKLHAVVFPRIISKTPLDNALLVFTDGSSTGIAAYTFEKTTVRFKTSHTSAQLVELQALIAVLSAFPHRALNVYTDSAYLAHSIPLLETVSHIKHISDTAKFFLQCQQLIYNRSIPFYLGHIRAHSGLPGPLSQGNHITDLATKVVATTLTTAGKRTADGSEFEKRTADGSEFESPKKKAKVE

SEQ ID NO: 757 - protein, 2014 aa, synthetic construct
MPAAKRVKLDGGDKKYSIGLDIGTNSVGWAVITDEYKVPSKKFKVLGNTDRHSIKKNLIGALLFDSGETAEATRLKRTARRRYTRRKNRICYLQEIFSNEMAKVDDSFFHRLEESFLVEEDKKHERHPIFGNIVDEVAYHEKYPTIYHLRKKLVDSTDKADLRLIYLALAHMIKFRGHFLIEGDLNPDNSDVDKLFIQLVQTYNQLFEENPINASGVDAKAILSARLSKSRRLENLIAQLPGEKKNGLFGNLIALSLGLTPNFKSNFDLAEDAKLQLSKDTYDDDLDNLLAQIGDQYADLFLAAKNLSDAILLSDILRVNTEITKAPLSASMIKRYDEHHQDLTLLKALVRQQLPEKYKEIFFDQSKNGYAGYIDGGASQEEFYKFIKPILEKMDGTEELLVKLNREDLLRKQRTFDNGSIPHQIHLGELHAILRRQEDFYPFLKDNREKIEKILTFRIPYYVGPLARGNSRFAWMTRKSEETITPWNFEEVVDKGASAQSFIERMTNFDKNLPNEKVLPKHSLLYEYFTVYNELTKVKYVTEGMRKPAFLSGEQKKAIVDLLFKTNRKVTVKQLKEDYFKKIECFDSVEISGVEDRFNASLGTYHDLLKIIKDKDFLDNEENEDILEDIVLTLTLFEDREMIEERLKTYAHLFDDKVMKQLKRRRYTGWGRLSRKLINGIRDKQSGKTILDFLKSDGFANRNFMQLIHDDSLTFKEDIQKAQVSGQGDSLHEHIANLAGSPAIKKGILQTVKVVDELVKVMGRHKPENIVIEMARENQTTQKGQKNSRERMKRIEEGIKELGSQILKEHPVENTQLQNEKLYLYYLQNGRDMYVDQELDINRLSDYDVDHIVPQSFLKDDSIDNKVLTRSDKARGKSDNVPSEEVVKKMKNYWRQLLNAKLITQRKFDNLTKAERGGLSELDKAGFIKRQLVETRQITKHVAQILDSRMNTKYDENDKLIREVKVITLKSKLVSDFRKDFQFYKVREINNYHHAHDAYLNAVVGTALIKKYPKLESEFVYGDYKVYDVRKMIAKSEQEIGKATAKYFFYSNIMNFFKTEITLANGEIRKRPLIETNGETGEIVWDKGRDFATVRKVLSMPQVNIVKKTEVQTGGFSKESILPKRNSDKLIARKKDWDPKKYGGFDSPTVAYSVLVVAKVEKGKSKKLKSVKELLGITIMERSSFEKNPIDFLEAKGYKEVKKDLIIKLPKYSLFELENGRKRMLASAGELQKGNELALPSKYVNFLYLASHYEKLKGSPEDNEQKQLFVEQHKHYLDEIIEQISEFSKRVILADANLDKVLSAYNKHRDKPIREQAENIIHLFTLTNLGAPAAFKYFDTTIDRKRYTSTKEVLDATLIHQSITGLYETRIDLSQLGGDGGGSSGSSGSSGSSGSSGGLATAVDILAPQRYADPITWKSDEPVWVDQWPLTQEKLAAAQQLVQEQLQAGHIIESNSPWNTPIFVIKKKSGKWRLLQDLRAVNATMVLMGALQPGLPSPVAPPQGYFKIVIDLKDCFFTIPLQPVDQKRFAFSLPSTNFKQPMKRYQWKVLPQGMANSPTLCQKYVAAAIEPVRKSWAQMYIIHYMDDILIAGKLGEQVLQCFAQLKQALTTTGLQIAPEKVQLQDPYTYLGFQINGPKITNQKAVIRRDKLQTLNDFQKLLGDINWLRPYLHLTTGDLKPLFDILKGDSNPNSPRSLSEAALASLQKVETAIAEQFVTQIDYTQPLTFLIFNTTLTPTGLFWQNNPVMWVHLPASPKKVLLPYYDAIADLIILGRDNSKKYFGLEPSTIIQPYSKSQIHWLMQNTETWPIACASYAGNIDNHYPPNKLIQFCKLHAVVFPRIISKTPLDNALLVFTDGSSTGIAAYTFEKTTVRFKTSHTSAQLVELQALIAVLSAFPHRALNVYTDSAYLAHSIPLLETVSHIKHISDTAKFFLQCQQLIYNRSIPFYLGHIRAHSGLPGPLSQGNHITDLATKVVATTLTTAGKRTADGSEFEKRTADGSEFESPKKKAKVE

SEQ ID NO: 758 - protein, 2010 aa, synthetic construct
MPAAKRVKLDGGDKKYSIGLDIGTNSVGWAVITDEYKVPSKKFKVLGNTDRHSIKKNLIGALLFDSGETAEATRLKRTARRRYTRRKNRICYLQEIFSNEMAKVDDSFFHRLEESFLVEEDKKHERHPIFGNIVDEVAYHEKYPTIYHLRKKLVDSTDKADLRLIYLALAHMIKFRGHFLIEGDLNPDNSDVDKLFIQLVQTYNQLFEENPINASGVDAKAILSARLSKSRRLENLIAQLPGEKKNGLFGNLIALSLGLTPNFKSNFDLAEDAKLQLSKDTYDDDLDNLLAQIGDQYADLFLAAKNLSDAILLSDILRVNTEITKAPLSASMIKRYDEHHQDLTLLKALVRQQLPEKYKEIFFDQSKNGYAGYIDGGASQEEFYKFIKPILEKMDGTEELLVKLNREDLLRKQRTFDNGSIPHQIHLGELHAILRRQEDFYPFLKDNREKIEKILTFRIPYYVGPLARGNSRFAWMTRKSEETITPWNFEEVVDKGASAQSFIERMTNFDKNLPNEKVLPKHSLLYEYFTVYNELTKVKYVTEGMRKPAFLSGEQKKAIVDLLFKTNRKVTVKQLKEDYFKKIECFDSVEISGVEDRFNASLGTYHDLLKIIKDKDFLDNEENEDILEDIVLTLTLFEDREMIEERLKTYAHLFDDKVMKQLKRRRYTGWGRLSRKLINGIRDKQSGKTILDFLKSDGFANRNFMQLIHDDSLTFKEDIQKAQVSGQGDSLHEHIANLAGSPAIKKGILQTVKVVDELVKVMGRHKPENIVIEMARENQTTQKGQKNSRERMKRIEEGIKELGSQILKEHPVENTQLQNEKLYLYYLQNGRDMYVDQELDINRLSDYDVDHIVPQSFLKDDSIDNKVLTRSDKARGKSDNVPSEEVVKKMKNYWRQLLNAKLITQRKFDNLTKAERGGLSELDKAGFIKRQLVETRQITKHVAQILDSRMNTKYDENDKLIREVKVITLKSKLVSDFRKDFQFYKVREINNYHHAHDAYLNAVVGTALIKKYPKLESEFVYGDYKVYDVRKMIAKSEQEIGKATAKYFFYSNIMNFFKTEITLANGEIRKRPLIETNGETGEIVWDKGRDFATVRKVLSMPQVNIVKKTEVQTGGFSKESILPKRNSDKLIARKKDWDPKKYGGFDSPTVAYSVLVVAKVEKGKSKKLKSVKELLGITIMERSSFEKNPIDFLEAKGYKEVKKDLIIKLPKYSLFELENGRKRMLASAGELQKGNELALPSKYVNFLYLASHYEKLKGSPEDNEQKQLFVEQHKHYLDEIIEQISEFSKRVILADANLDKVLSAYNKHRDKPIREQAENIIHLFTLTNLGAPAAFKYFDTTIDRKRYTSTKEVLDATLIHQSITGLYETRIDLSQLGGDGGGSSPAPEAAAKGGLATAVDILAPQRYADPITWKSDEPVWVDQWPLTQEKLAAAQQLVQEQLQAGHIIESNSPWNTPIFVIKKKSGKWRLLQDLRAVNATMVLMGALQPGLPSPVAPPQGYFKIVIDLKDCFFTIPLQPVDQKRFAFSLPSTNFKQPMKRYQWKVLPQGMANSPTLCQKYVAAAIEPVRKSWAQMYIIHYMDDILIAGKLGEQVLQCFAQLKQALTTTGLQIAPEKVQLQDPYTYLGFQINGPKITNQKAVIRRDKLQTLNDFQKLLGDINWLRPYLHLTTGDLKPLFDILKGDSNPNSPRSLSEAALASLQKVETAIAEQFVTQIDYTQPLTFLIFNTTLTPTGLFWQNNPVMWVHLPASPKKVLLPYYDAIADLIILGRDNSKKYFGLEPSTIIQPYSKSQIHWLMQNTETWPIACASYAGNIDNHYPPNKLIQFCKLHAVVFPRIISKTPLDNALLVFTDGSSTGIAAYTFEKTTVRFKTSHTSAQLVELQALIAVLSAFPHRALNVYTDSAYLAHSIPLLETVSHIKHISDTAKFFLQCQQLIYNRSIPFYLGHIRAHSGLPGPLSQGNHITDLATKVVATTLTTAGKRTADGSEFEKRTADGSEFESPKKKAKVE

SEQ ID NO: 759 - protein, 2072 aa, synthetic construct
MPAAKRVKLDGGDKKYSIGLDIGTNSVGWAVITDEYKVPSKKFKVLGNTDRHSIKKNLIGALLFDSGETAEATRLKRTARRRYTRRKNRICYLQEIFSNEMAKVDDSFFHRLEESFLVEEDKKHERHPIFGNIVDEVAYHEKYPTIYHLRKKLVDSTDKADLRLIYLALAHMIKFRGHFLIEGDLNPDNSDVDKLFIQLVQTYNQLFEENPINASGVDAKAILSARLSKSRRLENLIAQLPGEKKNGLFGNLIALSLGLTPNFKSNFDLAEDAKLQLSKDTYDDDLDNLLAQIGDQYADLFLAAKNLSDAILLSDILRVNTEITKAPLSASMIKRYDEHHQDLTLLKALVRQQLPEKYKEIFFDQSKNGYAGYIDGGASQEEFYKFIKPILEKMDGTEELLVKLNREDLLRKQRTFDNGSIPHQIHLGELHAILRRQEDFYPFLKDNREKIEKILTFRIPYYVGPLARGNSRFAWMTRKSEETITPWNFEEVVDKGASAQSFIERMTNFDKNLPNEKVLPKHSLLYEYFTVYNELTKVKYVTEGMRKPAFLSGEQKKAIVDLLFKTNRKVTVKQLKEDYFKKIECFDSVEISGVEDRFNASLGTYHDLLKIIKDKDFLDNEENEDILEDIVLTLTLFEDREMIEERLKTYAHLFDDKVMKQLKRRRYTGWGRLSRKLINGIRDKQSGKTILDFLKSDGFANRNFMQLIHDDSLTFKEDIQKAQVSGQGDSLHEHIANLAGSPAIKKGILQTVKVVDELVKVMGRHKPENIVIEMARENQTTQKGQKNSRERMKRIEEGIKELGSQILKEHPVENTQLQNEKLYLYYLQNGRDMYVDQELDINRLSDYDVDHIVPQSFLKDDSIDNKVLTRSDKARGKSDNVPSEEVVKKMKNYWRQLLNAKLITQRKFDNLTKAERGGLSELDKAGFIKRQLVETRQITKHVAQILDSRMNTKYDENDKLIREVKVITLKSKLVSDFRKDFQFYKVREINNYHHAHDAYLNAVVGTALIKKYPKLESEFVYGDYKVYDVRKMIAKSEQEIGKATAKYFFYSNIMNFFKTEITLANGEIRKRPLIETNGETGEIVWDKGRDFATVRKVLSMPQVNIVKKTEVQTGGFSKESILPKRNSDKLIARKKDWDPKKYGGFDSPTVAYSVLVVAKVEKGKSKKLKSVKELLGITIMERSSFEKNPIDFLEAKGYKEVKKDLIIKLPKYSLFELENGRKRMLASAGELQKGNELALPSKYVNFLYLASHYEKLKGSPEDNEQKQLFVEQHKHYLDEIIEQISEFSKRVILADANLDKVLSAYNKHRDKPIREQAENIIHLFTLTNLGAPAAFKYFDTTIDRKRYTSTKEVLDATLIHQSITGLYETRIDLSQLGGDGGPAPEAAAKGGSCQTKNTLNIDEYLLQFPDQLWASLPTDIGRMLVPPITIKIKDNASLPSIRQYPLPKDKTEGLRPLISSLENQGILIKCHSPCNTPIFPIKKAGRDEYRMIHDLRAINNIVAPLTAVVASPTTVLSNLAPSLHWFTVIDLSNAFFSVPIHKDSQYLFAFTFEGHQYTWTVLPQGFIHSPTLFSQALYQSLHKIKFKISSEICIYMDDVLIASKDRDTNLKDTAVMLQHLASEGHKVSKKKLQLCQQEVVYLGQLLTPEGRKILPDRKVTVSQFQQPTTIRQIRAFLGLVGYCRHWIPEFSIHSKFLEKQLKKDTAEPFQLDDQQVEAFNKLKHAITTAPVLVVPDPAKPFQLYTSHSEHASIAVLTQKHAGRTRPIAFLSSKFDAIESGLPPCLKACASIHRSLTQADSFILGAPLIIYTTHAICTLLQRDRSQLVTASRFSKWEADLLRPELTFVACSAVSPAHLYMQSCENNIPPHDCVLLTHTISRPRPDLSDLPIPDPDMTLFSDGSYTTGRGGAAVVMHRPVTDDFIIIHQQPGGASAQTAELLALAAACHLATDKTVNIYTDSRYAYGVVHDFGHLWMHRGFVTSAGTPIKNHKEIEYLLKQIMKPKQVSVIKIEAHTKGVSMEVRGNAAADEAAKNAVFLVQRAGKRTADGSEFEKRTADGSEFESPKKKAKVE

SEQ ID NO: 760 - protein, 2070 aa, synthetic construct
MPAAKRVKLDGGDKKYSIGLDIGTNSVGWAVITDEYKVPSKKFKVLGNTDRHSIKKNLIGALLFDSGETAEATRLKRTARRRYTRRKNRICYLQEIFSNEMAKVDDSFFHRLEESFLVEEDKKHERHPIFGNIVDEVAYHEKYPTIYHLRKKLVDSTDKADLRLIYLALAHMIKFRGHFLIEGDLNPDNSDVDKLFIQLVQTYNQLFEENPINASGVDAKAILSARLSKSRRLENLIAQLPGEKKNGLFGNLIALSLGLTPNFKSNFDLAEDAKLQLSKDTYDDDLDNLLAQIGDQYADLFLAAKNLSDAILLSDILRVNTEITKAPLSASMIKRYDEHHQDLTLLKALVRQQLPEKYKEIFFDQSKNGYAGYIDGGASQEEFYKFIKPILEKMDGTEELLVKLNREDLLRKQRTFDNGSIPHQIHLGELHAILRRQEDFYPFLKDNREKIEKILTFRIPYYVGPLARGNSRFAWMTRKSEETITPWNFEEVVDKGASAQSFIERMTNFDKNLPNEKVLPKHSLLYEYFTVYNELTKVKYVTEGMRKPAFLSGEQKKAIVDLLFKTNRKVTVKQLKEDYFKKIECFDSVEISGVEDRFNASLGTYHDLLKIIKDKDFLDNEENEDILEDIVLTLTLFEDREMIEERLKTYAHLFDDKVMKQLKRRRYTGWGRLSRKLINGIRDKQSGKTILDFLKSDGFANRNFMQLIHDDSLTFKEDIQKAQVSGQGDSLHEHIANLAGSPAIKKGILQTVKVVDELVKVMGRHKPENIVIEMARENQTTQKGQKNSRERMKRIEEGIKELGSQILKEHPVENTQLQNEKLYLYYLQNGRDMYVDQELDINRLSDYDVDHIVPQSFLKDDSIDNKVLTRSDKARGKSDNVPSEEVVKKMKNYWRQLLNAKLITQRKFDNLTKAERGGLSELDKAGFIKRQLVETRQITKHVAQILDSRMNTKYDENDKLIREVKVITLKSKLVSDFRKDFQFYKVREINNYHHAHDAYLNAVVGTALIKKYPKLESEFVYGDYKVYDVRKMIAKSEQEIGKATAKYFFYSNIMNFFKTEITLANGEIRKRPLIETNGETGEIVWDKGRDFATVRKVLSMPQVNIVKKTEVQTGGFSKESILPKRNSDKLIARKKDWDPKKYGGFDSPTVAYSVLVVAKVEKGKSKKLKSVKELLGITIMERSSFEKNPIDFLEAKGYKEVKKDLIIKLPKYSLFELENGRKRMLASAGELQKGNELALPSKYVNFLYLASHYEKLKGSPEDNEQKQLFVEQHKHYLDEIIEQISEFSKRVILADANLDKVLSAYNKHRDKPIREQAENIIHLFTLTNLGAPAAFKYFDTTIDRKRYTSTKEVLDATLIHQSITGLYETRIDLSQLGGDGGGGGGGGGGSCQTKNTLNIDEYLLQFPDQLWASLPTDIGRMLVPPITIKIKDNASLPSIRQYPLPKDKTEGLRPLISSLENQGILIKCHSPCNTPIFPIKKAGRDEYRMIHDLRAINNIVAPLTAVVASPTTVLSNLAPSLHWFTVIDLSNAFFSVPIHKDSQYLFAFTFEGHQYTWTVLPQGFIHSPTLFSQALYQSLHKIKFKISSEICIYMDDVLIASKDRDTNLKDTAVMLQHLASEGHKVSKKKLQLCQQEVVYLGQLLTPEGRKILPDRKVTVSQFQQPTTIRQIRAFLGLVGYCRHWIPEFSIHSKFLEKQLKKDTAEPFQLDDQQVEAFNKLKHAITTAPVLVVPDPAKPFQLYTSHSEHASIAVLTQKHAGRTRPIAFLSSKFDAIESGLPPCLKACASIHRSLTQADSFILGAPLIIYTTHAICTLLQRDRSQLVTASRFSKWEADLLRPELTFVACSAVSPAHLYMQSCENNIPPHDCVLLTHTISRPRPDLSDLPIPDPDMTLFSDGSYTTGRGGAAVVMHRPVTDDFIIIHQQPGGASAQTAELLALAAACHLATDKTVNIYTDSRYAYGVVHDFGHLWMHRGFVTSAGTPIKNHKEIEYLLKQIMKPKQVSVIKIEAHTKGVSMEVRGNAAADEAAKNAVFLVQRAGKRTADGSEFEKRTADGSEFESPKKKAKVE

SEQ ID NO: 761 - protein, 2077 aa, synthetic construct
MPAAKRVKLDGGDKKYSIGLDIGTNSVGWAVITDEYKVPSKKFKVLGNTDRHSIKKNLIGALLFDSGETAEATRLKRTARRRYTRRKNRICYLQEIFSNEMAKVDDSFFHRLEESFLVEEDKKHERHPIFGNIVDEVAYHEKYPTIYHLRKKLVDSTDKADLRLIYLALAHMIKFRGHFLIEGDLNPDNSDVDKLFIQLVQTYNQLFEENPINASGVDAKAILSARLSKSRRLENLIAQLPGEKKNGLFGNLIALSLGLTPNFKSNFDLAEDAKLQLSKDTYDDDLDNLLAQIGDQYADLFLAAKNLSDAILLSDILRVNTEITKAPLSASMIKRYDEHHQDLTLLKALVRQQLPEKYKEIFFDQSKNGYAGYIDGGASQEEFYKFIKPILEKMDGTEELLVKLNREDLLRKQRTFDNGSIPHQIHLGELHAILRRQEDFYPFLKDNREKIEKILTFRIPYYVGPLARGNSRFAWMTRKSEETITPWNFEEVVDKGASAQSFIERMTNFDKNLPNEKVLPKHSLLYEYFTVYNELTKVKYVTEGMRKPAFLSGEQKKAIVDLLFKTNRKVTVKQLKEDYFKKIECFDSVEISGVEDRFNASLGTYHDLLKIIKDKDFLDNEENEDILEDIVLTLTLFEDREMIEERLKTYAHLFDDKVMKQLKRRRYTGWGRLSRKLINGIRDKQSGKTILDFLKSDGFANRNFMQLIHDDSLTFKEDIQKAQVSGQGDSLHEHIANLAGSPAIKKGILQTVKVVDELVKVMGRHKPENIVIEMARENQTTQKGQKNSRERMKRIEEGIKELGSQILKEHPVENTQLQNEKLYLYYLQNGRDMYVDQELDINRLSDYDVDHIVPQSFLKDDSIDNKVLTRSDKARGKSDNVPSEEVVKKMKNYWRQLLNAKLITQRKFDNLTKAERGGLSELDKAGFIKRQLVETRQITKHVAQILDSRMNTKYDENDKLIREVKVITLKSKLVSDFRKDFQFYKVREINNYHHAHDAYLNAVVGTALIKKYPKLESEFVYGDYKVYDVRKMIAKSEQEIGKATAKYFFYSNIMNFFKTEITLANGEIRKRPLIETNGETGEIVWDKGRDFATVRKVLSMPQVNIVKKTEVQTGGFSKESILPKRNSDKLIARKKDWDPKKYGGFDSPTVAYSVLVVAKVEKGKSKKLKSVKELLGITIMERSSFEKNPIDFLEAKGYKEVKKDLIIKLPKYSLFELENGRKRMLASAGELQKGNELALPSKYVNFLYLASHYEKLKGSPEDNEQKQLFVEQHKHYLDEIIEQISEFSKRVILADANLDKVLSAYNKHRDKPIREQAENIIHLFTLTNLGAPAAFKYFDTTIDRKRYTSTKEVLDATLIHQSITGLYETRIDLSQLGGDGGPAPAPAPAPAPAPGGSCQTKNTLNIDEYLLQFPDQLWASLPTDIGRMLVPPITIKIKDNASLPSIRQYPLPKDKTEGLRPLISSLENQGILIKCHSPCNTPIFPIKKAGRDEYRMIHDLRAINNIVAPLTAVVASPTTVLSNLAPSLHWFTVIDLSNAFFSVPIHKDSQYLFAFTFEGHQYTWTVLPQGFIHSPTLFSQALYQSLHKIKFKISSEICIYMDDVLIASKDRDTNLKDTAVMLQHLASEGHKVSKKKLQLCQQEVVYLGQLLTPEGRKILPDRKVTVSQFQQPTTIRQIRAFLGLVGYCRHWIPEFSIHSKFLEKQLKKDTAEPFQLDDQQVEAFNKLKHAITTAPVLVVPDPAKPFQLYTSHSEHASIAVLTQKHAGRTRPIAFLSSKFDAIESGLPPCLKACASIHRSLTQADSFILGAPLIIYTTHAICTLLQRDRSQLVTASRFSKWEADLLRPELTFVACSAVSPAHLYMQSCENNIPPHDCVLLTHTISRPRPDLSDLPIPDPDMTLFSDGSYTTGRGGAAVVMHRPVTDDFIIIHQQPGGASAQTAELLALAAACHLATDKTVNIYTDSRYAYGVVHDFGHLWMHRGFVTSAGTPIKNHKEIEYLLKQIMKPKQVSVIKIEAHTKGVSMEVRGNAAADEAAKNAVFLVQRAGKRTADGSEFEKRTADGSEFESPKKKAKVE

SEQ ID NO: 762 - protein, 2079 aa, synthetic construct
MPAAKRVKLDGGDKKYSIGLDIGTNSVGWAVITDEYKVPSKKFKVLGNTDRHSIKKNLIGALLFDSGETAEATRLKRTARRRYTRRKNRICYLQEIFSNEMAKVDDSFFHRLEESFLVEEDKKHERHPIFGNIVDEVAYHEKYPTIYHLRKKLVDSTDKADLRLIYLALAHMIKFRGHFLIEGDLNPDNSDVDKLFIQLVQTYNQLFEENPINASGVDAKAILSARLSKSRRLENLIAQLPGEKKNGLFGNLIALSLGLTPNFKSNFDLAEDAKLQLSKDTYDDDLDNLLAQIGDQYADLFLAAKNLSDAILLSDILRVNTEITKAPLSASMIKRYDEHHQDLTLLKALVRQQLPEKYKEIFFDQSKNGYAGYIDGGASQEEFYKFIKPILEKMDGTEELLVKLNREDLLRKQRTFDNGSIPHQIHLGELHAILRRQEDFYPFLKDNREKIEKILTFRIPYYVGPLARGNSRFAWMTRKSEETITPWNFEEVVDKGASAQSFIERMTNFDKNLPNEKVLPKHSLLYEYFTVYNELTKVKYVTEGMRKPAFLSGEQKKAIVDLLFKTNRKVTVKQLKEDYFKKIECFDSVEISGVEDRFNASLGTYHDLLKIIKDKDFLDNEENEDILEDIVLTLTLFEDREMIEERLKTYAHLFDDKVMKQLKRRRYTGWGRLSRKLINGIRDKQSGKTILDFLKSDGFANRNFMQLIHDDSLTFKEDIQKAQVSGQGDSLHEHIANLAGSPAIKKGILQTVKVVDELVKVMGRHKPENIVIEMARENQTTQKGQKNSRERMKRIEEGIKELGSQILKEHPVENTQLQNEKLYLYYLQNGRDMYVDQELDINRLSDYDVDHIVPQSFLKDDSIDNKVLTRSDKARGKSDNVPSEEVVKKMKNYWRQLLNAKLITQRKFDNLTKAERGGLSELDKAGFIKRQLVETRQITKHVAQILDSRMNTKYDENDKLIREVKVITLKSKLVSDFRKDFQFYKVREINNYHHAHDAYLNAVVGTALIKKYPKLESEFVYGDYKVYDVRKMIAKSEQEIGKATAKYFFYSNIMNFFKTEITLANGEIRKRPLIETNGETGEIVWDKGRDFATVRKVLSMPQVNIVKKTEVQTGGFSKESILPKRNSDKLIARKKDWDPKKYGGFDSPTVAYSVLVVAKVEKGKSKKLKSVKELLGITIMERSSFEKNPIDFLEAKGYKEVKKDLIIKLPKYSLFELENGRKRMLASAGELQKGNELALPSKYVNFLYLASHYEKLKGSPEDNEQKQLFVEQHKHYLDEIIEQISEFSKRVILADANLDKVLSAYNKHRDKPIREQAENIIHLFTLTNLGAPAAFKYFDTTIDRKRYTSTKEVLDATLIHQSITGLYETRIDLSQLGGDGGGGGGSEAAAKGGGGSGGSCQTKNTLNIDEYLLQFPDQLWASLPTDIGRMLVPPITIKIKDNASLPSIRQYPLPKDKTEGLRPLISSLENQGILIKCHSPCNTPIFPIKKAGRDEYRMIHDLRAINNIVAPLTAVVASPTTVLSNLAPSLHWFTVIDLSNAFFSVPIHKDSQYLFAFTFEGHQYTWTVLPQGFIHSPTLFNQALYQSLHKIKFKISSEICIYMDDVLIASKDRDTNLKDTAVMLQHLASEGHKVSKKKLQLCQQEVVYLGQLLTPEGRKILPDRKVTVSQFQQPTTIRQIRAFLGLVGYCRHWIPEFSIHSKFLEKQLKPDTAEPFQLDDQQVEAFNKLKHAITTAPVLVVPDPAKPFQLYTSHSEHASIAVLTQKHAGRTRPIAFLSSKFDAIESGLPPCLKACASIHRSLTQADSFILGAPLIIYTTHAICTLLQRDRSQLVTASRFSKWEADLLRPELTFVACSAVSPAHLYMQSCENNIPPHDCVLLTHTISRPRPDLSDLPIPDPDMTLFSDGSYTTGRGGAAVVMHRPVTDDFIIIHQQPGGASAQTAELLALAAACHLATDKTVNIYTDSRYAYGVVHDFGHLWMHRGFVTSAGTPIKNHKEIEYLLKQIMKPKQVSVIKIEAHTKGVSMEVRGNAAADEAAKNAVFLVQRAGKRTADGSEFEKRTADGSEFESPKKKAKVE

SEQ ID NO: 763 - protein, 2110 aa, synthetic construct
MPAAKRVKLDGGDKKYSIGLDIGTNSVGWAVITDEYKVPSKKFKVLGNTDRHSIKKNLIGALLFDSGETAEATRLKRTARRRYTRRKNRICYLQEIFSNEMAKVDDSFFHRLEESFLVEEDKKHERHPIFGNIVDEVAYHEKYPTIYHLRKKLVDSTDKADLRLIYLALAHMIKFRGHFLIEGDLNPDNSDVDKLFIQLVQTYNQLFEENPINASGVDAKAILSARLSKSRRLENLIAQLPGEKKNGLFGNLIALSLGLTPNFKSNFDLAEDAKLQLSKDTYDDDLDNLLAQIGDQYADLFLAAKNLSDAILLSDILRVNTEITKAPLSASMIKRYDEHHQDLTLLKALVRQQLPEKYKEIFFDQSKNGYAGYIDGGASQEEFYKFIKPILEKMDGTEELLVKLNREDLLRKQRTFDNGSIPHQIHLGELHAILRRQEDFYPFLKDNREKIEKILTFRIPYYVGPLARGNSRFAWMTRKSEETITPWNFEEVVDKGASAQSFIERMTNFDKNLPNEKVLPKHSLLYEYFTVYNELTKVKYVTEGMRKPAFLSGEQKKAIVDLLFKTNRKVTVKQLKEDYFKKIECFDSVEISGVEDRFNASLGTYHDLLKIIKDKDFLDNEENEDILEDIVLTLTLFEDREMIEERLKTYAHLFDDKVMKQLKRRRYTGWGRLSRKLINGIRDKQSGKTILDFLKSDGFANRNFMQLIHDDSLTFKEDIQKAQVSGQGDSLHEHIANLAGSPAIKKGILQTVKVVDELVKVMGRHKPENIVIEMARENQTTQKGQKNSRERMKRIEEGIKELGSQILKEHPVENTQLQNEKLYLYYLQNGRDMYVDQELDINRLSDYDVDHIVPQSFLKDDSIDNKVLTRSDKARGKSDNVPSEEVVKKMKNYWRQLLNAKLITQRKFDNLTKAERGGLSELDKAGFIKRQLVETRQITKHVAQILDSRMNTKYDENDKLIREVKVITLKSKLVSDFRKDFQFYKVREINNYHHAHDAYLNAVVGTALIKKYPKLESEFVYGDYKVYDVRKMIAKSEQEIGKATAKYFFYSNIMNFFKTEITLANGEIRKRPLIETNGETGEIVWDKGRDFATVRKVLSMPQVNIVKKTEVQTGGFSKESILPKRNSDKLIARKKDWDPKKYGGFDSPTVAYSVLVVAKVEKGKSKKLKSVKELLGITIMERSSFEKNPIDFLEAKGYKEVKKDLIIKLPKYSLFELENGRKRMLASAGELQKGNELALPSKYVNFLYLASHYEKLKGSPEDNEQKQLFVEQHKHYLDEIIEQISEFSKRVILADANLDKVLSAYNKHRDKPIREQAENIIHLFTLTNLGAPAAFKYFDTTIDRKRYTSTKEVLDATLIHQSITGLYETRIDLSQLGGDGGAEAAAKEAAAKEAAAKEAAAKALEAEAAAKEAAAKEAAAKEAAAKAGGSCQTKNTLNIDEYLLQFPDQLWASLPTDIGRMLVPPITIKIKDNASLPSIRQYPLPKDKTEGLRPLISSLENQGILIKCHSPCNTPIFPIKKAGRDEYRMIHDLRAINNIVAPLTAVVASPTTVLSNLAPSLHWFTVIDLSNAFFSVPIHKDSQYLFAFTFEGHQYTWTVLPQGFIHSPTLFNQALYQSLHKIKFKISSEICIYMDDVLIASKDRDTNLKDTAVMLQHLASEGHKVSKKKLQLCQQEVVYLGQLLTPEGRKILPDRKVTVSQFQQPTTIRQIRAFLGLVGYCRHWIPEFSIHSKFLEKQLKPDTAEPFQLDDQQVEAFNKLKHAITTAPVLVVPDPAKPFQLYTSHSEHASIAVLTQKHAGRTRPIAFLSSKFDAIESGLPPCLKACASIHRSLTQADSFILGAPLIIYTTHAICTLLQRDRSQLVTASRFSKWEADLLRPELTFVACSAVSPAHLYMQSCENNIPPHDCVLLTHTISRPRPDLSDLPIPDPDMTLFSDGSYTTGRGGAAVVMHRPVTDDFIIIHQQPGGASAQTAELLALAAACHLATDKTVNIYTDSRYAYGVVHDFGHLWMHRGFVTSAGTPIKNHKEIEYLLKQIMKPKQVSVIKIEAHTKGVSMEVRGNAAADEAAKNAVFLVQRAGKRTADGSEFEKRTADGSEFESPKKKAKVE

SEQ ID NO: 764 - protein, 2073 aa, synthetic construct
MPAAKRVKLDGGDKKYSIGLDIGTNSVGWAVITDEYKVPSKKFKVLGNTDRHSIKKNLIGALLFDSGETAEATRLKRTARRRYTRRKNRICYLQEIFSNEMAKVDDSFFHRLEESFLVEEDKKHERHPIFGNIVDEVAYHEKYPTIYHLRKKLVDSTDKADLRLIYLALAHMIKFRGHFLIEGDLNPDNSDVDKLFIQLVQTYNQLFEENPINASGVDAKAILSARLSKSRRLENLIAQLPGEKKNGLFGNLIALSLGLTPNFKSNFDLAEDAKLQLSKDTYDDDLDNLLAQIGDQYADLFLAAKNLSDAILLSDILRVNTEITKAPLSASMIKRYDEHHQDLTLLKALVRQQLPEKYKEIFFDQSKNGYAGYIDGGASQEEFYKFIKPILEKMDGTEELLVKLNREDLLRKQRTFDNGSIPHQIHLGELHAILRRQEDFYPFLKDNREKIEKILTFRIPYYVGPLARGNSRFAWMTRKSEETITPWNFEEVVDKGASAQSFIERMTNFDKNLPNEKVLPKHSLLYEYFTVYNELTKVKYVTEGMRKPAFLSGEQKKAIVDLLFKTNRKVTVKQLKEDYFKKIECFDSVEISGVEDRFNASLGTYHDLLKIIKDKDFLDNEENEDILEDIVLTLTLFEDREMIEERLKTYAHLFDDKVMKQLKRRRYTGWGRLSRKLINGIRDKQSGKTILDFLKSDGFANRNFMQLIHDDSLTFKEDIQKAQVSGQGDSLHEHIANLAGSPAIKKGILQTVKVVDELVKVMGRHKPENIVIEMARENQTTQKGQKNSRERMKRIEEGIKELGSQILKEHPVENTQLQNEKLYLYYLQNGRDMYVDQELDINRLSDYDVDHIVPQSFLKDDSIDNKVLTRSDKARGKSDNVPSEEVVKKMKNYWRQLLNAKLITQRKFDNLTKAERGGLSELDKAGFIKRQLVETRQITKHVAQILDSRMNTKYDENDKLIREVKVITLKSKLVSDFRKDFQFYKVREINNYHHAHDAYLNAVVGTALIKKYPKLESEFVYGDYKVYDVRKMIAKSEQEIGKATAKYFFYSNIMNFFKTEITLANGEIRKRPLIETNGETGEIVWDKGRDFATVRKVLSMPQVNIVKKTEVQTGGFSKESILPKRNSDKLIARKKDWDPKKYGGFDSPTVAYSVLVVAKVEKGKSKKLKSVKELLGITIMERSSFEKNPIDFLEAKGYKEVKKDLIIKLPKYSLFELENGRKRMLASAGELQKGNELALPSKYVNFLYLASHYEKLKGSPEDNEQKQLFVEQHKHYLDEIIEQISEFSKRVILADANLDKVLSAYNKHRDKPIREQAENIIHLFTLTNLGAPAAFKYFDTTIDRKRYTSTKEVLDATLIHQSITGLYETRIDLSQLGGDGGGSSGGSGGGGGSCQTKNTLNIDEYLLQFPDQLWASLPTDIGRMLVPPITIKIKDNASLPSIRQYPLPKDKTEGLRPLISSLENQGILIKCHSPCNTPIFPIKKAGRDEYRMIHDLRAINNIVAPLTAVVASPTTVLSNLAPSLHWFTVIDLSNAFFSVPIHKDSQYLFAFTFEGHQYTWTVLPQGFIHSPTLFNQALYQSLHKIKFKISSEICIYMDDVLIASKDRDTNLKDTAVMLQHLASEGHKVSKKKLQLCQQEVVYLGQLLTPEGRKILPDRKVTVSQFQQPTTIRQIRAFLGLVGYCRHWIPEFSIHSKFLEKQLKPDTAEPFQLDDQQVEAFNKLKHAITTAPVLVVPDPAKPFQLYTSHSEHASIAVLTQKHAGRTRPIAFLSSKFDAIESGLPPCLKACASIHRSLTQADSFILGAPLIIYTTHAICTLLQRDRSQLVTASRFSKWEADLLRPELTFVACSAVSPAHLYMQSCENNIPPHDCVLLTHTISRPRPDLSDLPIPDPDMTLFSDGSYTTGRGGAAVVMHRPVTDDFIIIHQQPGGASAQTAELLALAAACHLATDKTVNIYTDSRYAYGVVHDFGHLWMHRGFVTSAGTPIKNHKEIEYLLKQIMKPKQVSVIKIEAHTKGVSMEVRGNAAADEAAKNAVFLVQRAGKRTADGSEFEKRTADGSEFESPKKKAKVE

SEQ ID NO: 765 - protein, 2087 aa, synthetic construct
MPAAKRVKLDGGDKKYSIGLDIGTNSVGWAVITDEYKVPSKKFKVLGNTDRHSIKKNLIGALLFDSGETAEATRLKRTARRRYTRRKNRICYLQEIFSNEMAKVDDSFFHRLEESFLVEEDKKHERHPIFGNIVDEVAYHEKYPTIYHLRKKLVDSTDKADLRLIYLALAHMIKFRGHFLIEGDLNPDNSDVDKLFIQLVQTYNQLFEENPINASGVDAKAILSARLSKSRRLENLIAQLPGEKKNGLFGNLIALSLGLTPNFKSNFDLAEDAKLQLSKDTYDDDLDNLLAQIGDQYADLFLAAKNLSDAILLSDILRVNTEITKAPLSASMIKRYDEHHQDLTLLKALVRQQLPEKYKEIFFDQSKNGYAGYIDGGASQEEFYKFIKPILEKMDGTEELLVKLNREDLLRKQRTFDNGSIPHQIHLGELHAILRRQEDFYPFLKDNREKIEKILTFRIPYYVGPLARGNSRFAWMTRKSEETITPWNFEEVVDKGASAQSFIERMTNFDKNLPNEKVLPKHSLLYEYFTVYNELTKVKYVTEGMRKPAFLSGEQKKAIVDLLFKTNRKVTVKQLKEDYFKKIECFDSVEISGVEDRFNASLGTYHDLLKIIKDKDFLDNEENEDILEDIVLTLTLFEDREMIEERLKTYAHLFDDKVMKQLKRRRYTGWGRLSRKLINGIRDKQSGKTILDFLKSDGFANRNFMQLIHDDSLTFKEDIQKAQVSGQGDSLHEHIANLAGSPAIKKGILQTVKVVDELVKVMGRHKPENIVIEMARENQTTQKGQKNSRERMKRIEEGIKELGSQILKEHPVENTQLQNEKLYLYYLQNGRDMYVDQELDINRLSDYDVDHIVPQSFLKDDSIDNKVLTRSDKARGKSDNVPSEEVVKKMKNYWRQLLNAKLITQRKFDNLTKAERGGLSELDKAGFIKRQLVETRQITKHVAQILDSRMNTKYDENDKLIREVKVITLKSKLVSDFRKDFQFYKVREINNYHHAHDAYLNAVVGTALIKKYPKLESEFVYGDYKVYDVRKMIAKSEQEIGKATAKYFFYSNIMNFFKTEITLANGEIRKRPLIETNGETGEIVWDKGRDFATVRKVLSMPQVNIVKKTEVQTGGFSKESILPKRNSDKLIARKKDWDPKKYGGFDSPTVAYSVLVVAKVEKGKSKKLKSVKELLGITIMERSSFEKNPIDFLEAKGYKEVKKDLIIKLPKYSLFELENGRKRMLASAGELQKGNELALPSKYVNFLYLASHYEKLKGSPEDNEQKQLFVEQHKHYLDEIIEQISEFSKRVILADANLDKVLSAYNKHRDKPIREQAENIIHLFTLTNLGAPAAFKYFDTTIDRKRYTSTKEVLDATLIHQSITGLYETRIDLSQLGGDGGEAAAKGGSPAPGGVPWILKKPLELTIKLDLEEQQGTLLNNSILSKKGKEELKQLFEKYSALWQSWENQVGHRRIRPHKIATGTVKPTPQKQYHINPKAKPDIQIVINDLLKQGVLIQKESTMNTPVYPVPKPNGRWRMVLDYRAVNKVTPLIAVQNQHSYGILGSLFKGRYKTTIDLSNGFWAHPIVPEDYWITAFTWQGKQYCWTVLPQGFLNSPGLFTGDVVDLLQGIPNVEVYVDDVYISHDSEKEHLEYLDILFNRLKEAGYIISLKKSNIANSIVDFLGFQITNEGRGLTDTFKEKLENITAPTTLKQLQSILGLLNFARNFIPDFTELIAPLYALIPKSTKNYVPWQIEHSTTLETLITKLNGAEYLQGRKGDKTLIMKVNASYTTGYIRYYNEGEKKPISYVSIVFSKTELKFTELEKLLTTVHKGLLKALDLSMGQNIHVYSPIVSMQNIQKTPQTAKKALASRWLSWLSYLEDPRIRFFYDPQMPALKDLPAVDTGKDNKKHPSNFQHIFYTDGSAITSPTKEGHLNAGMGIVYFINKDGNLQKQQEWSISLGNHTAQFAEIAAFEFALKKCLPLGGNILVVTDSNYVAKAYNEELDVWASNGFVNNRKKPLKHISKWKSVADLKRLRPDVVVTHEPGHQKLDSSPHAYGNNLADQLATQASFKVHAGKRTADGSEFEKRTADGSEFESPKKKAKVE

SEQ ID NO: 766 - protein, 2085 aa, synthetic construct
MPAAKRVKLDGGDKKYSIGLDIGTNSVGWAVITDEYKVPSKKFKVLGNTDRHSIKKNLIGALLFDSGETAEATRLKRTARRRYTRRKNRICYLQEIFSNEMAKVDDSFFHRLEESFLVEEDKKHERHPIFGNIVDEVAYHEKYPTIYHLRKKLVDSTDKADLRLIYLALAHMIKFRGHFLIEGDLNPDNSDVDKLFIQLVQTYNQLFEENPINASGVDAKAILSARLSKSRRLENLIAQLPGEKKNGLFGNLIALSLGLTPNFKSNFDLAEDAKLQLSKDTYDDDLDNLLAQIGDQYADLFLAAKNLSDAILLSDILRVNTEITKAPLSASMIKRYDEHHQDLTLLKALVRQQLPEKYKEIFFDQSKNGYAGYIDGGASQEEFYKFIKPILEKMDGTEELLVKLNREDLLRKQRTFDNGSIPHQIHLGELHAILRRQEDFYPFLKDNREKIEKILTFRIPYYVGPLARGNSRFAWMTRKSEETITPWNFEEVVDKGASAQSFIERMTNFDKNLPNEKVLPKHSLLYEYFTVYNELTKVKYVTEGMRKPAFLSGEQKKAIVDLLFKTNRKVTVKQLKEDYFKKIECFDSVEISGVEDRFNASLGTYHDLLKIIKDKDFLDNEENEDILEDIVLTLTLFEDREMIEERLKTYAHLFDDKVMKQLKRRRYTGWGRLSRKLINGIRDKQSGKTILDFLKSDGFANRNFMQLIHDDSLTFKEDIQKAQVSGQGDSLHEHIANLAGSPAIKKGILQTVKVVDELVKVMGRHKPENIVIEMARENQTTQKGQKNSRERMKRIEEGIKELGSQILKEHPVENTQLQNEKLYLYYLQNGRDMYVDQELDINRLSDYDVDHIVPQSFLKDDSIDNKVLTRSDKARGKSDNVPSEEVVKKMKNYWRQLLNAKLITQRKFDNLTKAERGGLSELDKAGFIKRQLVETRQITKHVAQILDSRMNTKYDENDKLIREVKVITLKSKLVSDFRKDFQFYKVREINNYHHAHDAYLNAVVGTALIKKYPKLESEFVYGDYKVYDVRKMIAKSEQEIGKATAKYFFYSNIMNFFKTEITLANGEIRKRPLIETNGETGEIVWDKGRDFATVRKVLSMPQVNIVKKTEVQTGGFSKESILPKRNSDKLIARKKDWDPKKYGGFDSPTVAYSVLVVAKVEKGKSKKLKSVKELLGITIMERSSFEKNPIDFLEAKGYKEVKKDLIIKLPKYSLFELENGRKRMLASAGELQKGNELALPSKYVNFLYLASHYEKLKGSPEDNEQKQLFVEQHKHYLDEIIEQISEFSKRVILADANLDKVLSAYNKHRDKPIREQAENIIHLFTLTNLGAPAAFKYFDTTIDRKRYTSTKEVLDATLIHQSITGLYETRIDLSQLGGDGGGSSGGGGGSGGVPWILKKPLELTIKLDLEEQQGTLLNNSILSKKGKEELKQLFEKYSALWQSWENQVGHRRIRPHKIATGTVKPTPQKQYHINPKAKPDIQIVINDLLKQGVLIQKESTMNTPVYPVPKPNGRWRMVLDYRAVNKVTPLIAVQNQHSYGILGSLFKGRYKTTIDLSNGFWAHPIVPEDYWITAFTWQGKQYCWTVLPQGFLNSPGLFTGDVVDLLQGIPNVEVYVDDVYISHDSEKEHLEYLDILFNRLKEAGYIISLKKSNIANSIVDFLGFQITNEGRGLTDTFKEKLENITAPTTLKQLQSILGLLNFARNFIPDFTELIAPLYALIPKSTKNYVPWQIEHSTTLETLITKLNGAEYLQGRKGDKTLIMKVNASYTTGYIRYYNEGEKKPISYVSIVFSKTELKFTELEKLLTTVHKGLLKALDLSMGQNIHVYSPIVSMQNIQKTPQTAKKALASRWLSWLSYLEDPRIRFFYDPQMPALKDLPAVDTGKDNKKHPSNFQHIFYTDGSAITSPTKEGHLNAGMGIVYFINKDGNLQKQQEWSISLGNHTAQFAEIAAFEFALKKCLPLGGNILVVTDSNYVAKAYNEELDVWASNGFVNNRKKPLKHISKWKSVADLKRLRPDVVVTHEPGHQKLDSSPHAYGNNLADQLATQASFKVHAGKRTADGSEFEKRTADGSEFESPKKKAKVE

SEQ ID NO: 767 - protein, 2087 aa, synthetic construct
MPAAKRVKLDGGDKKYSIGLDIGTNSVGWAVITDEYKVPSKKFKVLGNTDRHSIKKNLIGALLFDSGETAEATRLKRTARRRYTRRKNRICYLQEIFSNEMAKVDDSFFHRLEESFLVEEDKKHERHPIFGNIVDEVAYHEKYPTIYHLRKKLVDSTDKADLRLIYLALAHMIKFRGHFLIEGDLNPDNSDVDKLFIQLVQTYNQLFEENPINASGVDAKAILSARLSKSRRLENLIAQLPGEKKNGLFGNLIALSLGLTPNFKSNFDLAEDAKLQLSKDTYDDDLDNLLAQIGDQYADLFLAAKNLSDAILLSDILRVNTEITKAPLSASMIKRYDEHHQDLTLLKALVRQQLPEKYKEIFFDQSKNGYAGYIDGGASQEEFYKFIKPILEKMDGTEELLVKLNREDLLRKQRTFDNGSIPHQIHLGELHAILRRQEDFYPFLKDNREKIEKILTFRIPYYVGPLARGNSRFAWMTRKSEETITPWNFEEVVDKGASAQSFIERMTNFDKNLPNEKVLPKHSLLYEYFTVYNELTKVKYVTEGMRKPAFLSGEQKKAIVDLLFKTNRKVTVKQLKEDYFKKIECFDSVEISGVEDRFNASLGTYHDLLKIIKDKDFLDNEENEDILEDIVLTLTLFEDREMIEERLKTYAHLFDDKVMKQLKRRRYTGWGRLSRKLINGIRDKQSGKTILDFLKSDGFANRNFMQLIHDDSLTFKEDIQKAQVSGQGDSLHEHIANLAGSPAIKKGILQTVKVVDELVKVMGRHKPENIVIEMARENQTTQKGQKNSRERMKRIEEGIKELGSQILKEHPVENTQLQNEKLYLYYLQNGRDMYVDQELDINRLSDYDVDHIVPQSFLKDDSIDNKVLTRSDKARGKSDNVPSEEVVKKMKNYWRQLLNAKLITQRKFDNLTKAERGGLSELDKAGFIKRQLVETRQITKHVAQILDSRMNTKYDENDKLIREVKVITLKSKLVSDFRKDFQFYKVREINNYHHAHDAYLNAVVGTALIKKYPKLESEFVYGDYKVYDVRKMIAKSEQEIGKATAKYFFYSNIMNFFKTEITLANGEIRKRPLIETNGETGEIVWDKGRDFATVRKVLSMPQVNIVKKTEVQTGGFSKESILPKRNSDKLIARKKDWDPKKYGGFDSPTVAYSVLVVAKVEKGKSKKLKSVKELLGITIMERSSFEKNPIDFLEAKGYKEVKKDLIIKLPKYSLFELENGRKRMLASAGELQKGNELALPSKYVNFLYLASHYEKLKGSPEDNEQKQLFVEQHKHYLDEIIEQISEFSKRVILADANLDKVLSAYNKHRDKPIREQAENIIHLFTLTNLGAPAAFKYFDTTIDRKRYTSTKEVLDATLIHQSITGLYETRIDLSQLGGDGGPAPEAAAKGSSGGVPWILKKPLELTIKLDLEEQQGTLLNNSILSKKGKEELKQLFEKYSALWQSWENQVGHRRIRPHKIATGTVKPTPQKQYHINPKAKPDIQIVINDLLKQGVLIQKESTMNTPVYPVPKPNGRWRMVLDYRAVNKVTPLIAVQNQHSYGILGSLFKGRYKTTIDLSNGFWAHPIVPEDYWITAFTWQGKQYCWTVLPQGFLNSPGLFTGDVVDLLQGIPNVEVYVDDVYISHDSEKEHLEYLDILFNRLKEAGYIISLKKSNIANSIVDFLGFQITNEGRGLTDTFKEKLENITAPTTLKQLQSILGLLNFARNFIPDFTELIAPLYALIPKSTKNYVPWQIEHSTTLETLITKLNGAEYLQGRKGDKTLIMKVNASYTTGYIRYYNEGEKKPISYVSIVFSKTELKFTELEKLLTTVHKGLLKALDLSMGQNIHVYSPIVSMQNIQKTPQTAKKALASRWLSWLSYLEDPRIRFFYDPQMPALKDLPAVDTGKDNKKHPSNFQHIFYTDGSAITSPTKEGHLNAGMGIVYFINKDGNLQKQQEWSISLGNHTAQFAEIAAFEFALKKCLPLGGNILVVTDSNYVAKAYNEELDVWASNGFVNNRKKPLKHISKWKSVADLKRLRPDVVVTHEPGHQKLDSSPHAYGNNLADQLATQASFKVHAGKRTADGSEFEKRTADGSEFESPKKKAKVE

SEQ ID NO: 768 - protein, 2091 aa, synthetic construct
MPAAKRVKLDGGDKKYSIGLDIGTNSVGWAVITDEYKVPSKKFKVLGNTDRHSIKKNLIGALLFDSGETAEATRLKRTARRRYTRRKNRICYLQEIFSNEMAKVDDSFFHRLEESFLVEEDKKHERHPIFGNIVDEVAYHEKYPTIYHLRKKLVDSTDKADLRLIYLALAHMIKFRGHFLIEGDLNPDNSDVDKLFIQLVQTYNQLFEENPINASGVDAKAILSARLSKSRRLENLIAQLPGEKKNGLFGNLIALSLGLTPNFKSNFDLAEDAKLQLSKDTYDDDLDNLLAQIGDQYADLFLAAKNLSDAILLSDILRVNTEITKAPLSASMIKRYDEHHQDLTLLKALVRQQLPEKYKEIFFDQSKNGYAGYIDGGASQEEFYKFIKPILEKMDGTEELLVKLNREDLLRKQRTFDNGSIPHQIHLGELHAILRRQEDFYPFLKDNREKIEKILTFRIPYYVGPLARGNSRFAWMTRKSEETITPWNFEEVVDKGASAQSFIERMTNFDKNLPNEKVLPKHSLLYEYFTVYNELTKVKYVTEGMRKPAFLSGEQKKAIVDLLFKTNRKVTVKQLKEDYFKKIECFDSVEISGVEDRFNASLGTYHDLLKIIKDKDFLDNEENEDILEDIVLTLTLFEDREMIEERLKTYAHLFDDKVMKQLKRRRYTGWGRLSRKLINGIRDKQSGKTILDFLKSDGFANRNFMQLIHDDSLTFKEDIQKAQVSGQGDSLHEHIANLAGSPAIKKGILQTVKVVDELVKVMGRHKPENIVIEMARENQTTQKGQKNSRERMKRIEEGIKELGSQILKEHPVENTQLQNEKLYLYYLQNGRDMYVDQELDINRLSDYDVDHIVPQSFLKDDSIDNKVLTRSDKARGKSDNVPSEEVVKKMKNYWRQLLNAKLITQRKFDNLTKAERGGLSELDKAGFIKRQLVETRQITKHVAQILDSRMNTKYDENDKLIREVKVITLKSKLVSDFRKDFQFYKVREINNYHHAHDAYLNAVVGTALIKKYPKLESEFVYGDYKVYDVRKMIAKSEQEIGKATAKYFFYSNIMNFFKTEITLANGEIRKRPLIETNGETGEIVWDKGRDFATVRKVLSMPQVNIVKKTEVQTGGFSKESILPKRNSDKLIARKKDWDPKKYGGFDSPTVAYSVLVVAKVEKGKSKKLKSVKELLGITIMERSSFEKNPIDFLEAKGYKEVKKDLIIKLPKYSLFELENGRKRMLASAGELQKGNELALPSKYVNFLYLASHYEKLKGSPEDNEQKQLFVEQHKHYLDEIIEQISEFSKRVILADANLDKVLSAYNKHRDKPIREQAENIIHLFTLTNLGAPAAFKYFDTTIDRKRYTSTKEVLDATLIHQSITGLYETRIDLSQLGGDGGGGGGSEAAAKGGGGSGGVPWILKKPLELTIKLDLEEQQGTLLNNSILSKKGKEELKQLFEKYSALWQSWENQVGHRRIRPHKIATGTVKPTPQKQYHINPKAKPDIQIVINDLLKQGVLIQKESTMNTPVYPVPKPNGRWRMVLDYRAVNKVTPLIAVQNQHSYGILGSLFKGRYKTTIDLSNGFWAHPIVPEDYWITAFTWQGKQYCWTVLPQGFLNSPGLFTGDVVDLLQGIPNVEVYVDDVYISHDSEKEHLEYLDILFNRLKEAGYIISLKKSNIANSIVDFLGFQITNEGRGLTDTFKEKLENITAPTTLKQLQSILGLLNFARNFIPDFTELIAPLYALIPKSTKNYVPWQIEHSTTLETLITKLNGAEYLQGRKGDKTLIMKVNASYTTGYIRYYNEGEKKPISYVSIVFSKTELKFTELEKLLTTVHKGLLKALDLSMGQNIHVYSPIVSMQNIQKTPQTAKKALASRWLSWLSYLEDPRIRFFYDPQMPALKDLPAVDTGKDNKKHPSNFQHIFYTDGSAITSPTKEGHLNAGMGIVYFINKDGNLQKQQEWSISLGNHTAQFAEIAAFEFALKKCLPLGGNILVVTDSNYVAKAYNEELDVWASNGFVNNRKKPLKHISKWKSVADLKRLRPDVVVTHEPGHQKLDSSPHAYGNNLADQLATQASFKVHAGKRTADGSEFEKRTADGSEFESPKKKAKVE

SEQ ID NO: 769 - protein, 2087 aa, synthetic construct
MPAAKRVKLDGGDKKYSIGLDIGTNSVGWAVITDEYKVPSKKFKVLGNTDRHSIKKNLIGALLFDSGETAEATRLKRTARRRYTRRKNRICYLQEIFSNEMAKVDDSFFHRLEESFLVEEDKKHERHPIFGNIVDEVAYHEKYPTIYHLRKKLVDSTDKADLRLIYLALAHMIKFRGHFLIEGDLNPDNSDVDKLFIQLVQTYNQLFEENPINASGVDAKAILSARLSKSRRLENLIAQLPGEKKNGLFGNLIALSLGLTPNFKSNFDLAEDAKLQLSKDTYDDDLDNLLAQIGDQYADLFLAAKNLSDAILLSDILRVNTEITKAPLSASMIKRYDEHHQDLTLLKALVRQQLPEKYKEIFFDQSKNGYAGYIDGGASQEEFYKFIKPILEKMDGTEELLVKLNREDLLRKQRTFDNGSIPHQIHLGELHAILRRQEDFYPFLKDNREKIEKILTFRIPYYVGPLARGNSRFAWMTRKSEETITPWNFEEVVDKGASAQSFIERMTNFDKNLPNEKVLPKHSLLYEYFTVYNELTKVKYVTEGMRKPAFLSGEQKKAIVDLLFKTNRKVTVKQLKEDYFKKIECFDSVEISGVEDRFNASLGTYHDLLKIIKDKDFLDNEENEDILEDIVLTLTLFEDREMIEERLKTYAHLFDDKVMKQLKRRRYTGWGRLSRKLINGIRDKQSGKTILDFLKSDGFANRNFMQLIHDDSLTFKEDIQKAQVSGQGDSLHEHIANLAGSPAIKKGILQTVKVVDELVKVMGRHKPENIVIEMARENQTTQKGQKNSRERMKRIEEGIKELGSQILKEHPVENTQLQNEKLYLYYLQNGRDMYVDQELDINRLSDYDVDHIVPQSFLKDDSIDNKVLTRSDKARGKSDNVPSEEVVKKMKNYWRQLLNAKLITQRKFDNLTKAERGGLSELDKAGFIKRQLVETRQITKHVAQILDSRMNTKYDENDKLIREVKVITLKSKLVSDFRKDFQFYKVREINNYHHAHDAYLNAVVGTALIKKYPKLESEFVYGDYKVYDVRKMIAKSEQEIGKATAKYFFYSNIMNFFKTEITLANGEIRKRPLIETNGETGEIVWDKGRDFATVRKVLSMPQVNIVKKTEVQTGGFSKESILPKRNSDKLIARKKDWDPKKYGGFDSPTVAYSVLVVAKVEKGKSKKLKSVKELLGITIMERSSFEKNPIDFLEAKGYKEVKKDLIIKLPKYSLFELENGRKRMLASAGELQKGNELALPSKYVNFLYLASHYEKLKGSPEDNEQKQLFVEQHKHYLDEIIEQISEFSKRVILADANLDKVLSAYNKHRDKPIREQAENIIHLFTLTNLGAPAAFKYFDTTIDRKRYTSTKEVLDATLIHQSITGLYETRIDLSQLGGDGGGGGGSSEAAAKGGVPWILKKPLELTIKLDLEEQQGTLLNNSILSKKGKEELKQLFEKYSALWQSWENQVGHRRIRPHKIATGTVKPTPQKQYHINPKAKPDIQIVINDLLKQGVLIQKESTMNTPVYPVPKPNGRWRMVLDYRAVNKVTPLIAVQNQHSYGILGSLFKGRYKTTIDLSNGFWAHPIVPEDYWITAFTWQGKQYCWTVLPQGFLNSPGLFTGDVVDLLQGIPNVEVYVDDVYISHDSEKEHLEYLDILFNRLKEAGYIISLKKSNIANSIVDFLGFQITNEGRGLTDTFKEKLENITAPTTLKQLQSILGLLNFARNFIPDFTELIAPLYALIPKSTKNYVPWQIEHSTTLETLITKLNGAEYLQGRKGDKTLIMKVNASYTTGYIRYYNEGEKKPISYVSIVFSKTELKFTELEKLLTTVHKGLLKALDLSMGQNIHVYSPIVSMQNIQKTPQTAKKALASRWLSWLSYLEDPRIRFFYDPQMPALKDLPAVDTGKDNKKHPSNFQHIFYTDGSAITSPTKEGHLNAGMGIVYFINKDGNLQKQQEWSISLGNHTAQFAEIAAFEFALKKCLPLGGNILVVTDSNYVAKAYNEELDVWASNGFVNNRKKPLKHISKWKSVADLKRLRPDVVVTHEPGHQKLDSSPHAYGNNLADQLATQASFKVHAGKRTADGSEFEKRTADGSEFESPKKKAKVE

SEQ ID NO: 770 - protein, 2087 aa, synthetic construct
MPAAKRVKLDGGDKKYSIGLDIGTNSVGWAVITDEYKVPSKKFKVLGNTDRHSIKKNLIGALLFDSGETAEATRLKRTARRRYTRRKNRICYLQEIFSNEMAKVDDSFFHRLEESFLVEEDKKHERHPIFGNIVDEVAYHEKYPTIYHLRKKLVDSTDKADLRLIYLALAHMIKFRGHFLIEGDLNPDNSDVDKLFIQLVQTYNQLFEENPINASGVDAKAILSARLSKSRRLENLIAQLPGEKKNGLFGNLIALSLGLTPNFKSNFDLAEDAKLQLSKDTYDDDLDNLLAQIGDQYADLFLAAKNLSDAILLSDILRVNTEITKAPLSASMIKRYDEHHQDLTLLKALVRQQLPEKYKEIFFDQSKNGYAGYIDGGASQEEFYKFIKPILEKMDGTEELLVKLNREDLLRKQRTFDNGSIPHQIHLGELHAILRRQEDFYPFLKDNREKIEKILTFRIPYYVGPLARGNSRFAWMTRKSEETITPWNFEEVVDKGASAQSFIERMTNFDKNLPNEKVLPKHSLLYEYFTVYNELTKVKYVTEGMRKPAFLSGEQKKAIVDLLFKTNRKVTVKQLKEDYFKKIECFDSVEISGVEDRFNASLGTYHDLLKIIKDKDFLDNEENEDILEDIVLTLTLFEDREMIEERLKTYAHLFDDKVMKQLKRRRYTGWGRLSRKLINGIRDKQSGKTILDFLKSDGFANRNFMQLIHDDSLTFKEDIQKAQVSGQGDSLHEHIANLAGSPAIKKGILQTVKVVDELVKVMGRHKPENIVIEMARENQTTQKGQKNSRERMKRIEEGIKELGSQILKEHPVENTQLQNEKLYLYYLQNGRDMYVDQELDINRLSDYDVDHIVPQSFLKDDSIDNKVLTRSDKARGKSDNVPSEEVVKKMKNYWRQLLNAKLITQRKFDNLTKAERGGLSELDKAGFIKRQLVETRQITKHVAQILDSRMNTKYDENDKLIREVKVITLKSKLVSDFRKDFQFYKVREINNYHHAHDAYLNAVVGTALIKKYPKLESEFVYGDYKVYDVRKMIAKSEQEIGKATAKYFFYSNIMNFFKTEITLANGEIRKRPLIETNGETGEIVWDKGRDFATVRKVLSMPQVNIVKKTEVQTGGFSKESILPKRNSDKLIARKKDWDPKKYGGFDSPTVAYSVLVVAKVEKGKSKKLKSVKELLGITIMERSSFEKNPIDFLEAKGYKEVKKDLIIKLPKYSLFELENGRKRMLASAGELQKGNELALPSKYVNFLYLASHYEKLKGSPEDNEQKQLFVEQHKHYLDEIIEQISEFSKRVILADANLDKVLSAYNKHRDKPIREQAENIIHLFTLTNLGAPAAFKYFDTTIDRKRYTSTKEVLDATLIHQSITGLYETRIDLSQLGGDGGGGGEAAAKGSSGGVPWILKKPLELTIKLDLEEQQGTLLNNSILSKKGKEELKQLFEKYSALWQSWENQVGHRRIRPHKIATGTVKPTPQKQYHINPKAKPDIQIVINDLLKQGVLIQKESTMNTPVYPVPKPNGRWRMVLDYRAVNKVTPLIAVQNQHSYGILGSLFKGRYKTTIDLSNGFWAHPIVPEDYWITAFTWQGKQYCWTVLPQGFLNSPGLFTGDVVDLLQGIPNVEVYVDDVYISHDSEKEHLEYLDILFNRLKEAGYIISLKKSNIANSIVDFLGFQITNEGRGLTDTFKEKLENITAPTTLKQLQSILGLLNFARNFIPDFTELIAPLYALIPKSTKNYVPWQIEHSTTLETLITKLNGAEYLQGRKGDKTLIMKVNASYTTGYIRYYNEGEKKPISYVSIVFSKTELKFTELEKLLTTVHKGLLKALDLSMGQNIHVYSPIVSMQNIQKTPQTAKKALASRWLSWLSYLEDPRIRFFYDPQMPALKDLPAVDTGKDNKKHPSNFQHIFYTDGSAITSPTKEGHLNAGMGIVYFINKDGNLQKQQEWSISLGNHTAQFAEIAAFEFALKKCLPLGGNILVVTDSNYVAKAYNEELDVWASNGFVNNRKKPLKHISKWKSVADLKRLRPDVVVTHEPGHQKLDSSPHAYGNNLADQLATQASFKVHAGKRTADGSEFEKRTADGSEFESPKKKAKVE

SEQ ID NO: 771 - protein, 2082 aa, synthetic construct
MPAAKRVKLDGGDKKYSIGLDIGTNSVGWAVITDEYKVPSKKFKVLGNTDRHSIKKNLIGALLFDSGETAEATRLKRTARRRYTRRKNRICYLQEIFSNEMAKVDDSFFHRLEESFLVEEDKKHERHPIFGNIVDEVAYHEKYPTIYHLRKKLVDSTDKADLRLIYLALAHMIKFRGHFLIEGDLNPDNSDVDKLFIQLVQTYNQLFEENPINASGVDAKAILSARLSKSRRLENLIAQLPGEKKNGLFGNLIALSLGLTPNFKSNFDLAEDAKLQLSKDTYDDDLDNLLAQIGDQYADLFLAAKNLSDAILLSDILRVNTEITKAPLSASMIKRYDEHHQDLTLLKALVRQQLPEKYKEIFFDQSKNGYAGYIDGGASQEEFYKFIKPILEKMDGTEELLVKLNREDLLRKQRTFDNGSIPHQIHLGELHAILRRQEDFYPFLKDNREKIEKILTFRIPYYVGPLARGNSRFAWMTRKSEETITPWNFEEVVDKGASAQSFIERMTNFDKNLPNEKVLPKHSLLYEYFTVYNELTKVKYVTEGMRKPAFLSGEQKKAIVDLLFKTNRKVTVKQLKEDYFKKIECFDSVEISGVEDRFNASLGTYHDLLKIIKDKDFLDNEENEDILEDIVLTLTLFEDREMIEERLKTYAHLFDDKVMKQLKRRRYTGWGRLSRKLINGIRDKQSGKTILDFLKSDGFANRNFMQLIHDDSLTFKEDIQKAQVSGQGDSLHEHIANLAGSPAIKKGILQTVKVVDELVKVMGRHKPENIVIEMARENQTTQKGQKNSRERMKRIEEGIKELGSQILKEHPVENTQLQNEKLYLYYLQNGRDMYVDQELDINRLSDYDVDHIVPQSFLKDDSIDNKVLTRSDKARGKSDNVPSEEVVKKMKNYWRQLLNAKLITQRKFDNLTKAERGGLSELDKAGFIKRQLVETRQITKHVAQILDSRMNTKYDENDKLIREVKVITLKSKLVSDFRKDFQFYKVREINNYHHAHDAYLNAVVGTALIKKYPKLESEFVYGDYKVYDVRKMIAKSEQEIGKATAKYFFYSNIMNFFKTEITLANGEIRKRPLIETNGETGEIVWDKGRDFATVRKVLSMPQVNIVKKTEVQTGGFSKESILPKRNSDKLIARKKDWDPKKYGGFDSPTVAYSVLVVAKVEKGKSKKLKSVKELLGITIMERSSFEKNPIDFLEAKGYKEVKKDLIIKLPKYSLFELENGRKRMLASAGELQKGNELALPSKYVNFLYLASHYEKLKGSPEDNEQKQLFVEQHKHYLDEIIEQISEFSKRVILADANLDKVLSAYNKHRDKPIREQAENIIHLFTLTNLGAPAAFKYFDTTIDRKRYTSTKEVLDATLIHQSITGLYETRIDLSQLGGDGGGSSGGGGGVPWILKKPLELTIKLDLEEQQGTLLNNSILSKKGKEELKQLFEKYSALWQSWENQVGHRRIRPHKIATGTVKPTPQKQYHINPKAKPDIQIVINDLLKQGVLIQKESTMNTPVYPVPKPNGRWRMVLDYRAVNKVTPLIAVQNQHSYGILGSLFKGRYKTTIDLSNGFWAHPIVPEDYWITAFTWQGKQYCWTVLPQGFLNSPGLFTGDVVDLLQGIPNVEVYVDDVYISHDSEKEHLEYLDILFNRLKEAGYIISLKKSNIANSIVDFLGFQITNEGRGLTDTFKEKLENITAPTTLKQLQSILGLLNFARNFIPDFTELIAPLYALIPKSTKNYVPWQIEHSTTLETLITKLNGAEYLQGRKGDKTLIMKVNASYTTGYIRYYNEGEKKPISYVSIVFSKTELKFTELEKLLTTVHKGLLKALDLSMGQNIHVYSPIVSMQNIQKTPQTAKKALASRWLSWLSYLEDPRIRFFYDPQMPALKDLPAVDTGKDNKKHPSNFQHIFYTDGSAITSPTKEGHLNAGMGIVYFINKDGNLQKQQEWSISLGNHTAQFAEIAAFEFALKKCLPLGGNILVVTDSNYVAKAYNEELDVWASNGFVNNRKKPLKHISKWKSVADLKRLRPDVVVTHEPGHQKLDSSPHAYGNNLADQLATQASFKVHAGKRTADGSEFEKRTADGSEFESPKKKAKVE

SEQ ID NO: 772 - protein, 2087 aa, synthetic construct
MPAAKRVKLDGGDKKYSIGLDIGTNSVGWAVITDEYKVPSKKFKVLGNTDRHSIKKNLIGALLFDSGETAEATRLKRTARRRYTRRKNRICYLQEIFSNEMAKVDDSFFHRLEESFLVEEDKKHERHPIFGNIVDEVAYHEKYPTIYHLRKKLVDSTDKADLRLIYLALAHMIKFRGHFLIEGDLNPDNSDVDKLFIQLVQTYNQLFEENPINASGVDAKAILSARLSKSRRLENLIAQLPGEKKNGLFGNLIALSLGLTPNFKSNFDLAEDAKLQLSKDTYDDDLDNLLAQIGDQYADLFLAAKNLSDAILLSDILRVNTEITKAPLSASMIKRYDEHHQDLTLLKALVRQQLPEKYKEIFFDQSKNGYAGYIDGGASQEEFYKFIKPILEKMDGTEELLVKLNREDLLRKQRTFDNGSIPHQIHLGELHAILRRQEDFYPFLKDNREKIEKILTFRIPYYVGPLARGNSRFAWMTRKSEETITPWNFEEVVDKGASAQSFIERMTNFDKNLPNEKVLPKHSLLYEYFTVYNELTKVKYVTEGMRKPAFLSGEQKKAIVDLLFKTNRKVTVKQLKEDYFKKIECFDSVEISGVEDRFNASLGTYHDLLKIIKDKDFLDNEENEDILEDIVLTLTLFEDREMIEERLKTYAHLFDDKVMKQLKRRRYTGWGRLSRKLINGIRDKQSGKTILDFLKSDGFANRNFMQLIHDDSLTFKEDIQKAQVSGQGDSLHEHIANLAGSPAIKKGILQTVKVVDELVKVMGRHKPENIVIEMARENQTTQKGQKNSRERMKRIEEGIKELGSQILKEHPVENTQLQNEKLYLYYLQNGRDMYVDQELDINRLSDYDVDHIVPQSFLKDDSIDNKVLTRSDKARGKSDNVPSEEVVKKMKNYWRQLLNAKLITQRKFDNLTKAERGGLSELDKAGFIKRQLVETRQITKHVAQILDSRMNTKYDENDKLIREVKVITLKSKLVSDFRKDFQFYKVREINNYHHAHDAYLNAVVGTALIKKYPKLESEFVYGDYKVYDVRKMIAKSEQEIGKATAKYFFYSNIMNFFKTEITLANGEIRKRPLIETNGETGEIVWDKGRDFATVRKVLSMPQVNIVKKTEVQTGGFSKESILPKRNSDKLIARKKDWDPKKYGGFDSPTVAYSVLVVAKVEKGKSKKLKSVKELLGITIMERSSFEKNPIDFLEAKGYKEVKKDLIIKLPKYSLFELENGRKRMLASAGELQKGNELALPSKYVNFLYLASHYEKLKGSPEDNEQKQLFVEQHKHYLDEIIEQISEFSKRVILADANLDKVLSAYNKHRDKPIREQAENIIHLFTLTNLGAPAAFKYFDTTIDRKRYTSTKEVLDATLIHQSITGLYETRIDLSQLGGDGGEAAAKPAPGGSGGVPWILKKPLELTIKLDLEEQQGTLLNNSILSKKGKEELKQLFEKYSALWQSWENQVGHRRIRPHKIATGTVKPTPQKQYHINPKAKPDIQIVINDLLKQGVLIQKESTMNTPVYPVPKPNGRWRMVLDYRAVNKVTPLIAVQNQHSYGILGSLFKGRYKTTIDLSNGFWAHPIVPEDYWITAFTWQGKQYCWTVLPQGFLNSPGLFTGDVVDLLQGIPNVEVYVDDVYISHDSEKEHLEYLDILFNRLKEAGYIISLKKSNIANSIVDFLGFQITNEGRGLTDTFKEKLENITAPTTLKQLQSILGLLNFARNFIPDFTELIAPLYALIPKSTKNYVPWQIEHSTTLETLITKLNGAEYLQGRKGDKTLIMKVNASYTTGYIRYYNEGEKKPISYVSIVFSKTELKFTELEKLLTTVHKGLLKALDLSMGQNIHVYSPIVSMQNIQKTPQTAKKALASRWLSWLSYLEDPRIRFFYDPQMPALKDLPAVDTGKDNKKHPSNFQHIFYTDGSAITSPTKEGHLNAGMGIVYFINKDGNLQKQQEWSISLGNHTAQFAEIAAFEFALKKCLPLGGNILVVTDSNYVAKAYNEELDVWASNGFVNNRKKPLKHISKWKSVADLKRLRPDVVVTHEPGHQKLDSSPHAYGNNLADQLATQASFKVHAGKRTADGSEFEKRTADGSEFESPKKKAKVE

SEQ ID NO: 773 - protein, 2088 aa, synthetic construct
MPAAKRVKLDGGDKKYSIGLDIGTNSVGWAVITDEYKVPSKKFKVLGNTDRHSIKKNLIGALLFDSGETAEATRLKRTARRRYTRRKNRICYLQEIFSNEMAKVDDSFFHRLEESFLVEEDKKHERHPIFGNIVDEVAYHEKYPTIYHLRKKLVDSTDKADLRLIYLALAHMIKFRGHFLIEGDLNPDNSDVDKLFIQLVQTYNQLFEENPINASGVDAKAILSARLSKSRRLENLIAQLPGEKKNGLFGNLIALSLGLTPNFKSNFDLAEDAKLQLSKDTYDDDLDNLLAQIGDQYADLFLAAKNLSDAILLSDILRVNTEITKAPLSASMIKRYDEHHQDLTLLKALVRQQLPEKYKEIFFDQSKNGYAGYIDGGASQEEFYKFIKPILEKMDGTEELLVKLNREDLLRKQRTFDNGSIPHQIHLGELHAILRRQEDFYPFLKDNREKIEKILTFRIPYYVGPLARGNSRFAWMTRKSEETITPWNFEEVVDKGASAQSFIERMTNFDKNLPNEKVLPKHSLLYEYFTVYNELTKVKYVTEGMRKPAFLSGEQKKAIVDLLFKTNRKVTVKQLKEDYFKKIECFDSVEISGVEDRFNASLGTYHDLLKIIKDKDFLDNEENEDILEDIVLTLTLFEDREMIEERLKTYAHLFDDKVMKQLKRRRYTGWGRLSRKLINGIRDKQSGKTILDFLKSDGFANRNFMQLIHDDSLTFKEDIQKAQVSGQGDSLHEHIANLAGSPAIKKGILQTVKVVDELVKVMGRHKPENIVIEMARENQTTQKGQKNSRERMKRIEEGIKELGSQILKEHPVENTQLQNEKLYLYYLQNGRDMYVDQELDINRLSDYDVDHIVPQSFLKDDSIDNKVLTRSDKARGKSDNVPSEEVVKKMKNYWRQLLNAKLITQRKFDNLTKAERGGLSELDKAGFIKRQLVETRQITKHVAQILDSRMNTKYDENDKLIREVKVITLKSKLVSDFRKDFQFYKVREINNYHHAHDAYLNAVVGTALIKKYPKLESEFVYGDYKVYDVRKMIAKSEQEIGKATAKYFFYSNIMNFFKTEITLANGEIRKRPLIETNGETGEIVWDKGRDFATVRKVLSMPQVNIVKKTEVQTGGFSKESILPKRNSDKLIARKKDWDPKKYGGFDSPTVAYSVLVVAKVEKGKSKKLKSVKELLGITIMERSSFEKNPIDFLEAKGYKEVKKDLIIKLPKYSLFELENGRKRMLASAGELQKGNELALPSKYVNFLYLASHYEKLKGSPEDNEQKQLFVEQHKHYLDEIIEQISEFSKRVILADANLDKVLSAYNKHRDKPIREQAENIIHLFTLTNLGAPAAFKYFDTTIDRKRYTSTKEVLDATLIHQSITGLYETRIDLSQLGGDGGGSSGSSGSSGSSGGVPWILKKPLELTIKLDLEEQQGTLLNNSILSKKGKEELKQLFEKYSALWQSWENQVGHRRIRPHKIATGTVKPTPQKQYHINPKAKPDIQIVINDLLKQGVLIQKESTMNTPVYPVPKPNGRWRMVLDYRAVNKVTPLIAVQNQHSYGILGSLFKGRYKTTIDLSNGFWAHPIVPEDYWITAFTWQGKQYCWTVLPQGFLNSPGLFTGDVVDLLQGIPNVEVYVDDVYISHDSEKEHLEYLDILFNRLKEAGYIISLKKSNIANSIVDFLGFQITNEGRGLTDTFKEKLENITAPTTLKQLQSILGLLNFARNFIPDFTELIAPLYALIPKSTKNYVPWQIEHSTTLETLITKLNGAEYLQGRKGDKTLIMKVNASYTTGYIRYYNEGEKKPISYVSIVFSKTELKFTELEKLLTTVHKGLLKALDLSMGQNIHVYSPIVSMQNIQKTPQTAKKALASRWLSWLSYLEDPRIRFFYDPQMPALKDLPAVDTGKDNKKHPSNFQHIFYTDGSAITSPTKEGHLNAGMGIVYFINKDGNLQKQQEWSISLGNHTAQFAEIAAFEFALKKCLPLGGNILVVTDSNYVAKAYNEELDVWASNGFVNNRKKPLKHISKWKSVADLKRLRPDVVVTHEPGHQKLDSSPHAYGNNLADQLATQASFKVHAGKRTADGSEFEKRTADGSEFESPKKKAKVE

SEQ ID NO: 774 - protein, 2085 aa, synthetic construct
MPAAKRVKLDGGDKKYSIGLDIGTNSVGWAVITDEYKVPSKKFKVLGNTDRHSIKKNLIGALLFDSGETAEATRLKRTARRRYTRRKNRICYLQEIFSNEMAKVDDSFFHRLEESFLVEEDKKHERHPIFGNIVDEVAYHEKYPTIYHLRKKLVDSTDKADLRLIYLALAHMIKFRGHFLIEGDLNPDNSDVDKLFIQLVQTYNQLFEENPINASGVDAKAILSARLSKSRRLENLIAQLPGEKKNGLFGNLIALSLGLTPNFKSNFDLAEDAKLQLSKDTYDDDLDNLLAQIGDQYADLFLAAKNLSDAILLSDILRVNTEITKAPLSASMIKRYDEHHQDLTLLKALVRQQLPEKYKEIFFDQSKNGYAGYIDGGASQEEFYKFIKPILEKMDGTEELLVKLNREDLLRKQRTFDNGSIPHQIHLGELHAILRRQEDFYPFLKDNREKIEKILTFRIPYYVGPLARGNSRFAWMTRKSEETITPWNFEEVVDKGASAQSFIERMTNFDKNLPNEKVLPKHSLLYEYFTVYNELTKVKYVTEGMRKPAFLSGEQKKAIVDLLFKTNRKVTVKQLKEDYFKKIECFDSVEISGVEDRFNASLGTYHDLLKIIKDKDFLDNEENEDILEDIVLTLTLFEDREMIEERLKTYAHLFDDKVMKQLKRRRYTGWGRLSRKLINGIRDKQSGKTILDFLKSDGFANRNFMQLIHDDSLTFKEDIQKAQVSGQGDSLHEHIANLAGSPAIKKGILQTVKVVDELVKVMGRHKPENIVIEMARENQTTQKGQKNSRERMKRIEEGIKELGSQILKEHPVENTQLQNEKLYLYYLQNGRDMYVDQELDINRLSDYDVDHIVPQSFLKDDSIDNKVLTRSDKARGKSDNVPSEEVVKKMKNYWRQLLNAKLITQRKFDNLTKAERGGLSELDKAGFIKRQLVETRQITKHVAQILDSRMNTKYDENDKLIREVKVITLKSKLVSDFRKDFQFYKVREINNYHHAHDAYLNAVVGTALIKKYPKLESEFVYGDYKVYDVRKMIAKSEQEIGKATAKYFFYSNIMNFFKTEITLANGEIRKRPLIETNGETGEIVWDKGRDFATVRKVLSMPQVNIVKKTEVQTGGFSKESILPKRNSDKLIARKKDWDPKKYGGFDSPTVAYSVLVVAKVEKGKSKKLKSVKELLGITIMERSSFEKNPIDFLEAKGYKEVKKDLIIKLPKYSLFELENGRKRMLASAGELQKGNELALPSKYVNFLYLASHYEKLKGSPEDNEQKQLFVEQHKHYLDEIIEQISEFSKRVILADANLDKVLSAYNKHRDKPIREQAENIIHLFTLTNLGAPAAFKYFDTTIDRKRYTSTKEVLDATLIHQSITGLYETRIDLSQLGGDGGGGGGGSGSSGGVPWILKKPLELTIKLDLEEQQGTLLNNSILSKKGKEELKQLFEKYSALWQSWENQVGHRRIRPHKIATGTVKPTPQKQYHINPKAKPDIQIVINDLLKQGVLIQKESTMNTPVYPVPKPNGRWRMVLDYRAVNKVTPLIAVQNQHSYGILGSLFKGRYKTTIDLSNGFWAHPIVPEDYWITAFTWQGKQYCWTVLPQGFLNSPGLFTGDVVDLLQGIPNVEVYVDDVYISHDSEKEHLEYLDILFNRLKEAGYIISLKKSNIANSIVDFLGFQITNEGRGLTDTFKEKLENITAPTTLKQLQSILGLLNFARNFIPDFTELIAPLYALIPKSTKNYVPWQIEHSTTLETLITKLNGAEYLQGRKGDKTLIMKVNASYTTGYIRYYNEGEKKPISYVSIVFSKTELKFTELEKLLTTVHKGLLKALDLSMGQNIHVYSPIVSMQNIQKTPQTAKKALASRWLSWLSYLEDPRIRFFYDPQMPALKDLPAVDTGKDNKKHPSNFQHIFYTDGSAITSPTKEGHLNAGMGIVYFINKDGNLQKQQEWSISLGNHTAQFAEIAAFEFALKKCLPLGGNILVVTDSNYVAKAYNEELDVWASNGFVNNRKKPLKHISKWKSVADLKRLRPDVVVTHEPGHQKLDSSPHAYGNNLADQLATQASFKVHAGKRTADGSEFEKRTADGSEFESPKKKAKVE

SEQ ID NO: 775 - protein, 2085 aa, synthetic construct
MPAAKRVKLDGGDKKYSIGLDIGTNSVGWAVITDEYKVPSKKFKVLGNTDRHSIKKNLIGALLFDSGETAEATRLKRTARRRYTRRKNRICYLQEIFSNEMAKVDDSFFHRLEESFLVEEDKKHERHPIFGNIVDEVAYHEKYPTIYHLRKKLVDSTDKADLRLIYLALAHMIKFRGHFLIEGDLNPDNSDVDKLFIQLVQTYNQLFEENPINASGVDAKAILSARLSKSRRLENLIAQLPGEKKNGLFGNLIALSLGLTPNFKSNFDLAEDAKLQLSKDTYDDDLDNLLAQIGDQYADLFLAAKNLSDAILLSDILRVNTEITKAPLSASMIKRYDEHHQDLTLLKALVRQQLPEKYKEIFFDQSKNGYAGYIDGGASQEEFYKFIKPILEKMDGTEELLVKLNREDLLRKQRTFDNGSIPHQIHLGELHAILRRQEDFYPFLKDNREKIEKILTFRIPYYVGPLARGNSRFAWMTRKSEETITPWNFEEVVDKGASAQSFIERMTNFDKNLPNEKVLPKHSLLYEYFTVYNELTKVKYVTEGMRKPAFLSGEQKKAIVDLLFKTNRKVTVKQLKEDYFKKIECFDSVEISGVEDRFNASLGTYHDLLKIIKDKDFLDNEENEDILEDIVLTLTLFEDREMIEERLKTYAHLFDDKVMKQLKRRRYTGWGRLSRKLINGIRDKQSGKTILDFLKSDGFANRNFMQLIHDDSLTFKEDIQKAQVSGQGDSLHEHIANLAGSPAIKKGILQTVKVVDELVKVMGRHKPENIVIEMARENQTTQKGQKNSRERMKRIEEGIKELGSQILKEHPVENTQLQNEKLYLYYLQNGRDMYVDQELDINRLSDYDVDHIVPQSFLKDDSIDNKVLTRSDKARGKSDNVPSEEVVKKMKNYWRQLLNAKLITQRKFDNLTKAERGGLSELDKAGFIKRQLVETRQITKHVAQILDSRMNTKYDENDKLIREVKVITLKSKLVSDFRKDFQFYKVREINNYHHAHDAYLNAVVGTALIKKYPKLESEFVYGDYKVYDVRKMIAKSEQEIGKATAKYFFYSNIMNFFKTEITLANGEIRKRPLIETNGETGEIVWDKGRDFATVRKVLSMPQVNIVKKTEVQTGGFSKESILPKRNSDKLIARKKDWDPKKYGGFDSPTVAYSVLVVAKVEKGKSKKLKSVKELLGITIMERSSFEKNPIDFLEAKGYKEVKKDLIIKLPKYSLFELENGRKRMLASAGELQKGNELALPSKYVNFLYLASHYEKLKGSPEDNEQKQLFVEQHKHYLDEIIEQISEFSKRVILADANLDKVLSAYNKHRDKPIREQAENIIHLFTLTNLGAPAAFKYFDTTIDRKRYTSTKEVLDATLIHQSITGLYETRIDLSQLGGDGGGSSGGSPAPGGVPWILKKPLELTIKLDLEEQQGTLLNNSILSKKGKEELKQLFEKYSALWQSWENQVGHRRIRPHKIATGTVKPTPQKQYHINPKAKPDIQIVINDLLKQGVLIQKESTMNTPVYPVPKPNGRWRMVLDYRAVNKVTPLIAVQNQHSYGILGSLFKGRYKTTIDLSNGFWAHPIVPEDYWITAFTWQGKQYCWTVLPQGFLNSPGLFTGDVVDLLQGIPNVEVYVDDVYISHDSEKEHLEYLDILFNRLKEAGYIISLKKSNIANSIVDFLGFQITNEGRGLTDTFKEKLENITAPTTLKQLQSILGLLNFARNFIPDFTELIAPLYALIPKSTKNYVPWQIEHSTTLETLITKLNGAEYLQGRKGDKTLIMKVNASYTTGYIRYYNEGEKKPISYVSIVFSKTELKFTELEKLLTTVHKGLLKALDLSMGQNIHVYSPIVSMQNIQKTPQTAKKALASRWLSWLSYLEDPRIRFFYDPQMPALKDLPAVDTGKDNKKHPSNFQHIFYTDGSAITSPTKEGHLNAGMGIVYFINKDGNLQKQQEWSISLGNHTAQFAEIAAFEFALKKCLPLGGNILVVTDSNYVAKAYNEELDVWASNGFVNNRKKPLKHISKWKSVADLKRLRPDVVVTHEPGHQKLDSSPHAYGNNLADQLATQASFKVHAGKRTADGSEFEKRTADGSEFESPKKKAKVE

SEQ ID NO: 776 - protein, 2084 aa, synthetic construct
MPAAKRVKLDGGDKKYSIGLDIGTNSVGWAVITDEYKVPSKKFKVLGNTDRHSIKKNLIGALLFDSGETAEATRLKRTARRRYTRRKNRICYLQEIFSNEMAKVDDSFFHRLEESFLVEEDKKHERHPIFGNIVDEVAYHEKYPTIYHLRKKLVDSTDKADLRLIYLALAHMIKFRGHFLIEGDLNPDNSDVDKLFIQLVQTYNQLFEENPINASGVDAKAILSARLSKSRRLENLIAQLPGEKKNGLFGNLIALSLGLTPNFKSNFDLAEDAKLQLSKDTYDDDLDNLLAQIGDQYADLFLAAKNLSDAILLSDILRVNTEITKAPLSASMIKRYDEHHQDLTLLKALVRQQLPEKYKEIFFDQSKNGYAGYIDGGASQEEFYKFIKPILEKMDGTEELLVKLNREDLLRKQRTFDNGSIPHQIHLGELHAILRRQEDFYPFLKDNREKIEKILTFRIPYYVGPLARGNSRFAWMTRKSEETITPWNFEEVVDKGASAQSFIERMTNFDKNLPNEKVLPKHSLLYEYFTVYNELTKVKYVTEGMRKPAFLSGEQKKAIVDLLFKTNRKVTVKQLKEDYFKKIECFDSVEISGVEDRFNASLGTYHDLLKIIKDKDFLDNEENEDILEDIVLTLTLFEDREMIEERLKTYAHLFDDKVMKQLKRRRYTGWGRLSRKLINGIRDKQSGKTILDFLKSDGFANRNFMQLIHDDSLTFKEDIQKAQVSGQGDSLHEHIANLAGSPAIKKGILQTVKVVDELVKVMGRHKPENIVIEMARENQTTQKGQKNSRERMKRIEEGIKELGSQILKEHPVENTQLQNEKLYLYYLQNGRDMYVDQELDINRLSDYDVDHIVPQSFLKDDSIDNKVLTRSDKARGKSDNVPSEEVVKKMKNYWRQLLNAKLITQRKFDNLTKAERGGLSELDKAGFIKRQLVETRQITKHVAQILDSRMNTKYDENDKLIREVKVITLKSKLVSDFRKDFQFYKVREINNYHHAHDAYLNAVVGTALIKKYPKLESEFVYGDYKVYDVRKMIAKSEQEIGKATAKYFFYSNIMNFFKTEITLANGEIRKRPLIETNGETGEIVWDKGRDFATVRKVLSMPQVNIVKKTEVQTGGFSKESILPKRNSDKLIARKKDWDPKKYGGFDSPTVAYSVLVVAKVEKGKSKKLKSVKELLGITIMERSSFEKNPIDFLEAKGYKEVKKDLIIKLPKYSLFELENGRKRMLASAGELQKGNELALPSKYVNFLYLASHYEKLKGSPEDNEQKQLFVEQHKHYLDEIIEQISEFSKRVILADANLDKVLSAYNKHRDKPIREQAENIIHLFTLTNLGAPAAFKYFDTTIDRKRYTSTKEVLDATLIHQSITGLYETRIDLSQLGGDGGGGSEAAAKGGVPWILKKPLELTIKLDLEEQQGTLLNNSILSKKGKEELKQLFEKYSALWQSWENQVGHRRIRPHKIATGTVKPTPQKQYHINPKAKPDIQIVINDLLKQGVLIQKESTMNTPVYPVPKPNGRWRMVLDYRAVNKVTPLIAVQNQHSYGILGSLFKGRYKTTIDLSNGFWAHPIVPEDYWITAFTWQGKQYCWTVLPQGFLNSPGLFTGDVVDLLQGIPNVEVYVDDVYISHDSEKEHLEYLDILFNRLKEAGYIISLKKSNIANSIVDFLGFQITNEGRGLTDTFKEKLENITAPTTLKQLQSILGLLNFARNFIPDFTELIAPLYALIPKSTKNYVPWQIEHSTTLETLITKLNGAEYLQGRKGDKTLIMKVNASYTTGYIRYYNEGEKKPISYVSIVFSKTELKFTELEKLLTTVHKGLLKALDLSMGQNIHVYSPIVSMQNIQKTPQTAKKALASRWLSWLSYLEDPRIRFFYDPQMPALKDLPAVDTGKDNKKHPSNFQHIFYTDGSAITSPTKEGHLNAGMGIVYFINKDGNLQKQQEWSISLGNHTAQFAEIAAFEFALKKCLPLGGNILVVTDSNYVAKAYNEELDVWASNGFVNNRKKPLKHISKWKSVADLKRLRPDVVVTHEPGHQKLDSSPHAYGNNLADQLATQASFKVHAGKRTADGSEFEKRTADGSEFESPKKKAKVE

SEQ ID NO: 777 - protein, 2085 aa, synthetic construct
MPAAKRVKLDGGDKKYSIGLDIGTNSVGWAVITDEYKVPSKKFKVLGNTDRHSIKKNLIGALLFDSGETAEATRLKRTARRRYTRRKNRICYLQEIFSNEMAKVDDSFFHRLEESFLVEEDKKHERHPIFGNIVDEVAYHEKYPTIYHLRKKLVDSTDKADLRLIYLALAHMIKFRGHFLIEGDLNPDNSDVDKLFIQLVQTYNQLFEENPINASGVDAKAILSARLSKSRRLENLIAQLPGEKKNGLFGNLIALSLGLTPNFKSNFDLAEDAKLQLSKDTYDDDLDNLLAQIGDQYADLFLAAKNLSDAILLSDILRVNTEITKAPLSASMIKRYDEHHQDLTLLKALVRQQLPEKYKEIFFDQSKNGYAGYIDGGASQEEFYKFIKPILEKMDGTEELLVKLNREDLLRKQRTFDNGSIPHQIHLGELHAILRRQEDFYPFLKDNREKIEKILTFRIPYYVGPLARGNSRFAWMTRKSEETITPWNFEEVVDKGASAQSFIERMTNFDKNLPNEKVLPKHSLLYEYFTVYNELTKVKYVTEGMRKPAFLSGEQKKAIVDLLFKTNRKVTVKQLKEDYFKKIECFDSVEISGVEDRFNASLGTYHDLLKIIKDKDFLDNEENEDILEDIVLTLTLFEDREMIEERLKTYAHLFDDKVMKQLKRRRYTGWGRLSRKLINGIRDKQSGKTILDFLKSDGFANRNFMQLIHDDSLTFKEDIQKAQVSGQGDSLHEHIANLAGSPAIKKGILQTVKVVDELVKVMGRHKPENIVIEMARENQTTQKGQKNSRERMKRIEEGIKELGSQILKEHPVENTQLQNEKLYLYYLQNGRDMYVDQELDINRLSDYDVDHIVPQSFLKDDSIDNKVLTRSDKARGKSDNVPSEEVVKKMKNYWRQLLNAKLITQRKFDNLTKAERGGLSELDKAGFIKRQLVETRQITKHVAQILDSRMNTKYDENDKLIREVKVITLKSKLVSDFRKDFQFYKVREINNYHHAHDAYLNAVVGTALIKKYPKLESEFVYGDYKVYDVRKMIAKSEQEIGKATAKYFFYSNIMNFFKTEITLANGEIRKRPLIETNGETGEIVWDKGRDFATVRKVLSMPQVNIVKKTEVQTGGFSKESILPKRNSDKLIARKKDWDPKKYGGFDSPTVAYSVLVVAKVEKGKSKKLKSVKELLGITIMERSSFEKNPIDFLEAKGYKEVKKDLIIKLPKYSLFELENGRKRMLASAGELQKGNELALPSKYVNFLYLASHYEKLKGSPEDNEQKQLFVEQHKHYLDEIIEQISEFSKRVILADANLDKVLSAYNKHRDKPIREQAENIIHLFTLTNLGAPAAFKYFDTTIDRKRYTSTKEVLDATLIHQSITGLYETRIDLSQLGGDGGGGGGSSPAPGGVPWILKKPLELTIKLDLEEQQGTLLNNSILSKKGKEELKQLFEKYSALWQSWENQVGHRRIRPHKIATGTVKPTPQKQYHINPKAKPDIQIVINDLLKQGVLIQKESTMNTPVYPVPKPNGRWRMVLDYRAVNKVTPLIAVQNQHSYGILGSLFKGRYKTTIDLSNGFWAHPIVPEDYWITAFTWQGKQYCWTVLPQGFLNSPGLFTGDVVDLLQGIPNVEVYVDDVYISHDSEKEHLEYLDILFNRLKEAGYIISLKKSNIANSIVDFLGFQITNEGRGLTDTFKEKLENITAPTTLKQLQSILGLLNFARNFIPDFTELIAPLYALIPKSTKNYVPWQIEHSTTLETLITKLNGAEYLQGRKGDKTLIMKVNASYTTGYIRYYNEGEKKPISYVSIVFSKTELKFTELEKLLTTVHKGLLKALDLSMGQNIHVYSPIVSMQNIQKTPQTAKKALASRWLSWLSYLEDPRIRFFYDPQMPALKDLPAVDTGKDNKKHPSNFQHIFYTDGSAITSPTKEGHLNAGMGIVYFINKDGNLQKQQEWSISLGNHTAQFAEIAAFEFALKKCLPLGGNILVVTDSNYVAKAYNEELDVWASNGFVNNRKKPLKHISKWKSVADLKRLRPDVVVTHEPGHQKLDSSPHAYGNNLADQLATQASFKVHAGKRTADGSEFEKRTADGSEFESPKKKAKVE

SEQ ID NO: 778 - protein, 2091 aa, synthetic construct
MPAAKRVKLDGGDKKYSIGLDIGTNSVGWAVITDEYKVPSKKFKVLGNTDRHSIKKNLIGALLFDSGETAEATRLKRTARRRYTRRKNRICYLQEIFSNEMAKVDDSFFHRLEESFLVEEDKKHERHPIFGNIVDEVAYHEKYPTIYHLRKKLVDSTDKADLRLIYLALAHMIKFRGHFLIEGDLNPDNSDVDKLFIQLVQTYNQLFEENPINASGVDAKAILSARLSKSRRLENLIAQLPGEKKNGLFGNLIALSLGLTPNFKSNFDLAEDAKLQLSKDTYDDDLDNLLAQIGDQYADLFLAAKNLSDAILLSDILRVNTEITKAPLSASMIKRYDEHHQDLTLLKALVRQQLPEKYKEIFFDQSKNGYAGYIDGGASQEEFYKFIKPILEKMDGTEELLVKLNREDLLRKQRTFDNGSIPHQIHLGELHAILRRQEDFYPFLKDNREKIEKILTFRIPYYVGPLARGNSRFAWMTRKSEETITPWNFEEVVDKGASAQSFIERMTNFDKNLPNEKVLPKHSLLYEYFTVYNELTKVKYVTEGMRKPAFLSGEQKKAIVDLLFKTNRKVTVKQLKEDYFKKIECFDSVEISGVEDRFNASLGTYHDLLKIIKDKDFLDNEENEDILEDIVLTLTLFEDREMIEERLKTYAHLFDDKVMKQLKRRRYTGWGRLSRKLINGIRDKQSGKTILDFLKSDGFANRNFMQLIHDDSLTFKEDIQKAQVSGQGDSLHEHIANLAGSPAIKKGILQTVKVVDELVKVMGRHKPENIVIEMARENQTTQKGQKNSRERMKRIEEGIKELGSQILKEHPVENTQLQNEKLYLYYLQNGRDMYVDQELDINRLSDYDVDHIVPQSFLKDDSIDNKVLTRSDKARGKSDNVPSEEVVKKMKNYWRQLLNAKLITQRKFDNLTKAERGGLSELDKAGFIKRQLVETRQITKHVAQILDSRMNTKYDENDKLIREVKVITLKSKLVSDFRKDFQFYKVREINNYHHAHDAYLNAVVGTALIKKYPKLESEFVYGDYKVYDVRKMIAKSEQEIGKATAKYFFYSNIMNFFKTEITLANGEIRKRPLIETNGETGEIVWDKGRDFATVRKVLSMPQVNIVKKTEVQTGGFSKESILPKRNSDKLIARKKDWDPKKYGGFDSPTVAYSVLVVAKVEKGKSKKLKSVKELLGITIMERSSFEKNPIDFLEAKGYKEVKKDLIIKLPKYSLFELENGRKRMLASAGELQKGNELALPSKYVNFLYLASHYEKLKGSPEDNEQKQLFVEQHKHYLDEIIEQISEFSKRVILADANLDKVLSAYNKHRDKPIREQAENIIHLFTLTNLGAPAAFKYFDTTIDRKRYTSTKEVLDATLIHQSITGLYETRIDLSQLGGDGGEAAAKGGGGSEAAAKGGVPWILKKPLELTIKLDLEEQQGTLLNNSILSKKGKEELKQLFEKYSALWQSWENQVGHRRIRPHKIATGTVKPTPQKQYHINPKAKPDIQIVINDLLKQGVLIQKESTMNTPVYPVPKPNGRWRMVLDYRAVNKVTPLIAVQNQHSYGILGSLFKGRYKTTIDLSNGFWAHPIVPEDYWITAFTWQGKQYCWTVLPQGFLNSPGLFTGDVVDLLQGIPNVEVYVDDVYISHDSEKEHLEYLDILFNRLKEAGYIISLKKSNIANSIVDFLGFQITNEGRGLTDTFKEKLENITAPTTLKQLQSILGLLNFARNFIPDFTELIAPLYALIPKSTKNYVPWQIEHSTTLETLITKLNGAEYLQGRKGDKTLIMKVNASYTTGYIRYYNEGEKKPISYVSIVFSKTELKFTELEKLLTTVHKGLLKALDLSMGQNIHVYSPIVSMQNIQKTPQTAKKALASRWLSWLSYLEDPRIRFFYDPQMPALKDLPAVDTGKDNKKHPSNFQHIFYTDGSAITSPTKEGHLNAGMGIVYFINKDGNLQKQQEWSISLGNHTAQFAEIAAFEFALKKCLPLGGNILVVTDSNYVAKAYNEELDVWASNGFVNNRKKPLKHISKWKSVADLKRLRPDVVVTHEPGHQKLDSSPHAYGNNLADQLATQASFKVHAGKRTADGSEFEKRTADGSEFESPKKKAKVE

SEQ ID NO: 779 - protein, 2087 aa, synthetic construct
MPAAKRVKLDGGDKKYSIGLDIGTNSVGWAVITDEYKVPSKKFKVLGNTDRHSIKKNLIGALLFDSGETAEATRLKRTARRRYTRRKNRICYLQEIFSNEMAKVDDSFFHRLEESFLVEEDKKHERHPIFGNIVDEVAYHEKYPTIYHLRKKLVDSTDKADLRLIYLALAHMIKFRGHFLIEGDLNPDNSDVDKLFIQLVQTYNQLFEENPINASGVDAKAILSARLSKSRRLENLIAQLPGEKKNGLFGNLIALSLGLTPNFKSNFDLAEDAKLQLSKDTYDDDLDNLLAQIGDQYADLFLAAKNLSDAILLSDILRVNTEITKAPLSASMIKRYDEHHQDLTLLKALVRQQLPEKYKEIFFDQSKNGYAGYIDGGASQEEFYKFIKPILEKMDGTEELLVKLNREDLLRKQRTFDNGSIPHQIHLGELHAILRRQEDFYPFLKDNREKIEKILTFRIPYYVGPLARGNSRFAWMTRKSEETITPWNFEEVVDKGASAQSFIERMTNFDKNLPNEKVLPKHSLLYEYFTVYNELTKVKYVTEGMRKPAFLSGEQKKAIVDLLFKTNRKVTVKQLKEDYFKKIECFDSVEISGVEDRFNASLGTYHDLLKIIKDKDFLDNEENEDILEDIVLTLTLFEDREMIEERLKTYAHLFDDKVMKQLKRRRYTGWGRLSRKLINGIRDKQSGKTILDFLKSDGFANRNFMQLIHDDSLTFKEDIQKAQVSGQGDSLHEHIANLAGSPAIKKGILQTVKVVDELVKVMGRHKPENIVIEMARENQTTQKGQKNSRERMKRIEEGIKELGSQILKEHPVENTQLQNEKLYLYYLQNGRDMYVDQELDINRLSDYDVDHIVPQSFLKDDSIDNKVLTRSDKARGKSDNVPSEEVVKKMKNYWRQLLNAKLITQRKFDNLTKAERGGLSELDKAGFIKRQLVETRQITKHVAQILDSRMNTKYDENDKLIREVKVITLKSKLVSDFRKDFQFYKVREINNYHHAHDAYLNAVVGTALIKKYPKLESEFVYGDYKVYDVRKMIAKSEQEIGKATAKYFFYSNIMNFFKTEITLANGEIRKRPLIETNGETGEIVWDKGRDFATVRKVLSMPQVNIVKKTEVQTGGFSKESILPKRNSDKLIARKKDWDPKKYGGFDSPTVAYSVLVVAKVEKGKSKKLKSVKELLGITIMERSSFEKNPIDFLEAKGYKEVKKDLIIKLPKYSLFELENGRKRMLASAGELQKGNELALPSKYVNFLYLASHYEKLKGSPEDNEQKQLFVEQHKHYLDEIIEQISEFSKRVILADANLDKVLSAYNKHRDKPIREQAENIIHLFTLTNLGAPAAFKYFDTTIDRKRYTSTKEVLDATLIHQSITGLYETRIDLSQLGGDGGEAAAKGGSGSSGGVPWILKKPLELTIKLDLEEQQGTLLNNSILSKKGKEELKQLFEKYSALWQSWENQVGHRRIRPHKIATGTVKPTPQKQYHINPKAKPDIQIVINDLLKQGVLIQKESTMNTPVYPVPKPNGRWRMVLDYRAVNKVTPLIAVQNQHSYGILGSLFKGRYKTTIDLSNGFWAHPIVPEDYWITAFTWQGKQYCWTVLPQGFLNSPGLFTGDVVDLLQGIPNVEVYVDDVYISHDSEKEHLEYLDILFNRLKEAGYIISLKKSNIANSIVDFLGFQITNEGRGLTDTFKEKLENITAPTTLKQLQSILGLLNFARNFIPDFTELIAPLYALIPKSTKNYVPWQIEHSTTLETLITKLNGAEYLQGRKGDKTLIMKVNASYTTGYIRYYNEGEKKPISYVSIVFSKTELKFTELEKLLTTVHKGLLKALDLSMGQNIHVYSPIVSMQNIQKTPQTAKKALASRWLSWLSYLEDPRIRFFYDPQMPALKDLPAVDTGKDNKKHPSNFQHIFYTDGSAITSPTKEGHLNAGMGIVYFINKDGNLQKQQEWSISLGNHTAQFAEIAAFEFALKKCLPLGGNILVVTDSNYVAKAYNEELDVWASNGFVNNRKKPLKHISKWKSVADLKRLRPDVVVTHEPGHQKLDSSPHAYGNNLADQLATQASFKVHAGKRTADGSEFEKRTADGSEFESPKKKAKVE

SEQ ID NO: 780 - protein, 2085 aa, synthetic construct
MPAAKRVKLDGGDKKYSIGLDIGTNSVGWAVITDEYKVPSKKFKVLGNTDRHSIKKNLIGALLFDSGETAEATRLKRTARRRYTRRKNRICYLQEIFSNEMAKVDDSFFHRLEESFLVEEDKKHERHPIFGNIVDEVAYHEKYPTIYHLRKKLVDSTDKADLRLIYLALAHMIKFRGHFLIEGDLNPDNSDVDKLFIQLVQTYNQLFEENPINASGVDAKAILSARLSKSRRLENLIAQLPGEKKNGLFGNLIALSLGLTPNFKSNFDLAEDAKLQLSKDTYDDDLDNLLAQIGDQYADLFLAAKNLSDAILLSDILRVNTEITKAPLSASMIKRYDEHHQDLTLLKALVRQQLPEKYKEIFFDQSKNGYAGYIDGGASQEEFYKFIKPILEKMDGTEELLVKLNREDLLRKQRTFDNGSIPHQIHLGELHAILRRQEDFYPFLKDNREKIEKILTFRIPYYVGPLARGNSRFAWMTRKSEETITPWNFEEVVDKGASAQSFIERMTNFDKNLPNEKVLPKHSLLYEYFTVYNELTKVKYVTEGMRKPAFLSGEQKKAIVDLLFKTNRKVTVKQLKEDYFKKIECFDSVEISGVEDRFNASLGTYHDLLKIIKDKDFLDNEENEDILEDIVLTLTLFEDREMIEERLKTYAHLFDDKVMKQLKRRRYTGWGRLSRKLINGIRDKQSGKTILDFLKSDGFANRNFMQLIHDDSLTFKEDIQKAQVSGQGDSLHEHIANLAGSPAIKKGILQTVKVVDELVKVMGRHKPENIVIEMARENQTTQKGQKNSRERMKRIEEGIKELGSQILKEHPVENTQLQNEKLYLYYLQNGRDMYVDQELDINRLSDYDVDHIVPQSFLKDDSIDNKVLTRSDKARGKSDNVPSEEVVKKMKNYWRQLLNAKLITQRKFDNLTKAERGGLSELDKAGFIKRQLVETRQITKHVAQILDSRMNTKYDENDKLIREVKVITLKSKLVSDFRKDFQFYKVREINNYHHAHDAYLNAVVGTALIKKYPKLESEFVYGDYKVYDVRKMIAKSEQEIGKATAKYFFYSNIMNFFKTEITLANGEIRKRPLIETNGETGEIVWDKGRDFATVRKVLSMPQVNIVKKTEVQTGGFSKESILPKRNSDKLIARKKDWDPKKYGGFDSPTVAYSVLVVAKVEKGKSKKLKSVKELLGITIMERSSFEKNPIDFLEAKGYKEVKKDLIIKLPKYSLFELENGRKRMLASAGELQKGNELALPSKYVNFLYLASHYEKLKGSPEDNEQKQLFVEQHKHYLDEIIEQISEFSKRVILADANLDKVLSAYNKHRDKPIREQAENIIHLFTLTNLGAPAAFKYFDTTIDRKRYTSTKEVLDATLIHQSITGLYETRIDLSQLGGDGGGGSGGGPAPGGVPWILKKPLELTIKLDLEEQQGTLLNNSILSKKGKEELKQLFEKYSALWQSWENQVGHRRIRPHKIATGTVKPTPQKQYHINPKAKPDIQIVINDLLKQGVLIQKESTMNTPVYPVPKPNGRWRMVLDYRAVNKVTPLIAVQNQHSYGILGSLFKGRYKTTIDLSNGFWAHPIVPEDYWITAFTWQGKQYCWTVLPQGFLNSPGLFTGDVVDLLQGIPNVEVYVDDVYISHDSEKEHLEYLDILFNRLKEAGYIISLKKSNIANSIVDFLGFQITNEGRGLTDTFKEKLENITAPTTLKQLQSILGLLNFARNFIPDFTELIAPLYALIPKSTKNYVPWQIEHSTTLETLITKLNGAEYLQGRKGDKTLIMKVNASYTTGYIRYYNEGEKKPISYVSIVFSKTELKFTELEKLLTTVHKGLLKALDLSMGQNIHVYSPIVSMQNIQKTPQTAKKALASRWLSWLSYLEDPRIRFFYDPQMPALKDLPAVDTGKDNKKHPSNFQHIFYTDGSAITSPTKEGHLNAGMGIVYFINKDGNLQKQQEWSISLGNHTAQFAEIAAFEFALKKCLPLGGNILVVTDSNYVAKAYNEELDVWASNGFVNNRKKPLKHISKWKSVADLKRLRPDVVVTHEPGHQKLDSSPHAYGNNLADQLATQASFKVHAGKRTADGSEFEKRTADGSEFESPKKKAKVE

SEQ ID NO: 781 - protein, 2086 aa, synthetic construct
MPAAKRVKLDGGDKKYSIGLDIGTNSVGWAVITDEYKVPSKKFKVLGNTDRHSIKKNLIGALLFDSGETAEATRLKRTARRRYTRRKNRICYLQEIFSNEMAKVDDSFFHRLEESFLVEEDKKHERHPIFGNIVDEVAYHEKYPTIYHLRKKLVDSTDKADLRLIYLALAHMIKFRGHFLIEGDLNPDNSDVDKLFIQLVQTYNQLFEENPINASGVDAKAILSARLSKSRRLENLIAQLPGEKKNGLFGNLIALSLGLTPNFKSNFDLAEDAKLQLSKDTYDDDLDNLLAQIGDQYADLFLAAKNLSDAILLSDILRVNTEITKAPLSASMIKRYDEHHQDLTLLKALVRQQLPEKYKEIFFDQSKNGYAGYIDGGASQEEFYKFIKPILEKMDGTEELLVKLNREDLLRKQRTFDNGSIPHQIHLGELHAILRRQEDFYPFLKDNREKIEKILTFRIPYYVGPLARGNSRFAWMTRKSEETITPWNFEEVVDKGASAQSFIERMTNFDKNLPNEKVLPKHSLLYEYFTVYNELTKVKYVTEGMRKPAFLSGEQKKAIVDLLFKTNRKVTVKQLKEDYFKKIECFDSVEISGVEDRFNASLGTYHDLLKIIKDKDFLDNEENEDILEDIVLTLTLFEDREMIEERLKTYAHLFDDKVMKQLKRRRYTGWGRLSRKLINGIRDKQSGKTILDFLKSDGFANRNFMQLIHDDSLTFKEDIQKAQVSGQGDSLHEHIANLAGSPAIKKGILQTVKVVDELVKVMGRHKPENIVIEMARENQTTQKGQKNSRERMKRIEEGIKELGSQILKEHPVENTQLQNEKLYLYYLQNGRDMYVDQELDINRLSDYDVDHIVPQSFLKDDSIDNKVLTRSDKARGKSDNVPSEEVVKKMKNYWRQLLNAKLITQRKFDNLTKAERGGLSELDKAGFIKRQLVETRQITKHVAQILDSRMNTKYDENDKLIREVKVITLKSKLVSDFRKDFQFYKVREINNYHHAHDAYLNAVVGTALIKKYPKLESEFVYGDYKVYDVRKMIAKSEQEIGKATAKYFFYSNIMNFFKTEITLANGEIRKRPLIETNGETGEIVWDKGRDFATVRKVLSMPQVNIVKKTEVQTGGFSKESILPKRNSDKLIARKKDWDPKKYGGFDSPTVAYSVLVVAKVEKGKSKKLKSVKELLGITIMERSSFEKNPIDFLEAKGYKEVKKDLIIKLPKYSLFELENGRKRMLASAGELQKGNELALPSKYVNFLYLASHYEKLKGSPEDNEQKQLFVEQHKHYLDEIIEQISEFSKRVILADANLDKVLSAYNKHRDKPIREQAENIIHLFTLTNLGAPAAFKYFDTTIDRKRYTSTKEVLDATLIHQSITGLYETRIDLSQLGGDGGGGGGSGGGGSGGVPWILKKPLELTIKLDLEEQQGTLLNNSILSKKGKEELKQLFEKYSALWQSWENQVGHRRIRPHKIATGTVKPTPQKQYHINPKAKPDIQIVINDLLKQGVLIQKESTMNTPVYPVPKPNGRWRMVLDYRAVNKVTPLIAVQNQHSYGILGSLFKGRYKTTIDLSNGFWAHPIVPEDYWITAFTWQGKQYCWTVLPQGFLNSPGLFTGDVVDLLQGIPNVEVYVDDVYISHDSEKEHLEYLDILFNRLKEAGYIISLKKSNIANSIVDFLGFQITNEGRGLTDTFKEKLENITAPTTLKQLQSILGLLNFARNFIPDFTELIAPLYALIPKSTKNYVPWQIEHSTTLETLITKLNGAEYLQGRKGDKTLIMKVNASYTTGYIRYYNEGEKKPISYVSIVFSKTELKFTELEKLLTTVHKGLLKALDLSMGQNIHVYSPIVSMQNIQKTPQTAKKALASRWLSWLSYLEDPRIRFFYDPQMPALKDLPAVDTGKDNKKHPSNFQHIFYTDGSAITSPTKEGHLNAGMGIVYFINKDGNLQKQQEWSISLGNHTAQFAEIAAFEFALKKCLPLGGNILVVTDSNYVAKAYNEELDVWASNGFVNNRKKPLKHISKWKSVADLKRLRPDVVVTHEPGHQKLDSSPHAYGNNLADQLATQASFKVHAGKRTADGSEFEKRTADGSEFESPKKKAKVE

SEQ ID NO: 782 - protein, 2085 aa, synthetic construct
MPAAKRVKLDGGDKKYSIGLDIGTNSVGWAVITDEYKVPSKKFKVLGNTDRHSIKKNLIGALLFDSGETAEATRLKRTARRRYTRRKNRICYLQEIFSNEMAKVDDSFFHRLEESFLVEEDKKHERHPIFGNIVDEVAYHEKYPTIYHLRKKLVDSTDKADLRLIYLALAHMIKFRGHFLIEGDLNPDNSDVDKLFIQLVQTYNQLFEENPINASGVDAKAILSARLSKSRRLENLIAQLPGEKKNGLFGNLIALSLGLTPNFKSNFDLAEDAKLQLSKDTYDDDLDNLLAQIGDQYADLFLAAKNLSDAILLSDILRVNTEITKAPLSASMIKRYDEHHQDLTLLKALVRQQLPEKYKEIFFDQSKNGYAGYIDGGASQEEFYKFIKPILEKMDGTEELLVKLNREDLLRKQRTFDNGSIPHQIHLGELHAILRRQEDFYPFLKDNREKIEKILTFRIPYYVGPLARGNSRFAWMTRKSEETITPWNFEEVVDKGASAQSFIERMTNFDKNLPNEKVLPKHSLLYEYFTVYNELTKVKYVTEGMRKPAFLSGEQKKAIVDLLFKTNRKVTVKQLKEDYFKKIECFDSVEISGVEDRFNASLGTYHDLLKIIKDKDFLDNEENEDILEDIVLTLTLFEDREMIEERLKTYAHLFDDKVMKQLKRRRYTGWGRLSRKLINGIRDKQSGKTILDFLKSDGFANRNFMQLIHDDSLTFKEDIQKAQVSGQGDSLHEHIANLAGSPAIKKGILQTVKVVDELVKVMGRHKPENIVIEMARENQTTQKGQKNSRERMKRIEEGIKELGSQILKEHPVENTQLQNEKLYLYYLQNGRDMYVDQELDINRLSDYDVDHIVPQSFLKDDSIDNKVLTRSDKARGKSDNVPSEEVVKKMKNYWRQLLNAKLITQRKFDNLTKAERGGLSELDKAGFIKRQLVETRQITKHVAQILDSRMNTKYDENDKLIREVKVITLKSKLVSDFRKDFQFYKVREINNYHHAHDAYLNAVVGTALIKKYPKLESEFVYGDYKVYDVRKMIAKSEQEIGKATAKYFFYSNIMNFFKTEITLANGEIRKRPLIETNGETGEIVWDKGRDFATVRKVLSMPQVNIVKKTEVQTGGFSKESILPKRNSDKLIARKKDWDPKKYGGFDSPTVAYSVLVVAKVEKGKSKKLKSVKELLGITIMERSSFEKNPIDFLEAKGYKEVKKDLIIKLPKYSLFELENGRKRMLASAGELQKGNELALPSKYVNFLYLASHYEKLKGSPEDNEQKQLFVEQHKHYLDEIIEQISEFSKRVILADANLDKVLSAYNKHRDKPIREQAENIIHLFTLTNLGAPAAFKYFDTTIDRKRYTSTKEVLDATLIHQSITGLYETRIDLSQLGGDGGPAPAPAPAPGGVPWILKKPLELTIKLDLEEQQGTLLNNSILSKKGKEELKQLFEKYSALWQSWENQVGHRRIRPHKIATGTVKPTPQKQYHINPKAKPDIQIVINDLLKQGVLIQKESTMNTPVYPVPKPNGRWRMVLDYRAVNKVTPLIAVQNQHSYGILGSLFKGRYKTTIDLSNGFWAHPIVPEDYWITAFTWQGKQYCWTVLPQGFLNSPGLFTGDVVDLLQGIPNVEVYVDDVYISHDSEKEHLEYLDILFNRLKEAGYIISLKKSNIANSIVDFLGFQITNEGRGLTDTFKEKLENITAPTTLKQLQSILGLLNFARNFIPDFTELIAPLYALIPKSTKNYVPWQIEHSTTLETLITKLNGAEYLQGRKGDKTLIMKVNASYTTGYIRYYNEGEKKPISYVSIVFSKTELKFTELEKLLTTVHKGLLKALDLSMGQNIHVYSPIVSMQNIQKTPQTAKKALASRWLSWLSYLEDPRIRFFYDPQMPALKDLPAVDTGKDNKKHPSNFQHIFYTDGSAITSPTKEGHLNAGMGIVYFINKDGNLQKQQEWSISLGNHTAQFAEIAAFEFALKKCLPLGGNILVVTDSNYVAKAYNEELDVWASNGFVNNRKKPLKHISKWKSVADLKRLRPDVVVTHEPGHQKLDSSPHAYGNNLADQLATQASFKVHAGKRTADGSEFEKRTADGSEFESPKKKAKVE

SEQ ID NO: 783 - protein, 2091 aa, synthetic construct
MPAAKRVKLDGGDKKYSIGLDIGTNSVGWAVITDEYKVPSKKFKVLGNTDRHSIKKNLIGALLFDSGETAEATRLKRTARRRYTRRKNRICYLQEIFSNEMAKVDDSFFHRLEESFLVEEDKKHERHPIFGNIVDEVAYHEKYPTIYHLRKKLVDSTDKADLRLIYLALAHMIKFRGHFLIEGDLNPDNSDVDKLFIQLVQTYNQLFEENPINASGVDAKAILSARLSKSRRLENLIAQLPGEKKNGLFGNLIALSLGLTPNFKSNFDLAEDAKLQLSKDTYDDDLDNLLAQIGDQYADLFLAAKNLSDAILLSDILRVNTEITKAPLSASMIKRYDEHHQDLTLLKALVRQQLPEKYKEIFFDQSKNGYAGYIDGGASQEEFYKFIKPILEKMDGTEELLVKLNREDLLRKQRTFDNGSIPHQIHLGELHAILRRQEDFYPFLKDNREKIEKILTFRIPYYVGPLARGNSRFAWMTRKSEETITPWNFEEVVDKGASAQSFIERMTNFDKNLPNEKVLPKHSLLYEYFTVYNELTKVKYVTEGMRKPAFLSGEQKKAIVDLLFKTNRKVTVKQLKEDYFKKIECFDSVEISGVEDRFNASLGTYHDLLKIIKDKDFLDNEENEDILEDIVLTLTLFEDREMIEERLKTYAHLFDDKVMKQLKRRRYTGWGRLSRKLINGIRDKQSGKTILDFLKSDGFANRNFMQLIHDDSLTFKEDIQKAQVSGQGDSLHEHIANLAGSPAIKKGILQTVKVVDELVKVMGRHKPENIVIEMARENQTTQKGQKNSRERMKRIEEGIKELGSQILKEHPVENTQLQNEKLYLYYLQNGRDMYVDQELDINRLSDYDVDHIVPQSFLKDDSIDNKVLTRSDKARGKSDNVPSEEVVKKMKNYWRQLLNAKLITQRKFDNLTKAERGGLSELDKAGFIKRQLVETRQITKHVAQILDSRMNTKYDENDKLIREVKVITLKSKLVSDFRKDFQFYKVREINNYHHAHDAYLNAVVGTALIKKYPKLESEFVYGDYKVYDVRKMIAKSEQEIGKATAKYFFYSNIMNFFKTEITLANGEIRKRPLIETNGETGEIVWDKGRDFATVRKVLSMPQVNIVKKTEVQTGGFSKESILPKRNSDKLIARKKDWDPKKYGGFDSPTVAYSVLVVAKVEKGKSKKLKSVKELLGITIMERSSFEKNPIDFLEAKGYKEVKKDLIIKLPKYSLFELENGRKRMLASAGELQKGNELALPSKYVNFLYLASHYEKLKGSPEDNEQKQLFVEQHKHYLDEIIEQISEFSKRVILADANLDKVLSAYNKHRDKPIREQAENIIHLFTLTNLGAPAAFKYFDTTIDRKRYTSTKEVLDATLIHQSITGLYETRIDLSQLGGDGGGGSGGSGGSGGSGGSGGVPWILKKPLELTIKLDLEEQQGTLLNNSILSKKGKEELKQLFEKYSALWQSWENQVGHRRIRPHKIATGTVKPTPQKQYHINPKAKPDIQIVINDLLKQGVLIQKESTMNTPVYPVPKPNGRWRMVLDYRAVNKVTPLIAVQNQHSYGILGSLFKGRYKTTIDLSNGFWAHPIVPEDYWITAFTWQGKQYCWTVLPQGFLNSPGLFTGDVVDLLQGIPNVEVYVDDVYISHDSEKEHLEYLDILFNRLKEAGYIISLKKSNIANSIVDFLGFQITNEGRGLTDTFKEKLENITAPTTLKQLQSILGLLNFARNFIPDFTELIAPLYALIPKSTKNYVPWQIEHSTTLETLITKLNGAEYLQGRKGDKTLIMKVNASYTTGYIRYYNEGEKKPISYVSIVFSKTELKFTELEKLLTTVHKGLLKALDLSMGQNIHVYSPIVSMQNIQKTPQTAKKALASRWLSWLSYLEDPRIRFFYDPQMPALKDLPAVDTGKDNKKHPSNFQHIFYTDGSAITSPTKEGHLNAGMGIVYFINKDGNLQKQQEWSISLGNHTAQFAEIAAFEFALKKCLPLGGNILVVTDSNYVAKAYNEELDVWASNGFVNNRKKPLKHISKWKSVADLKRLRPDVVVTHEPGHQKLDSSPHAYGNNLADQLATQASFKVHAGKRTADGSEFEKRTADGSEFESPKKKAKVE

SEQ ID NO: 784 - protein, 2084 aa, synthetic construct
MPAAKRVKLDGGDKKYSIGLDIGTNSVGWAVITDEYKVPSKKFKVLGNTDRHSIKKNLIGALLFDSGETAEATRLKRTARRRYTRRKNRICYLQEIFSNEMAKVDDSFFHRLEESFLVEEDKKHERHPIFGNIVDEVAYHEKYPTIYHLRKKLVDSTDKADLRLIYLALAHMIKFRGHFLIEGDLNPDNSDVDKLFIQLVQTYNQLFEENPINASGVDAKAILSARLSKSRRLENLIAQLPGEKKNGLFGNLIALSLGLTPNFKSNFDLAEDAKLQLSKDTYDDDLDNLLAQIGDQYADLFLAAKNLSDAILLSDILRVNTEITKAPLSASMIKRYDEHHQDLTLLKALVRQQLPEKYKEIFFDQSKNGYAGYIDGGASQEEFYKFIKPILEKMDGTEELLVKLNREDLLRKQRTFDNGSIPHQIHLGELHAILRRQEDFYPFLKDNREKIEKILTFRIPYYVGPLARGNSRFAWMTRKSEETITPWNFEEVVDKGASAQSFIERMTNFDKNLPNEKVLPKHSLLYEYFTVYNELTKVKYVTEGMRKPAFLSGEQKKAIVDLLFKTNRKVTVKQLKEDYFKKIECFDSVEISGVEDRFNASLGTYHDLLKIIKDKDFLDNEENEDILEDIVLTLTLFEDREMIEERLKTYAHLFDDKVMKQLKRRRYTGWGRLSRKLINGIRDKQSGKTILDFLKSDGFANRNFMQLIHDDSLTFKEDIQKAQVSGQGDSLHEHIANLAGSPAIKKGILQTVKVVDELVKVMGRHKPENIVIEMARENQTTQKGQKNSRERMKRIEEGIKELGSQILKEHPVENTQLQNEKLYLYYLQNGRDMYVDQELDINRLSDYDVDHIVPQSFLKDDSIDNKVLTRSDKARGKSDNVPSEEVVKKMKNYWRQLLNAKLITQRKFDNLTKAERGGLSELDKAGFIKRQLVETRQITKHVAQILDSRMNTKYDENDKLIREVKVITLKSKLVSDFRKDFQFYKVREINNYHHAHDAYLNAVVGTALIKKYPKLESEFVYGDYKVYDVRKMIAKSEQEIGKATAKYFFYSNIMNFFKTEITLANGEIRKRPLIETNGETGEIVWDKGRDFATVRKVLSMPQVNIVKKTEVQTGGFSKESILPKRNSDKLIARKKDWDPKKYGGFDSPTVAYSVLVVAKVEKGKSKKLKSVKELLGITIMERSSFEKNPIDFLEAKGYKEVKKDLIIKLPKYSLFELENGRKRMLASAGELQKGNELALPSKYVNFLYLASHYEKLKGSPEDNEQKQLFVEQHKHYLDEIIEQISEFSKRVILADANLDKVLSAYNKHRDKPIREQAENIIHLFTLTNLGAPAAFKYFDTTIDRKRYTSTKEVLDATLIHQSITGLYETRIDLSQLGGDGGEAAAKGGGGGVPWILKKPLELTIKLDLEEQQGTLLNNSILSKKGKEELKQLFEKYSALWQSWENQVGHRRIRPHKIATGTVKPTPQKQYHINPKAKPDIQIVINDLLKQGVLIQKESTMNTPVYPVPKPNGRWRMVLDYRAVNKVTPLIAVQNQHSYGILGSLFKGRYKTTIDLSNGFWAHPIVPEDYWITAFTWQGKQYCWTVLPQGFLNSPGLFTGDVVDLLQGIPNVEVYVDDVYISHDSEKEHLEYLDILFNRLKEAGYIISLKKSNIANSIVDFLGFQITNEGRGLTDTFKEKLENITAPTTLKQLQSILGLLNFARNFIPDFTELIAPLYALIPKSTKNYVPWQIEHSTTLETLITKLNGAEYLQGRKGDKTLIMKVNASYTTGYIRYYNEGEKKPISYVSIVFSKTELKFTELEKLLTTVHKGLLKALDLSMGQNIHVYSPIVSMQNIQKTPQTAKKALASRWLSWLSYLEDPRIRFFYDPQMPALKDLPAVDTGKDNKKHPSNFQHIFYTDGSAITSPTKEGHLNAGMGIVYFINKDGNLQKQQEWSISLGNHTAQFAEIAAFEFALKKCLPLGGNILVVTDSNYVAKAYNEELDVWASNGFVNNRKKPLKHISKWKSVADLKRLRPDVVVTHEPGHQKLDSSPHAYGNNLADQLATQASFKVHAGKRTADGSEFEKRTADGSEFESPKKKAKVE

SEQ ID NO: 785 - protein, 2087 aa, synthetic construct
MPAAKRVKLDGGDKKYSIGLDIGTNSVGWAVITDEYKVPSKKFKVLGNTDRHSIKKNLIGALLFDSGETAEATRLKRTARRRYTRRKNRICYLQEIFSNEMAKVDDSFFHRLEESFLVEEDKKHERHPIFGNIVDEVAYHEKYPTIYHLRKKLVDSTDKADLRLIYLALAHMIKFRGHFLIEGDLNPDNSDVDKLFIQLVQTYNQLFEENPINASGVDAKAILSARLSKSRRLENLIAQLPGEKKNGLFGNLIALSLGLTPNFKSNFDLAEDAKLQLSKDTYDDDLDNLLAQIGDQYADLFLAAKNLSDAILLSDILRVNTEITKAPLSASMIKRYDEHHQDLTLLKALVRQQLPEKYKEIFFDQSKNGYAGYIDGGASQEEFYKFIKPILEKMDGTEELLVKLNREDLLRKQRTFDNGSIPHQIHLGELHAILRRQEDFYPFLKDNREKIEKILTFRIPYYVGPLARGNSRFAWMTRKSEETITPWNFEEVVDKGASAQSFIERMTNFDKNLPNEKVLPKHSLLYEYFTVYNELTKVKYVTEGMRKPAFLSGEQKKAIVDLLFKTNRKVTVKQLKEDYFKKIECFDSVEISGVEDRFNASLGTYHDLLKIIKDKDFLDNEENEDILEDIVLTLTLFEDREMIEERLKTYAHLFDDKVMKQLKRRRYTGWGRLSRKLINGIRDKQSGKTILDFLKSDGFANRNFMQLIHDDSLTFKEDIQKAQVSGQGDSLHEHIANLAGSPAIKKGILQTVKVVDELVKVMGRHKPENIVIEMARENQTTQKGQKNSRERMKRIEEGIKELGSQILKEHPVENTQLQNEKLYLYYLQNGRDMYVDQELDINRLSDYDVDHIVPQSFLKDDSIDNKVLTRSDKARGKSDNVPSEEVVKKMKNYWRQLLNAKLITQRKFDNLTKAERGGLSELDKAGFIKRQLVETRQITKHVAQILDSRMNTKYDENDKLIREVKVITLKSKLVSDFRKDFQFYKVREINNYHHAHDAYLNAVVGTALIKKYPKLESEFVYGDYKVYDVRKMIAKSEQEIGKATAKYFFYSNIMNFFKTEITLANGEIRKRPLIETNGETGEIVWDKGRDFATVRKVLSMPQVNIVKKTEVQTGGFSKESILPKRNSDKLIARKKDWDPKKYGGFDSPTVAYSVLVVAKVEKGKSKKLKSVKELLGITIMERSSFEKNPIDFLEAKGYKEVKKDLIIKLPKYSLFELENGRKRMLASAGELQKGNELALPSKYVNFLYLASHYEKLKGSPEDNEQKQLFVEQHKHYLDEIIEQISEFSKRVILADANLDKVLSAYNKHRDKPIREQAENIIHLFTLTNLGAPAAFKYFDTTIDRKRYTSTKEVLDATLIHQSITGLYETRIDLSQLGGDGGPAPAPAPAPAPGGVPWILKKPLELTIKLDLEEQQGTLLNNSILSKKGKEELKQLFEKYSALWQSWENQVGHRRIRPHKIATGTVKPTPQKQYHINPKAKPDIQIVINDLLKQGVLIQKESTMNTPVYPVPKPNGRWRMVLDYRAVNKVTPLIAVQNQHSYGILGSLFKGRYKTTIDLSNGFWAHPIVPEDYWITAFTWQGKQYCWTVLPQGFLNSPGLFTGDVVDLLQGIPNVEVYVDDVYISHDSEKEHLEYLDILFNRLKEAGYIISLKKSNIANSIVDFLGFQITNEGRGLTDTFKEKLENITAPTTLKQLQSILGLLNFARNFIPDFTELIAPLYALIPKSTKNYVPWQIEHSTTLETLITKLNGAEYLQGRKGDKTLIMKVNASYTTGYIRYYNEGEKKPISYVSIVFSKTELKFTELEKLLTTVHKGLLKALDLSMGQNIHVYSPIVSMQNIQKTPQTAKKALASRWLSWLSYLEDPRIRFFYDPQMPALKDLPAVDTGKDNKKHPSNFQHIFYTDGSAITSPTKEGHLNAGMGIVYFINKDGNLQKQQEWSISLGNHTAQFAEIAAFEFALKKCLPLGGNILVVTDSNYVAKAYNEELDVWASNGFVNNRKKPLKHISKWKSVADLKRLRPDVVVTHEPGHQKLDSSPHAYGNNLADQLATQASFKVHAGKRTADGSEFEKRTADGSEFESPKKKAKVE

SEQ ID NO: 786 - protein, 2085 aa, synthetic construct
MPAAKRVKLDGGDKKYSIGLDIGTNSVGWAVITDEYKVPSKKFKVLGNTDRHSIKKNLIGALLFDSGETAEATRLKRTARRRYTRRKNRICYLQEIFSNEMAKVDDSFFHRLEESFLVEEDKKHERHPIFGNIVDEVAYHEKYPTIYHLRKKLVDSTDKADLRLIYLALAHMIKFRGHFLIEGDLNPDNSDVDKLFIQLVQTYNQLFEENPINASGVDAKAILSARLSKSRRLENLIAQLPGEKKNGLFGNLIALSLGLTPNFKSNFDLAEDAKLQLSKDTYDDDLDNLLAQIGDQYADLFLAAKNLSDAILLSDILRVNTEITKAPLSASMIKRYDEHHQDLTLLKALVRQQLPEKYKEIFFDQSKNGYAGYIDGGASQEEFYKFIKPILEKMDGTEELLVKLNREDLLRKQRTFDNGSIPHQIHLGELHAILRRQEDFYPFLKDNREKIEKILTFRIPYYVGPLARGNSRFAWMTRKSEETITPWNFEEVVDKGASAQSFIERMTNFDKNLPNEKVLPKHSLLYEYFTVYNELTKVKYVTEGMRKPAFLSGEQKKAIVDLLFKTNRKVTVKQLKEDYFKKIECFDSVEISGVEDRFNASLGTYHDLLKIIKDKDFLDNEENEDILEDIVLTLTLFEDREMIEERLKTYAHLFDDKVMKQLKRRRYTGWGRLSRKLINGIRDKQSGKTILDFLKSDGFANRNFMQLIHDDSLTFKEDIQKAQVSGQGDSLHEHIANLAGSPAIKKGILQTVKVVDELVKVMGRHKPENIVIEMARENQTTQKGQKNSRERMKRIEEGIKELGSQILKEHPVENTQLQNEKLYLYYLQNGRDMYVDQELDINRLSDYDVDHIVPQSFLKDDSIDNKVLTRSDKARGKSDNVPSEEVVKKMKNYWRQLLNAKLITQRKFDNLTKAERGGLSELDKAGFIKRQLVETRQITKHVAQILDSRMNTKYDENDKLIREVKVITLKSKLVSDFRKDFQFYKVREINNYHHAHDAYLNAVVGTALIKKYPKLESEFVYGDYKVYDVRKMIAKSEQEIGKATAKYFFYSNIMNFFKTEITLANGEIRKRPLIETNGETGEIVWDKGRDFATVRKVLSMPQVNIVKKTEVQTGGFSKESILPKRNSDKLIARKKDWDPKKYGGFDSPTVAYSVLVVAKVEKGKSKKLKSVKELLGITIMERSSFEKNPIDFLEAKGYKEVKKDLIIKLPKYSLFELENGRKRMLASAGELQKGNELALPSKYVNFLYLASHYEKLKGSPEDNEQKQLFVEQHKHYLDEIIEQISEFSKRVILADANLDKVLSAYNKHRDKPIREQAENIIHLFTLTNLGAPAAFKYFDTTIDRKRYTSTKEVLDATLIHQSITGLYETRIDLSQLGGDGGGGSGGSGGSGGVPWILKKPLELTIKLDLEEQQGTLLNNSILSKKGKEELKQLFEKYSALWQSWENQVGHRRIRPHKIATGTVKPTPQKQYHINPKAKPDIQIVINDLLKQGVLIQKESTMNTPVYPVPKPNGRWRMVLDYRAVNKVTPLIAVQNQHSYGILGSLFKGRYKTTIDLSNGFWAHPIVPEDYWITAFTWQGKQYCWTVLPQGFLNSPGLFTGDVVDLLQGIPNVEVYVDDVYISHDSEKEHLEYLDILFNRLKEAGYIISLKKSNIANSIVDFLGFQITNEGRGLTDTFKEKLENITAPTTLKQLQSILGLLNFARNFIPDFTELIAPLYALIPKSTKNYVPWQIEHSTTLETLITKLNGAEYLQGRKGDKTLIMKVNASYTTGYIRYYNEGEKKPISYVSIVFSKTELKFTELEKLLTTVHKGLLKALDLSMGQNIHVYSPIVSMQNIQKTPQTAKKALASRWLSWLSYLEDPRIRFFYDPQMPALKDLPAVDTGKDNKKHPSNFQHIFYTDGSAITSPTKEGHLNAGMGIVYFINKDGNLQKQQEWSISLGNHTAQFAEIAAFEFALKKCLPLGGNILVVTDSNYVAKAYNEELDVWASNGFVNNRKKPLKHISKWKSVADLKRLRPDVVVTHEPGHQKLDSSPHAYGNNLADQLATQASFKVHAGKRTADGSEFEKRTADGSEFESPKKKAKVE

SEQ ID NO: 787 - protein, 2085 aa, synthetic construct
MPAAKRVKLDGGDKKYSIGLDIGTNSVGWAVITDEYKVPSKKFKVLGNTDRHSIKKNLIGALLFDSGETAEATRLKRTARRRYTRRKNRICYLQEIFSNEMAKVDDSFFHRLEESFLVEEDKKHERHPIFGNIVDEVAYHEKYPTIYHLRKKLVDSTDKADLRLIYLALAHMIKFRGHFLIEGDLNPDNSDVDKLFIQLVQTYNQLFEENPINASGVDAKAILSARLSKSRRLENLIAQLPGEKKNGLFGNLIALSLGLTPNFKSNFDLAEDAKLQLSKDTYDDDLDNLLAQIGDQYADLFLAAKNLSDAILLSDILRVNTEITKAPLSASMIKRYDEHHQDLTLLKALVRQQLPEKYKEIFFDQSKNGYAGYIDGGASQEEFYKFIKPILEKMDGTEELLVKLNREDLLRKQRTFDNGSIPHQIHLGELHAILRRQEDFYPFLKDNREKIEKILTFRIPYYVGPLARGNSRFAWMTRKSEETITPWNFEEVVDKGASAQSFIERMTNFDKNLPNEKVLPKHSLLYEYFTVYNELTKVKYVTEGMRKPAFLSGEQKKAIVDLLFKTNRKVTVKQLKEDYFKKIECFDSVEISGVEDRFNASLGTYHDLLKIIKDKDFLDNEENEDILEDIVLTLTLFEDREMIEERLKTYAHLFDDKVMKQLKRRRYTGWGRLSRKLINGIRDKQSGKTILDFLKSDGFANRNFMQLIHDDSLTFKEDIQKAQVSGQGDSLHEHIANLAGSPAIKKGILQTVKVVDELVKVMGRHKPENIVIEMARENQTTQKGQKNSRERMKRIEEGIKELGSQILKEHPVENTQLQNEKLYLYYLQNGRDMYVDQELDINRLSDYDVDHIVPQSFLKDDSIDNKVLTRSDKARGKSDNVPSEEVVKKMKNYWRQLLNAKLITQRKFDNLTKAERGGLSELDKAGFIKRQLVETRQITKHVAQILDSRMNTKYDENDKLIREVKVITLKSKLVSDFRKDFQFYKVREINNYHHAHDAYLNAVVGTALIKKYPKLESEFVYGDYKVYDVRKMIAKSEQEIGKATAKYFFYSNIMNFFKTEITLANGEIRKRPLIETNGETGEIVWDKGRDFATVRKVLSMPQVNIVKKTEVQTGGFSKESILPKRNSDKLIARKKDWDPKKYGGFDSPTVAYSVLVVAKVEKGKSKKLKSVKELLGITIMERSSFEKNPIDFLEAKGYKEVKKDLIIKLPKYSLFELENGRKRMLASAGELQKGNELALPSKYVNFLYLASHYEKLKGSPEDNEQKQLFVEQHKHYLDEIIEQISEFSKRVILADANLDKVLSAYNKHRDKPIREQAENIIHLFTLTNLGAPAAFKYFDTTIDRKRYTSTKEVLDATLIHQSITGLYETRIDLSQLGGDGGGSSGGSGGGGGVPWILKKPLELTIKLDLEEQQGTLLNNSILSKKGKEELKQLFEKYSALWQSWENQVGHRRIRPHKIATGTVKPTPQKQYHINPKAKPDIQIVINDLLKQGVLIQKESTMNTPVYPVPKPNGRWRMVLDYRAVNKVTPLIAVQNQHSYGILGSLFKGRYKTTIDLSNGFWAHPIVPEDYWITAFTWQGKQYCWTVLPQGFLNSPGLFTGDVVDLLQGIPNVEVYVDDVYISHDSEKEHLEYLDILFNRLKEAGYIISLKKSNIANSIVDFLGFQITNEGRGLTDTFKEKLENITAPTTLKQLQSILGLLNFARNFIPDFTELIAPLYALIPKSTKNYVPWQIEHSTTLETLITKLNGAEYLQGRKGDKTLIMKVNASYTTGYIRYYNEGEKKPISYVSIVFSKTELKFTELEKLLTTVHKGLLKALDLSMGQNIHVYSPIVSMQNIQKTPQTAKKALASRWLSWLSYLEDPRIRFFYDPQMPALKDLPAVDTGKDNKKHPSNFQHIFYTDGSAITSPTKEGHLNAGMGIVYFINKDGNLQKQQEWSISLGNHTAQFAEIAAFEFALKKCLPLGGNILVVTDSNYVAKAYNEELDVWASNGFVNNRKKPLKHISKWKSVADLKRLRPDVVVTHEPGHQKLDSSPHAYGNNLADQLATQASFKVHAGKRTADGSEFEKRTADGSEFESPKKKAKVE

SEQ ID NO: 788 - protein, 2082 aa, synthetic construct
MPAAKRVKLDGGDKKYSIGLDIGTNSVGWAVITDEYKVPSKKFKVLGNTDRHSIKKNLIGALLFDSGETAEATRLKRTARRRYTRRKNRICYLQEIFSNEMAKVDDSFFHRLEESFLVEEDKKHERHPIFGNIVDEVAYHEKYPTIYHLRKKLVDSTDKADLRLIYLALAHMIKFRGHFLIEGDLNPDNSDVDKLFIQLVQTYNQLFEENPINASGVDAKAILSARLSKSRRLENLIAQLPGEKKNGLFGNLIALSLGLTPNFKSNFDLAEDAKLQLSKDTYDDDLDNLLAQIGDQYADLFLAAKNLSDAILLSDILRVNTEITKAPLSASMIKRYDEHHQDLTLLKALVRQQLPEKYKEIFFDQSKNGYAGYIDGGASQEEFYKFIKPILEKMDGTEELLVKLNREDLLRKQRTFDNGSIPHQIHLGELHAILRRQEDFYPFLKDNREKIEKILTFRIPYYVGPLARGNSRFAWMTRKSEETITPWNFEEVVDKGASAQSFIERMTNFDKNLPNEKVLPKHSLLYEYFTVYNELTKVKYVTEGMRKPAFLSGEQKKAIVDLLFKTNRKVTVKQLKEDYFKKIECFDSVEISGVEDRFNASLGTYHDLLKIIKDKDFLDNEENEDILEDIVLTLTLFEDREMIEERLKTYAHLFDDKVMKQLKRRRYTGWGRLSRKLINGIRDKQSGKTILDFLKSDGFANRNFMQLIHDDSLTFKEDIQKAQVSGQGDSLHEHIANLAGSPAIKKGILQTVKVVDELVKVMGRHKPENIVIEMARENQTTQKGQKNSRERMKRIEEGIKELGSQILKEHPVENTQLQNEKLYLYYLQNGRDMYVDQELDINRLSDYDVDHIVPQSFLKDDSIDNKVLTRSDKARGKSDNVPSEEVVKKMKNYWRQLLNAKLITQRKFDNLTKAERGGLSELDKAGFIKRQLVETRQITKHVAQILDSRMNTKYDENDKLIREVKVITLKSKLVSDFRKDFQFYKVREINNYHHAHDAYLNAVVGTALIKKYPKLESEFVYGDYKVYDVRKMIAKSEQEIGKATAKYFFYSNIMNFFKTEITLANGEIRKRPLIETNGETGEIVWDKGRDFATVRKVLSMPQVNIVKKTEVQTGGFSKESILPKRNSDKLIARKKDWDPKKYGGFDSPTVAYSVLVVAKVEKGKSKKLKSVKELLGITIMERSSFEKNPIDFLEAKGYKEVKKDLIIKLPKYSLFELENGRKRMLASAGELQKGNELALPSKYVNFLYLASHYEKLKGSPEDNEQKQLFVEQHKHYLDEIIEQISEFSKRVILADANLDKVLSAYNKHRDKPIREQAENIIHLFTLTNLGAPAAFKYFDTTIDRKRYTSTKEVLDATLIHQSITGLYETRIDLSQLGGDGGGGSGGSGGVPWILKKPLELTIKLDLEEQQGTLLNNSILSKKGKEELKQLFEKYSALWQSWENQVGHRRIRPHKIATGTVKPTPQKQYHINPKAKPDIQIVINDLLKQGVLIQKESTMNTPVYPVPKPNGRWRMVLDYRAVNKVTPLIAVQNQHSYGILGSLFKGRYKTTIDLSNGFWAHPIVPEDYWITAFTWQGKQYCWTVLPQGFLNSPGLFTGDVVDLLQGIPNVEVYVDDVYISHDSEKEHLEYLDILFNRLKEAGYIISLKKSNIANSIVDFLGFQITNEGRGLTDTFKEKLENITAPTTLKQLQSILGLLNFARNFIPDFTELIAPLYALIPKSTKNYVPWQIEHSTTLETLITKLNGAEYLQGRKGDKTLIMKVNASYTTGYIRYYNEGEKKPISYVSIVFSKTELKFTELEKLLTTVHKGLLKALDLSMGQNIHVYSPIVSMQNIQKTPQTAKKALASRWLSWLSYLEDPRIRFFYDPQMPALKDLPAVDTGKDNKKHPSNFQHIFYTDGSAITSPTKEGHLNAGMGIVYFINKDGNLQKQQEWSISLGNHTAQFAEIAAFEFALKKCLPLGGNILVVTDSNYVAKAYNEELDVWASNGFVNNRKKPLKHISKWKSVADLKRLRPDVVVTHEPGHQKLDSSPHAYGNNLADQLATQASFKVHAGKRTADGSEFEKRTADGSEFESPKKKAKVE

SEQ ID NO: 789 - protein, 2073 aa, synthetic construct
MPAAKRVKLDGGDKKYSIGLDIGTNSVGWAVITDEYKVPSKKFKVLGNTDRHSIKKNLIGALLFDSGETAEATRLKRTARRRYTRRKNRICYLQEIFSNEMAKVDDSFFHRLEESFLVEEDKKHERHPIFGNIVDEVAYHEKYPTIYHLRKKLVDSTDKADLRLIYLALAHMIKFRGHFLIEGDLNPDNSDVDKLFIQLVQTYNQLFEENPINASGVDAKAILSARLSKSRRLENLIAQLPGEKKNGLFGNLIALSLGLTPNFKSNFDLAEDAKLQLSKDTYDDDLDNLLAQIGDQYADLFLAAKNLSDAILLSDILRVNTEITKAPLSASMIKRYDEHHQDLTLLKALVRQQLPEKYKEIFFDQSKNGYAGYIDGGASQEEFYKFIKPILEKMDGTEELLVKLNREDLLRKQRTFDNGSIPHQIHLGELHAILRRQEDFYPFLKDNREKIEKILTFRIPYYVGPLARGNSRFAWMTRKSEETITPWNFEEVVDKGASAQSFIERMTNFDKNLPNEKVLPKHSLLYEYFTVYNELTKVKYVTEGMRKPAFLSGEQKKAIVDLLFKTNRKVTVKQLKEDYFKKIECFDSVEISGVEDRFNASLGTYHDLLKIIKDKDFLDNEENEDILEDIVLTLTLFEDREMIEERLKTYAHLFDDKVMKQLKRRRYTGWGRLSRKLINGIRDKQSGKTILDFLKSDGFANRNFMQLIHDDSLTFKEDIQKAQVSGQGDSLHEHIANLAGSPAIKKGILQTVKVVDELVKVMGRHKPENIVIEMARENQTTQKGQKNSRERMKRIEEGIKELGSQILKEHPVENTQLQNEKLYLYYLQNGRDMYVDQELDINRLSDYDVDHIVPQSFLKDDSIDNKVLTRSDKARGKSDNVPSEEVVKKMKNYWRQLLNAKLITQRKFDNLTKAERGGLSELDKAGFIKRQLVETRQITKHVAQILDSRMNTKYDENDKLIREVKVITLKSKLVSDFRKDFQFYKVREINNYHHAHDAYLNAVVGTALIKKYPKLESEFVYGDYKVYDVRKMIAKSEQEIGKATAKYFFYSNIMNFFKTEITLANGEIRKRPLIETNGETGEIVWDKGRDFATVRKVLSMPQVNIVKKTEVQTGGFSKESILPKRNSDKLIARKKDWDPKKYGGFDSPTVAYSVLVVAKVEKGKSKKLKSVKELLGITIMERSSFEKNPIDFLEAKGYKEVKKDLIIKLPKYSLFELENGRKRMLASAGELQKGNELALPSKYVNFLYLASHYEKLKGSPEDNEQKQLFVEQHKHYLDEIIEQISEFSKRVILADANLDKVLSAYNKHRDKPIREQAENIIHLFTLTNLGAPAAFKYFDTTIDRKRYTSTKEVLDATLIHQSITGLYETRIDLSQLGGDGGPAPGGGGSSGGSCQTKNTLNIDEYLLQFPDQLWASLPTDIGRMLVPPITIKIKDNASLPSIRQYPLPKDKTEGLRPLISSLENQGILIKCHSPCNTPIFPIKKAGRDEYRMIHDLRAINNIVAPLTAVVASPTTVLSNLAPSLHWFTVIDLSNAFFSVPIHKDSQYLFAFTFEGHQYTWTVLPQGFIHSPTLFNQALYQSLHKIKFKISSEICIYMDDVLIASKDRDTNLKDTAVMLQHLASEGHKVSKKKLQLCQQEVVYLGQLLTPEGRKILPDRKVTVSQFQQPTTIRQIRAFLGKVGYCRHFIPEFSIHSKFLEKQLKPDTAEPFQLDDQQVEAFNKLKHAITTAPVLVVPDPAKPFQLYTSHSEHASIAVLTQKHAGRTRPIAFLSSKFDAIESGLPPCLKACASIHRSLTQADSFILGAPLIIYTTHAICTLLQRDRSQLVTASRFSKWEADLLRPELTFVACSAVSPAHLYMQSCENNIPPHDCVLLTHTISRPRPDLSDLPIPDPDMTLFSDGSYTTGRGGAAVVMHRPVTDDFIIIHQQPGGASAQTAELLALAAACHLATDKTVNIYTDSRYAYGVVHDFGHLWMHRGFVTSAGTPIKNHKEIEYLLKQIMKPKQVSVIKIEAHTKGVSMEVRGNAAADEAAKNAVFLVQRAGKRTADGSEFEKRTADGSEFESPKKKAKVE

SEQ ID NO: 790 - protein, 2094 aa, synthetic construct
MPAAKRVKLDGGDKKYSIGLDIGTNSVGWAVITDEYKVPSKKFKVLGNTDRHSIKKNLIGALLFDSGETAEATRLKRTARRRYTRRKNRICYLQEIFSNEMAKVDDSFFHRLEESFLVEEDKKHERHPIFGNIVDEVAYHEKYPTIYHLRKKLVDSTDKADLRLIYLALAHMIKFRGHFLIEGDLNPDNSDVDKLFIQLVQTYNQLFEENPINASGVDAKAILSARLSKSRRLENLIAQLPGEKKNGLFGNLIALSLGLTPNFKSNFDLAEDAKLQLSKDTYDDDLDNLLAQIGDQYADLFLAAKNLSDAILLSDILRVNTEITKAPLSASMIKRYDEHHQDLTLLKALVRQQLPEKYKEIFFDQSKNGYAGYIDGGASQEEFYKFIKPILEKMDGTEELLVKLNREDLLRKQRTFDNGSIPHQIHLGELHAILRRQEDFYPFLKDNREKIEKILTFRIPYYVGPLARGNSRFAWMTRKSEETITPWNFEEVVDKGASAQSFIERMTNFDKNLPNEKVLPKHSLLYEYFTVYNELTKVKYVTEGMRKPAFLSGEQKKAIVDLLFKTNRKVTVKQLKEDYFKKIECFDSVEISGVEDRFNASLGTYHDLLKIIKDKDFLDNEENEDILEDIVLTLTLFEDREMIEERLKTYAHLFDDKVMKQLKRRRYTGWGRLSRKLINGIRDKQSGKTILDFLKSDGFANRNFMQLIHDDSLTFKEDIQKAQVSGQGDSLHEHIANLAGSPAIKKGILQTVKVVDELVKVMGRHKPENIVIEMARENQTTQKGQKNSRERMKRIEEGIKELGSQILKEHPVENTQLQNEKLYLYYLQNGRDMYVDQELDINRLSDYDVDHIVPQSFLKDDSIDNKVLTRSDKARGKSDNVPSEEVVKKMKNYWRQLLNAKLITQRKFDNLTKAERGGLSELDKAGFIKRQLVETRQITKHVAQILDSRMNTKYDENDKLIREVKVITLKSKLVSDFRKDFQFYKVREINNYHHAHDAYLNAVVGTALIKKYPKLESEFVYGDYKVYDVRKMIAKSEQEIGKATAKYFFYSNIMNFFKTEITLANGEIRKRPLIETNGETGEIVWDKGRDFATVRKVLSMPQVNIVKKTEVQTGGFSKESILPKRNSDKLIARKKDWDPKKYGGFDSPTVAYSVLVVAKVEKGKSKKLKSVKELLGITIMERSSFEKNPIDFLEAKGYKEVKKDLIIKLPKYSLFELENGRKRMLASAGELQKGNELALPSKYVNFLYLASHYEKLKGSPEDNEQKQLFVEQHKHYLDEIIEQISEFSKRVILADANLDKVLSAYNKHRDKPIREQAENIIHLFTLTNLGAPAAFKYFDTTIDRKRYTSTKEVLDATLIHQSITGLYETRIDLSQLGGDGGGGGEAAAKPAPGGVLNLEEEYRLHEKPVPSSIDPSWLQLFPTVWAERAGMGLANQVPPVVVELRSGASPVAVRQYPMSKEAREGIRPHIQRFLDLGVLVPCQSPWNTPLLPVKKPGTNDYRPVQDLREINKRVQDIHPTVPNPYNLLSSLPPSHTWYSVLDLKDAFFCLKLHPNSQPLFAFEWRDPEKGNTGQLTWTRLPQGFKNSPTLFDEALHRDLAPFRALNPQVVLLQYVDDLLVAAPTYRDCKEGTQKLLQELSKLGYRVSAKKAQLCQKEVTYLGYLLKEGKRWLTPARKATVMKIPPPTTPRQVREFLGTAGFCRLWIPGFASLAAPLYPLTKESIPFIWTEEHQKAFDRIKEALLSAPALALPDLTKPFTLYVDERAGVARGVLTQTLGPWRRPVAYLSKKLDPVASGWPTCLKAVAAVALLLKDADKLTLGQNVTVIASHSLESIVRQPPDRWMTNARMTHYQSLLLNERVSFAPPAVLNPATLLPVESEATPVHRCSEILAEETGTRRDLKDQPLPGVPAWYTDGSSFIAEGKRRAGAAIVDGKRTVWASSLPEGTSAQKAELVALTQALRLAEGKDINIYTDSRYAFATAHIHGAIYKQRGLLTSAGKDIKNKEEILALLEAIHLPKRVAIIHCPGHQKGNDPVATGNRRADEAAKQAALSTRVLAETTKPAGKRTADGSEFEKRTADGSEFESPKKKAKVE

SEQ ID NO: 791 - protein, 2094 aa, synthetic construct
MPAAKRVKLDGGDKKYSIGLDIGTNSVGWAVITDEYKVPSKKFKVLGNTDRHSIKKNLIGALLFDSGETAEATRLKRTARRRYTRRKNRICYLQEIFSNEMAKVDDSFFHRLEESFLVEEDKKHERHPIFGNIVDEVAYHEKYPTIYHLRKKLVDSTDKADLRLIYLALAHMIKFRGHFLIEGDLNPDNSDVDKLFIQLVQTYNQLFEENPINASGVDAKAILSARLSKSRRLENLIAQLPGEKKNGLFGNLIALSLGLTPNFKSNFDLAEDAKLQLSKDTYDDDLDNLLAQIGDQYADLFLAAKNLSDAILLSDILRVNTEITKAPLSASMIKRYDEHHQDLTLLKALVRQQLPEKYKEIFFDQSKNGYAGYIDGGASQEEFYKFIKPILEKMDGTEELLVKLNREDLLRKQRTFDNGSIPHQIHLGELHAILRRQEDFYPFLKDNREKIEKILTFRIPYYVGPLARGNSRFAWMTRKSEETITPWNFEEVVDKGASAQSFIERMTNFDKNLPNEKVLPKHSLLYEYFTVYNELTKVKYVTEGMRKPAFLSGEQKKAIVDLLFKTNRKVTVKQLKEDYFKKIECFDSVEISGVEDRFNASLGTYHDLLKIIKDKDFLDNEENEDILEDIVLTLTLFEDREMIEERLKTYAHLFDDKVMKQLKRRRYTGWGRLSRKLINGIRDKQSGKTILDFLKSDGFANRNFMQLIHDDSLTFKEDIQKAQVSGQGDSLHEHIANLAGSPAIKKGILQTVKVVDELVKVMGRHKPENIVIEMARENQTTQKGQKNSRERMKRIEEGIKELGSQILKEHPVENTQLQNEKLYLYYLQNGRDMYVDQELDINRLSDYDVDHIVPQSFLKDDSIDNKVLTRSDKARGKSDNVPSEEVVKKMKNYWRQLLNAKLITQRKFDNLTKAERGGLSELDKAGFIKRQLVETRQITKHVAQILDSRMNTKYDENDKLIREVKVITLKSKLVSDFRKDFQFYKVREINNYHHAHDAYLNAVVGTALIKKYPKLESEFVYGDYKVYDVRKMIAKSEQEIGKATAKYFFYSNIMNFFKTEITLANGEIRKRPLIETNGETGEIVWDKGRDFATVRKVLSMPQVNIVKKTEVQTGGFSKESILPKRNSDKLIARKKDWDPKKYGGFDSPTVAYSVLVVAKVEKGKSKKLKSVKELLGITIMERSSFEKNPIDFLEAKGYKEVKKDLIIKLPKYSLFELENGRKRMLASAGELQKGNELALPSKYVNFLYLASHYEKLKGSPEDNEQKQLFVEQHKHYLDEIIEQISEFSKRVILADANLDKVLSAYNKHRDKPIREQAENIIHLFTLTNLGAPAAFKYFDTTIDRKRYTSTKEVLDATLIHQSITGLYETRIDLSQLGGDGGGSSGGGEAAAKGGVLNLEEEYRLHEKPVPSSIDPSWLQLFPTVWAERAGMGLANQVPPVVVELRSGASPVAVRQYPMSKEAREGIRPHIQRFLDLGVLVPCQSPWNTPLLPVKKPGTNDYRPVQDLREINKRVQDIHPTVPNPYNLLSSLPPSHTWYSVLDLKDAFFCLKLHPNSQPLFAFEWRDPEKGNTGQLTWTRLPQGFKNSPTLFDEALHRDLAPFRALNPQVVLLQYVDDLLVAAPTYRDCKEGTQKLLQELSKLGYRVSAKKAQLCQKEVTYLGYLLKEGKRWLTPARKATVMKIPPPTTPRQVREFLGTAGFCRLWIPGFASLAAPLYPLTKESIPFIWTEEHQKAFDRIKEALLSAPALALPDLTKPFTLYVDERAGVARGVLTQTLGPWRRPVAYLSKKLDPVASGWPTCLKAVAAVALLLKDADKLTLGQNVTVIASHSLESIVRQPPDRWMTNARMTHYQSLLLNERVSFAPPAVLNPATLLPVESEATPVHRCSEILAEETGTRRDLKDQPLPGVPAWYTDGSSFIAEGKRRAGAAIVDGKRTVWASSLPEGTSAQKAELVALTQALRLAEGKDINIYTDSRYAFATAHIHGAIYKQRGLLTSAGKDIKNKEEILALLEAIHLPKRVAIIHCPGHQKGNDPVATGNRRADEAAKQAALSTRVLAETTKPAGKRTADGSEFEKRTADGSEFESPKKKAKVE

SEQ ID NO: 792 - protein, 2092 aa, synthetic construct
MPAAKRVKLDGGDKKYSIGLDIGTNSVGWAVITDEYKVPSKKFKVLGNTDRHSIKKNLIGALLFDSGETAEATRLKRTARRRYTRRKNRICYLQEIFSNEMAKVDDSFFHRLEESFLVEEDKKHERHPIFGNIVDEVAYHEKYPTIYHLRKKLVDSTDKADLRLIYLALAHMIKFRGHFLIEGDLNPDNSDVDKLFIQLVQTYNQLFEENPINASGVDAKAILSARLSKSRRLENLIAQLPGEKKNGLFGNLIALSLGLTPNFKSNFDLAEDAKLQLSKDTYDDDLDNLLAQIGDQYADLFLAAKNLSDAILLSDILRVNTEITKAPLSASMIKRYDEHHQDLTLLKALVRQQLPEKYKEIFFDQSKNGYAGYIDGGASQEEFYKFIKPILEKMDGTEELLVKLNREDLLRKQRTFDNGSIPHQIHLGELHAILRRQEDFYPFLKDNREKIEKILTFRIPYYVGPLARGNSRFAWMTRKSEETITPWNFEEVVDKGASAQSFIERMTNFDKNLPNEKVLPKHSLLYEYFTVYNELTKVKYVTEGMRKPAFLSGEQKKAIVDLLFKTNRKVTVKQLKEDYFKKIECFDSVEISGVEDRFNASLGTYHDLLKIIKDKDFLDNEENEDILEDIVLTLTLFEDREMIEERLKTYAHLFDDKVMKQLKRRRYTGWGRLSRKLINGIRDKQSGKTILDFLKSDGFANRNFMQLIHDDSLTFKEDIQKAQVSGQGDSLHEHIANLAGSPAIKKGILQTVKVVDELVKVMGRHKPENIVIEMARENQTTQKGQKNSRERMKRIEEGIKELGSQILKEHPVENTQLQNEKLYLYYLQNGRDMYVDQELDINRLSDYDVDHIVPQSFLKDDSIDNKVLTRSDKARGKSDNVPSEEVVKKMKNYWRQLLNAKLITQRKFDNLTKAERGGLSELDKAGFIKRQLVETRQITKHVAQILDSRMNTKYDENDKLIREVKVITLKSKLVSDFRKDFQFYKVREINNYHHAHDAYLNAVVGTALIKKYPKLESEFVYGDYKVYDVRKMIAKSEQEIGKATAKYFFYSNIMNFFKTEITLANGEIRKRPLIETNGETGEIVWDKGRDFATVRKVLSMPQVNIVKKTEVQTGGFSKESILPKRNSDKLIARKKDWDPKKYGGFDSPTVAYSVLVVAKVEKGKSKKLKSVKELLGITIMERSSFEKNPIDFLEAKGYKEVKKDLIIKLPKYSLFELENGRKRMLASAGELQKGNELALPSKYVNFLYLASHYEKLKGSPEDNEQKQLFVEQHKHYLDEIIEQISEFSKRVILADANLDKVLSAYNKHRDKPIREQAENIIHLFTLTNLGAPAAFKYFDTTIDRKRYTSTKEVLDATLIHQSITGLYETRIDLSQLGGDGGGGSGGGGSSGGVLNLEEEYRLHEKPVPSSIDPSWLQLFPTVWAERAGMGLANQVPPVVVELRSGASPVAVRQYPMSKEAREGIRPHIQRFLDLGVLVPCQSPWNTPLLPVKKPGTNDYRPVQDLREINKRVQDIHPTVPNPYNLLSSLPPSHTWYSVLDLKDAFFCLKLHPNSQPLFAFEWRDPEKGNTGQLTWTRLPQGFKNSPTLFDEALHRDLAPFRALNPQVVLLQYVDDLLVAAPTYRDCKEGTQKLLQELSKLGYRVSAKKAQLCQKEVTYLGYLLKEGKRWLTPARKATVMKIPPPTTPRQVREFLGTAGFCRLWIPGFASLAAPLYPLTKESIPFIWTEEHQKAFDRIKEALLSAPALALPDLTKPFTLYVDERAGVARGVLTQTLGPWRRPVAYLSKKLDPVASGWPTCLKAVAAVALLLKDADKLTLGQNVTVIASHSLESIVRQPPDRWMTNARMTHYQSLLLNERVSFAPPAVLNPATLLPVESEATPVHRCSEILAEETGTRRDLKDQPLPGVPAWYTDGSSFIAEGKRRAGAAIVDGKRTVWASSLPEGTSAQKAELVALTQALRLAEGKDINIYTDSRYAFATAHIHGAIYKQRGLLTSAGKDIKNKEEILALLEAIHLPKRVAIIHCPGHQKGNDPVATGNRRADEAAKQAALSTRVLAETTKPAGKRTADGSEFEKRTADGSEFESPKKKAKVE

SEQ ID NO: 793 - protein, 2094 aa, synthetic construct
MPAAKRVKLDGGDKKYSIGLDIGTNSVGWAVITDEYKVPSKKFKVLGNTDRHSIKKNLIGALLFDSGETAEATRLKRTARRRYTRRKNRICYLQEIFSNEMAKVDDSFFHRLEESFLVEEDKKHERHPIFGNIVDEVAYHEKYPTIYHLRKKLVDSTDKADLRLIYLALAHMIKFRGHFLIEGDLNPDNSDVDKLFIQLVQTYNQLFEENPINASGVDAKAILSARLSKSRRLENLIAQLPGEKKNGLFGNLIALSLGLTPNFKSNFDLAEDAKLQLSKDTYDDDLDNLLAQIGDQYADLFLAAKNLSDAILLSDILRVNTEITKAPLSASMIKRYDEHHQDLTLLKALVRQQLPEKYKEIFFDQSKNGYAGYIDGGASQEEFYKFIKPILEKMDGTEELLVKLNREDLLRKQRTFDNGSIPHQIHLGELHAILRRQEDFYPFLKDNREKIEKILTFRIPYYVGPLARGNSRFAWMTRKSEETITPWNFEEVVDKGASAQSFIERMTNFDKNLPNEKVLPKHSLLYEYFTVYNELTKVKYVTEGMRKPAFLSGEQKKAIVDLLFKTNRKVTVKQLKEDYFKKIECFDSVEISGVEDRFNASLGTYHDLLKIIKDKDFLDNEENEDILEDIVLTLTLFEDREMIEERLKTYAHLFDDKVMKQLKRRRYTGWGRLSRKLINGIRDKQSGKTILDFLKSDGFANRNFMQLIHDDSLTFKEDIQKAQVSGQGDSLHEHIANLAGSPAIKKGILQTVKVVDELVKVMGRHKPENIVIEMARENQTTQKGQKNSRERMKRIEEGIKELGSQILKEHPVENTQLQNEKLYLYYLQNGRDMYVDQELDINRLSDYDVDHIVPQSFLKDDSIDNKVLTRSDKARGKSDNVPSEEVVKKMKNYWRQLLNAKLITQRKFDNLTKAERGGLSELDKAGFIKRQLVETRQITKHVAQILDSRMNTKYDENDKLIREVKVITLKSKLVSDFRKDFQFYKVREINNYHHAHDAYLNAVVGTALIKKYPKLESEFVYGDYKVYDVRKMIAKSEQEIGKATAKYFFYSNIMNFFKTEITLANGEIRKRPLIETNGETGEIVWDKGRDFATVRKVLSMPQVNIVKKTEVQTGGFSKESILPKRNSDKLIARKKDWDPKKYGGFDSPTVAYSVLVVAKVEKGKSKKLKSVKELLGITIMERSSFEKNPIDFLEAKGYKEVKKDLIIKLPKYSLFELENGRKRMLASAGELQKGNELALPSKYVNFLYLASHYEKLKGSPEDNEQKQLFVEQHKHYLDEIIEQISEFSKRVILADANLDKVLSAYNKHRDKPIREQAENIIHLFTLTNLGAPAAFKYFDTTIDRKRYTSTKEVLDATLIHQSITGLYETRIDLSQLGGDGGPAPGSSEAAAKGGVLNLEEEYRLHEKPVPSSIDPSWLQLFPTVWAERAGMGLANQVPPVVVELRSGASPVAVRQYPMSKEAREGIRPHIQRFLDLGVLVPCQSPWNTPLLPVKKPGTNDYRPVQDLREINKRVQDIHPTVPNPYNLLSSLPPSHTWYSVLDLKDAFFCLKLHPNSQPLFAFEWRDPEKGNTGQLTWTRLPQGFKNSPTLFDEALHRDLAPFRALNPQVVLLQYVDDLLVAAPTYRDCKEGTQKLLQELSKLGYRVSAKKAQLCQKEVTYLGYLLKEGKRWLTPARKATVMKIPPPTTPRQVREFLGTAGFCRLWIPGFASLAAPLYPLTKESIPFIWTEEHQKAFDRIKEALLSAPALALPDLTKPFTLYVDERAGVARGVLTQTLGPWRRPVAYLSKKLDPVASGWPTCLKAVAAVALLLKDADKLTLGQNVTVIASHSLESIVRQPPDRWMTNARMTHYQSLLLNERVSFAPPAVLNPATLLPVESEATPVHRCSEILAEETGTRRDLKDQPLPGVPAWYTDGSSFIAEGKRRAGAAIVDGKRTVWASSLPEGTSAQKAELVALTQALRLAEGKDINIYTDSRYAFATAHIHGAIYKQRGLLTSAGKDIKNKEEILALLEAIHLPKRVAIIHCPGHQKGNDPVATGNRRADEAAKQAALSTRVLAETTKPAGKRTADGSEFEKRTADGSEFESPKKKAKVE

SEQ ID NO: 794 - protein, 2092 aa, synthetic construct
MPAAKRVKLDGGDKKYSIGLDIGTNSVGWAVITDEYKVPSKKFKVLGNTDRHSIKKNLIGALLFDSGETAEATRLKRTARRRYTRRKNRICYLQEIFSNEMAKVDDSFFHRLEESFLVEEDKKHERHPIFGNIVDEVAYHEKYPTIYHLRKKLVDSTDKADLRLIYLALAHMIKFRGHFLIEGDLNPDNSDVDKLFIQLVQTYNQLFEENPINASGVDAKAILSARLSKSRRLENLIAQLPGEKKNGLFGNLIALSLGLTPNFKSNFDLAEDAKLQLSKDTYDDDLDNLLAQIGDQYADLFLAAKNLSDAILLSDILRVNTEITKAPLSASMIKRYDEHHQDLTLLKALVRQQLPEKYKEIFFDQSKNGYAGYIDGGASQEEFYKFIKPILEKMDGTEELLVKLNREDLLRKQRTFDNGSIPHQIHLGELHAILRRQEDFYPFLKDNREKIEKILTFRIPYYVGPLARGNSRFAWMTRKSEETITPWNFEEVVDKGASAQSFIERMTNFDKNLPNEKVLPKHSLLYEYFTVYNELTKVKYVTEGMRKPAFLSGEQKKAIVDLLFKTNRKVTVKQLKEDYFKKIECFDSVEISGVEDRFNASLGTYHDLLKIIKDKDFLDNEENEDILEDIVLTLTLFEDREMIEERLKTYAHLFDDKVMKQLKRRRYTGWGRLSRKLINGIRDKQSGKTILDFLKSDGFANRNFMQLIHDDSLTFKEDIQKAQVSGQGDSLHEHIANLAGSPAIKKGILQTVKVVDELVKVMGRHKPENIVIEMARENQTTQKGQKNSRERMKRIEEGIKELGSQILKEHPVENTQLQNEKLYLYYLQNGRDMYVDQELDINRLSDYDVDHIVPQSFLKDDSIDNKVLTRSDKARGKSDNVPSEEVVKKMKNYWRQLLNAKLITQRKFDNLTKAERGGLSELDKAGFIKRQLVETRQITKHVAQILDSRMNTKYDENDKLIREVKVITLKSKLVSDFRKDFQFYKVREINNYHHAHDAYLNAVVGTALIKKYPKLESEFVYGDYKVYDVRKMIAKSEQEIGKATAKYFFYSNIMNFFKTEITLANGEIRKRPLIETNGETGEIVWDKGRDFATVRKVLSMPQVNIVKKTEVQTGGFSKESILPKRNSDKLIARKKDWDPKKYGGFDSPTVAYSVLVVAKVEKGKSKKLKSVKELLGITIMERSSFEKNPIDFLEAKGYKEVKKDLIIKLPKYSLFELENGRKRMLASAGELQKGNELALPSKYVNFLYLASHYEKLKGSPEDNEQKQLFVEQHKHYLDEIIEQISEFSKRVILADANLDKVLSAYNKHRDKPIREQAENIIHLFTLTNLGAPAAFKYFDTTIDRKRYTSTKEVLDATLIHQSITGLYETRIDLSQLGGDGGGGSGSSPAPGGVLNLEEEYRLHEKPVPSSIDPSWLQLFPTVWAERAGMGLANQVPPVVVELRSGASPVAVRQYPMSKEAREGIRPHIQRFLDLGVLVPCQSPWNTPLLPVKKPGTNDYRPVQDLREINKRVQDIHPTVPNPYNLLSSLPPSHTWYSVLDLKDAFFCLKLHPNSQPLFAFEWRDPEKGNTGQLTWTRLPQGFKNSPTLFDEALHRDLAPFRALNPQVVLLQYVDDLLVAAPTYRDCKEGTQKLLQELSKLGYRVSAKKAQLCQKEVTYLGYLLKEGKRWLTPARKATVMKIPPPTTPRQVREFLGTAGFCRLWIPGFASLAAPLYPLTKESIPFIWTEEHQKAFDRIKEALLSAPALALPDLTKPFTLYVDERAGVARGVLTQTLGPWRRPVAYLSKKLDPVASGWPTCLKAVAAVALLLKDADKLTLGQNVTVIASHSLESIVRQPPDRWMTNARMTHYQSLLLNERVSFAPPAVLNPATLLPVESEATPVHRCSEILAEETGTRRDLKDQPLPGVPAWYTDGSSFIAEGKRRAGAAIVDGKRTVWASSLPEGTSAQKAELVALTQALRLAEGKDINIYTDSRYAFATAHIHGAIYKQRGLLTSAGKDIKNKEEILALLEAIHLPKRVAIIHCPGHQKGNDPVATGNRRADEAAKQAALSTRVLAETTKPAGKRTADGSEFEKRTADGSEFESPKKKAKVE

SEQ ID NO: 795 - protein, 2096 aa, synthetic construct
MPAAKRVKLDGGDKKYSIGLDIGTNSVGWAVITDEYKVPSKKFKVLGNTDRHSIKKNLIGALLFDSGETAEATRLKRTARRRYTRRKNRICYLQEIFSNEMAKVDDSFFHRLEESFLVEEDKKHERHPIFGNIVDEVAYHEKYPTIYHLRKKLVDSTDKADLRLIYLALAHMIKFRGHFLIEGDLNPDNSDVDKLFIQLVQTYNQLFEENPINASGVDAKAILSARLSKSRRLENLIAQLPGEKKNGLFGNLIALSLGLTPNFKSNFDLAEDAKLQLSKDTYDDDLDNLLAQIGDQYADLFLAAKNLSDAILLSDILRVNTEITKAPLSASMIKRYDEHHQDLTLLKALVRQQLPEKYKEIFFDQSKNGYAGYIDGGASQEEFYKFIKPILEKMDGTEELLVKLNREDLLRKQRTFDNGSIPHQIHLGELHAILRRQEDFYPFLKDNREKIEKILTFRIPYYVGPLARGNSRFAWMTRKSEETITPWNFEEVVDKGASAQSFIERMTNFDKNLPNEKVLPKHSLLYEYFTVYNELTKVKYVTEGMRKPAFLSGEQKKAIVDLLFKTNRKVTVKQLKEDYFKKIECFDSVEISGVEDRFNASLGTYHDLLKIIKDKDFLDNEENEDILEDIVLTLTLFEDREMIEERLKTYAHLFDDKVMKQLKRRRYTGWGRLSRKLINGIRDKQSGKTILDFLKSDGFANRNFMQLIHDDSLTFKEDIQKAQVSGQGDSLHEHIANLAGSPAIKKGILQTVKVVDELVKVMGRHKPENIVIEMARENQTTQKGQKNSRERMKRIEEGIKELGSQILKEHPVENTQLQNEKLYLYYLQNGRDMYVDQELDINRLSDYDVDHIVPQSFLKDDSIDNKVLTRSDKARGKSDNVPSEEVVKKMKNYWRQLLNAKLITQRKFDNLTKAERGGLSELDKAGFIKRQLVETRQITKHVAQILDSRMNTKYDENDKLIREVKVITLKSKLVSDFRKDFQFYKVREINNYHHAHDAYLNAVVGTALIKKYPKLESEFVYGDYKVYDVRKMIAKSEQEIGKATAKYFFYSNIMNFFKTEITLANGEIRKRPLIETNGETGEIVWDKGRDFATVRKVLSMPQVNIVKKTEVQTGGFSKESILPKRNSDKLIARKKDWDPKKYGGFDSPTVAYSVLVVAKVEKGKSKKLKSVKELLGITIMERSSFEKNPIDFLEAKGYKEVKKDLIIKLPKYSLFELENGRKRMLASAGELQKGNELALPSKYVNFLYLASHYEKLKGSPEDNEQKQLFVEQHKHYLDEIIEQISEFSKRVILADANLDKVLSAYNKHRDKPIREQAENIIHLFTLTNLGAPAAFKYFDTTIDRKRYTSTKEVLDATLIHQSITGLYETRIDLSQLGGDGGPAPAPAPAPAPAPGGVLNLEEEYRLHEKPVPSSIDPSWLQLFPTVWAERAGMGLANQVPPVVVELRSGASPVAVRQYPMSKEAREGIRPHIQRFLDLGVLVPCQSPWNTPLLPVKKPGTNDYRPVQDLREINKRVQDIHPTVPNPYNLLSSLPPSHTWYSVLDLKDAFFCLKLHPNSQPLFAFEWRDPEKGNTGQLTWTRLPQGFKNSPTLFDEALHRDLAPFRALNPQVVLLQYVDDLLVAAPTYRDCKEGTQKLLQELSKLGYRVSAKKAQLCQKEVTYLGYLLKEGKRWLTPARKATVMKIPPPTTPRQVREFLGTAGFCRLWIPGFASLAAPLYPLTKESIPFIWTEEHQKAFDRIKEALLSAPALALPDLTKPFTLYVDERAGVARGVLTQTLGPWRRPVAYLSKKLDPVASGWPTCLKAVAAVALLLKDADKLTLGQNVTVIASHSLESIVRQPPDRWMTNARMTHYQSLLLNERVSFAPPAVLNPATLLPVESEATPVHRCSEILAEETGTRRDLKDQPLPGVPAWYTDGSSFIAEGKRRAGAAIVDGKRTVWASSLPEGTSAQKAELVALTQALRLAEGKDINIYTDSRYAFATAHIHGAIYKQRGLLTSAGKDIKNKEEILALLEAIHLPKRVAIIHCPGHQKGNDPVATGNRRADEAAKQAALSTRVLAETTKPAGKRTADGSEFEKRTADGSEFESPKKKAKVE

SEQ ID NO: 796 - protein, 2094 aa, synthetic construct
MPAAKRVKLDGGDKKYSIGLDIGTNSVGWAVITDEYKVPSKKFKVLGNTDRHSIKKNLIGALLFDSGETAEATRLKRTARRRYTRRKNRICYLQEIFSNEMAKVDDSFFHRLEESFLVEEDKKHERHPIFGNIVDEVAYHEKYPTIYHLRKKLVDSTDKADLRLIYLALAHMIKFRGHFLIEGDLNPDNSDVDKLFIQLVQTYNQLFEENPINASGVDAKAILSARLSKSRRLENLIAQLPGEKKNGLFGNLIALSLGLTPNFKSNFDLAEDAKLQLSKDTYDDDLDNLLAQIGDQYADLFLAAKNLSDAILLSDILRVNTEITKAPLSASMIKRYDEHHQDLTLLKALVRQQLPEKYKEIFFDQSKNGYAGYIDGGASQEEFYKFIKPILEKMDGTEELLVKLNREDLLRKQRTFDNGSIPHQIHLGELHAILRRQEDFYPFLKDNREKIEKILTFRIPYYVGPLARGNSRFAWMTRKSEETITPWNFEEVVDKGASAQSFIERMTNFDKNLPNEKVLPKHSLLYEYFTVYNELTKVKYVTEGMRKPAFLSGEQKKAIVDLLFKTNRKVTVKQLKEDYFKKIECFDSVEISGVEDRFNASLGTYHDLLKIIKDKDFLDNEENEDILEDIVLTLTLFEDREMIEERLKTYAHLFDDKVMKQLKRRRYTGWGRLSRKLINGIRDKQSGKTILDFLKSDGFANRNFMQLIHDDSLTFKEDIQKAQVSGQGDSLHEHIANLAGSPAIKKGILQTVKVVDELVKVMGRHKPENIVIEMARENQTTQKGQKNSRERMKRIEEGIKELGSQILKEHPVENTQLQNEKLYLYYLQNGRDMYVDQELDINRLSDYDVDHIVPQSFLKDDSIDNKVLTRSDKARGKSDNVPSEEVVKKMKNYWRQLLNAKLITQRKFDNLTKAERGGLSELDKAGFIKRQLVETRQITKHVAQILDSRMNTKYDENDKLIREVKVITLKSKLVSDFRKDFQFYKVREINNYHHAHDAYLNAVVGTALIKKYPKLESEFVYGDYKVYDVRKMIAKSEQEIGKATAKYFFYSNIMNFFKTEITLANGEIRKRPLIETNGETGEIVWDKGRDFATVRKVLSMPQVNIVKKTEVQTGGFSKESILPKRNSDKLIARKKDWDPKKYGGFDSPTVAYSVLVVAKVEKGKSKKLKSVKELLGITIMERSSFEKNPIDFLEAKGYKEVKKDLIIKLPKYSLFELENGRKRMLASAGELQKGNELALPSKYVNFLYLASHYEKLKGSPEDNEQKQLFVEQHKHYLDEIIEQISEFSKRVILADANLDKVLSAYNKHRDKPIREQAENIIHLFTLTNLGAPAAFKYFDTTIDRKRYTSTKEVLDATLIHQSITGLYETRIDLSQLGGDGGGGSGGGEAAAKGGVLNLEEEYRLHEKPVPSSIDPSWLQLFPTVWAERAGMGLANQVPPVVVELRSGASPVAVRQYPMSKEAREGIRPHIQRFLDLGVLVPCQSPWNTPLLPVKKPGTNDYRPVQDLREINKRVQDIHPTVPNPYNLLSSLPPSHTWYSVLDLKDAFFCLKLHPNSQPLFAFEWRDPEKGNTGQLTWTRLPQGFKNSPTLFDEALHRDLAPFRALNPQVVLLQYVDDLLVAAPTYRDCKEGTQKLLQELSKLGYRVSAKKAQLCQKEVTYLGYLLKEGKRWLTPARKATVMKIPPPTTPRQVREFLGTAGFCRLWIPGFASLAAPLYPLTKESIPFIWTEEHQKAFDRIKEALLSAPALALPDLTKPFTLYVDERAGVARGVLTQTLGPWRRPVAYLSKKLDPVASGWPTCLKAVAAVALLLKDADKLTLGQNVTVIASHSLESIVRQPPDRWMTNARMTHYQSLLLNERVSFAPPAVLNPATLLPVESEATPVHRCSEILAEETGTRRDLKDQPLPGVPAWYTDGSSFIAEGKRRAGAAIVDGKRTVWASSLPEGTSAQKAELVALTQALRLAEGKDINIYTDSRYAFATAHIHGAIYKQRGLLTSAGKDIKNKEEILALLEAIHLPKRVAIIHCPGHQKGNDPVATGNRRADEAAKQAALSTRVLAETTKPAGKRTADGSEFEKRTADGSEFESPKKKAKVE

SEQ ID NO: 797 - protein, 2092 aa, synthetic construct
MPAAKRVKLDGGDKKYSIGLDIGTNSVGWAVITDEYKVPSKKFKVLGNTDRHSIKKNLIGALLFDSGETAEATRLKRTARRRYTRRKNRICYLQEIFSNEMAKVDDSFFHRLEESFLVEEDKKHERHPIFGNIVDEVAYHEKYPTIYHLRKKLVDSTDKADLRLIYLALAHMIKFRGHFLIEGDLNPDNSDVDKLFIQLVQTYNQLFEENPINASGVDAKAILSARLSKSRRLENLIAQLPGEKKNGLFGNLIALSLGLTPNFKSNFDLAEDAKLQLSKDTYDDDLDNLLAQIGDQYADLFLAAKNLSDAILLSDILRVNTEITKAPLSASMIKRYDEHHQDLTLLKALVRQQLPEKYKEIFFDQSKNGYAGYIDGGASQEEFYKFIKPILEKMDGTEELLVKLNREDLLRKQRTFDNGSIPHQIHLGELHAILRRQEDFYPFLKDNREKIEKILTFRIPYYVGPLARGNSRFAWMTRKSEETITPWNFEEVVDKGASAQSFIERMTNFDKNLPNEKVLPKHSLLYEYFTVYNELTKVKYVTEGMRKPAFLSGEQKKAIVDLLFKTNRKVTVKQLKEDYFKKIECFDSVEISGVEDRFNASLGTYHDLLKIIKDKDFLDNEENEDILEDIVLTLTLFEDREMIEERLKTYAHLFDDKVMKQLKRRRYTGWGRLSRKLINGIRDKQSGKTILDFLKSDGFANRNFMQLIHDDSLTFKEDIQKAQVSGQGDSLHEHIANLAGSPAIKKGILQTVKVVDELVKVMGRHKPENIVIEMARENQTTQKGQKNSRERMKRIEEGIKELGSQILKEHPVENTQLQNEKLYLYYLQNGRDMYVDQELDINRLSDYDVDHIVPQSFLKDDSIDNKVLTRSDKARGKSDNVPSEEVVKKMKNYWRQLLNAKLITQRKFDNLTKAERGGLSELDKAGFIKRQLVETRQITKHVAQILDSRMNTKYDENDKLIREVKVITLKSKLVSDFRKDFQFYKVREINNYHHAHDAYLNAVVGTALIKKYPKLESEFVYGDYKVYDVRKMIAKSEQEIGKATAKYFFYSNIMNFFKTEITLANGEIRKRPLIETNGETGEIVWDKGRDFATVRKVLSMPQVNIVKKTEVQTGGFSKESILPKRNSDKLIARKKDWDPKKYGGFDSPTVAYSVLVVAKVEKGKSKKLKSVKELLGITIMERSSFEKNPIDFLEAKGYKEVKKDLIIKLPKYSLFELENGRKRMLASAGELQKGNELALPSKYVNFLYLASHYEKLKGSPEDNEQKQLFVEQHKHYLDEIIEQISEFSKRVILADANLDKVLSAYNKHRDKPIREQAENIIHLFTLTNLGAPAAFKYFDTTIDRKRYTSTKEVLDATLIHQSITGLYETRIDLSQLGGDGGGGGPAPGSSGGVLNLEEEYRLHEKPVPSSIDPSWLQLFPTVWAERAGMGLANQVPPVVVELRSGASPVAVRQYPMSKEAREGIRPHIQRFLDLGVLVPCQSPWNTPLLPVKKPGTNDYRPVQDLREINKRVQDIHPTVPNPYNLLSSLPPSHTWYSVLDLKDAFFCLKLHPNSQPLFAFEWRDPEKGNTGQLTWTRLPQGFKNSPTLFDEALHRDLAPFRALNPQVVLLQYVDDLLVAAPTYRDCKEGTQKLLQELSKLGYRVSAKKAQLCQKEVTYLGYLLKEGKRWLTPARKATVMKIPPPTTPRQVREFLGTAGFCRLWIPGFASLAAPLYPLTKESIPFIWTEEHQKAFDRIKEALLSAPALALPDLTKPFTLYVDERAGVARGVLTQTLGPWRRPVAYLSKKLDPVASGWPTCLKAVAAVALLLKDADKLTLGQNVTVIASHSLESIVRQPPDRWMTNARMTHYQSLLLNERVSFAPPAVLNPATLLPVESEATPVHRCSEILAEETGTRRDLKDQPLPGVPAWYTDGSSFIAEGKRRAGAAIVDGKRTVWASSLPEGTSAQKAELVALTQALRLAEGKDINIYTDSRYAFATAHIHGAIYKQRGLLTSAGKDIKNKEEILALLEAIHLPKRVAIIHCPGHQKGNDPVATGNRRADEAAKQAALSTRVLAETTKPAGKRTADGSEFEKRTADGSEFESPKKKAKVE

SEQ ID NO: 798 - protein, 2094 aa, synthetic construct
MPAAKRVKLDGGDKKYSIGLDIGTNSVGWAVITDEYKVPSKKFKVLGNTDRHSIKKNLIGALLFDSGETAEATRLKRTARRRYTRRKNRICYLQEIFSNEMAKVDDSFFHRLEESFLVEEDKKHERHPIFGNIVDEVAYHEKYPTIYHLRKKLVDSTDKADLRLIYLALAHMIKFRGHFLIEGDLNPDNSDVDKLFIQLVQTYNQLFEENPINASGVDAKAILSARLSKSRRLENLIAQLPGEKKNGLFGNLIALSLGLTPNFKSNFDLAEDAKLQLSKDTYDDDLDNLLAQIGDQYADLFLAAKNLSDAILLSDILRVNTEITKAPLSASMIKRYDEHHQDLTLLKALVRQQLPEKYKEIFFDQSKNGYAGYIDGGASQEEFYKFIKPILEKMDGTEELLVKLNREDLLRKQRTFDNGSIPHQIHLGELHAILRRQEDFYPFLKDNREKIEKILTFRIPYYVGPLARGNSRFAWMTRKSEETITPWNFEEVVDKGASAQSFIERMTNFDKNLPNEKVLPKHSLLYEYFTVYNELTKVKYVTEGMRKPAFLSGEQKKAIVDLLFKTNRKVTVKQLKEDYFKKIECFDSVEISGVEDRFNASLGTYHDLLKIIKDKDFLDNEENEDILEDIVLTLTLFEDREMIEERLKTYAHLFDDKVMKQLKRRRYTGWGRLSRKLINGIRDKQSGKTILDFLKSDGFANRNFMQLIHDDSLTFKEDIQKAQVSGQGDSLHEHIANLAGSPAIKKGILQTVKVVDELVKVMGRHKPENIVIEMARENQTTQKGQKNSRERMKRIEEGIKELGSQILKEHPVENTQLQNEKLYLYYLQNGRDMYVDQELDINRLSDYDVDHIVPQSFLKDDSIDNKVLTRSDKARGKSDNVPSEEVVKKMKNYWRQLLNAKLITQRKFDNLTKAERGGLSELDKAGFIKRQLVETRQITKHVAQILDSRMNTKYDENDKLIREVKVITLKSKLVSDFRKDFQFYKVREINNYHHAHDAYLNAVVGTALIKKYPKLESEFVYGDYKVYDVRKMIAKSEQEIGKATAKYFFYSNIMNFFKTEITLANGEIRKRPLIETNGETGEIVWDKGRDFATVRKVLSMPQVNIVKKTEVQTGGFSKESILPKRNSDKLIARKKDWDPKKYGGFDSPTVAYSVLVVAKVEKGKSKKLKSVKELLGITIMERSSFEKNPIDFLEAKGYKEVKKDLIIKLPKYSLFELENGRKRMLASAGELQKGNELALPSKYVNFLYLASHYEKLKGSPEDNEQKQLFVEQHKHYLDEIIEQISEFSKRVILADANLDKVLSAYNKHRDKPIREQAENIIHLFTLTNLGAPAAFKYFDTTIDRKRYTSTKEVLDATLIHQSITGLYETRIDLSQLGGDGGGGGGGSEAAAKGGVLNLEEEYRLHEKPVPSSIDPSWLQLFPTVWAERAGMGLANQVPPVVVELRSGASPVAVRQYPMSKEAREGIRPHIQRFLDLGVLVPCQSPWNTPLLPVKKPGTNDYRPVQDLREINKRVQDIHPTVPNPYNLLSSLPPSHTWYSVLDLKDAFFCLKLHPNSQPLFAFEWRDPEKGNTGQLTWTRLPQGFKNSPTLFDEALHRDLAPFRALNPQVVLLQYVDDLLVAAPTYRDCKEGTQKLLQELSKLGYRVSAKKAQLCQKEVTYLGYLLKEGKRWLTPARKATVMKIPPPTTPRQVREFLGTAGFCRLWIPGFASLAAPLYPLTKESIPFIWTEEHQKAFDRIKEALLSAPALALPDLTKPFTLYVDERAGVARGVLTQTLGPWRRPVAYLSKKLDPVASGWPTCLKAVAAVALLLKDADKLTLGQNVTVIASHSLESIVRQPPDRWMTNARMTHYQSLLLNERVSFAPPAVLNPATLLPVESEATPVHRCSEILAEETGTRRDLKDQPLPGVPAWYTDGSSFIAEGKRRAGAAIVDGKRTVWASSLPEGTSAQKAELVALTQALRLAEGKDINIYTDSRYAFATAHIHGAIYKQRGLLTSAGKDIKNKEEILALLEAIHLPKRVAIIHCPGHQKGNDPVATGNRRADEAAKQAALSTRVLAETTKPAGKRTADGSEFEKRTADGSEFESPKKKAKVE

SEQ ID NO: 799 - protein, 2108 aa, synthetic construct
MPAAKRVKLDGGDKKYSIGLDIGTNSVGWAVITDEYKVPSKKFKVLGNTDRHSIKKNLIGALLFDSGETAEATRLKRTARRRYTRRKNRICYLQEIFSNEMAKVDDSFFHRLEESFLVEEDKKHERHPIFGNIVDEVAYHEKYPTIYHLRKKLVDSTDKADLRLIYLALAHMIKFRGHFLIEGDLNPDNSDVDKLFIQLVQTYNQLFEENPINASGVDAKAILSARLSKSRRLENLIAQLPGEKKNGLFGNLIALSLGLTPNFKSNFDLAEDAKLQLSKDTYDDDLDNLLAQIGDQYADLFLAAKNLSDAILLSDILRVNTEITKAPLSASMIKRYDEHHQDLTLLKALVRQQLPEKYKEIFFDQSKNGYAGYIDGGASQEEFYKFIKPILEKMDGTEELLVKLNREDLLRKQRTFDNGSIPHQIHLGELHAILRRQEDFYPFLKDNREKIEKILTFRIPYYVGPLARGNSRFAWMTRKSEETITPWNFEEVVDKGASAQSFIERMTNFDKNLPNEKVLPKHSLLYEYFTVYNELTKVKYVTEGMRKPAFLSGEQKKAIVDLLFKTNRKVTVKQLKEDYFKKIECFDSVEISGVEDRFNASLGTYHDLLKIIKDKDFLDNEENEDILEDIVLTLTLFEDREMIEERLKTYAHLFDDKVMKQLKRRRYTGWGRLSRKLINGIRDKQSGKTILDFLKSDGFANRNFMQLIHDDSLTFKEDIQKAQVSGQGDSLHEHIANLAGSPAIKKGILQTVKVVDELVKVMGRHKPENIVIEMARENQTTQKGQKNSRERMKRIEEGIKELGSQILKEHPVENTQLQNEKLYLYYLQNGRDMYVDQELDINRLSDYDVDHIVPQSFLKDDSIDNKVLTRSDKARGKSDNVPSEEVVKKMKNYWRQLLNAKLITQRKFDNLTKAERGGLSELDKAGFIKRQLVETRQITKHVAQILDSRMNTKYDENDKLIREVKVITLKSKLVSDFRKDFQFYKVREINNYHHAHDAYLNAVVGTALIKKYPKLESEFVYGDYKVYDVRKMIAKSEQEIGKATAKYFFYSNIMNFFKTEITLANGEIRKRPLIETNGETGEIVWDKGRDFATVRKVLSMPQVNIVKKTEVQTGGFSKESILPKRNSDKLIARKKDWDPKKYGGFDSPTVAYSVLVVAKVEKGKSKKLKSVKELLGITIMERSSFEKNPIDFLEAKGYKEVKKDLIIKLPKYSLFELENGRKRMLASAGELQKGNELALPSKYVNFLYLASHYEKLKGSPEDNEQKQLFVEQHKHYLDEIIEQISEFSKRVILADANLDKVLSAYNKHRDKPIREQAENIIHLFTLTNLGAPAAFKYFDTTIDRKRYTSTKEVLDATLIHQSITGLYETRIDLSQLGGDGGEAAAKEAAAKEAAAKEAAAKEAAAKGGVLNLEEEYRLHEKPVPSSIDPSWLQLFPTVWAERAGMGLANQVPPVVVELRSGASPVAVRQYPMSKEAREGIRPHIQRFLDLGVLVPCQSPWNTPLLPVKKPGTNDYRPVQDLREINKRVQDIHPTVPNPYNLLSSLPPSHTWYSVLDLKDAFFCLKLHPNSQPLFAFEWRDPEKGNTGQLTWTRLPQGFKNSPTLFNEALHRDLAPFRALNPQVVLLQYVDDLLVAAPTYRDCKEGTQKLLQELSKLGYRVSAKKAQLCQKEVTYLGYLLKEGKRWLTPARKATVMKIPPPTTPRQVREFLGTAGFCRLWIPGFASLAAPLYPLTKPSIPFIWTEEHQKAFDRIKEALLSAPALALPDLTKPFTLYVDERAGVARGVLTQTLGPWRRPVAYLSKKLDPVASGWPTCLKAVAAVALLLKDADKLTLGQNVTVIASHSLESIVRQPPDRWMTNARMTHYQSLLLNERVSFAPPAVLNPATLLPVESEATPVHRCSEILAEETGTRRDLKDQPLPGVPAWYTDGSSFIAEGKRRAGAAIVDGKRTVWASSLPEGTSAQKAELVALTQALRLAEGKDINIYTDSRYAFATAHIHGAIYKQRGWLTSAGKDIKNKEEILALLEAIHLPKRVAIIHCPGHQKGNDPVATGNRRADEAAKQAALSTRVLAETTKPAGKRTADGSEFEKRTADGSEFESPKKKAKVE

SEQ ID NO: 800 - protein, 2094 aa, synthetic construct
MPAAKRVKLDGGDKKYSIGLDIGTNSVGWAVITDEYKVPSKKFKVLGNTDRHSIKKNLIGALLFDSGETAEATRLKRTARRRYTRRKNRICYLQEIFSNEMAKVDDSFFHRLEESFLVEEDKKHERHPIFGNIVDEVAYHEKYPTIYHLRKKLVDSTDKADLRLIYLALAHMIKFRGHFLIEGDLNPDNSDVDKLFIQLVQTYNQLFEENPINASGVDAKAILSARLSKSRRLENLIAQLPGEKKNGLFGNLIALSLGLTPNFKSNFDLAEDAKLQLSKDTYDDDLDNLLAQIGDQYADLFLAAKNLSDAILLSDILRVNTEITKAPLSASMIKRYDEHHQDLTLLKALVRQQLPEKYKEIFFDQSKNGYAGYIDGGASQEEFYKFIKPILEKMDGTEELLVKLNREDLLRKQRTFDNGSIPHQIHLGELHAILRRQEDFYPFLKDNREKIEKILTFRIPYYVGPLARGNSRFAWMTRKSEETITPWNFEEVVDKGASAQSFIERMTNFDKNLPNEKVLPKHSLLYEYFTVYNELTKVKYVTEGMRKPAFLSGEQKKAIVDLLFKTNRKVTVKQLKEDYFKKIECFDSVEISGVEDRFNASLGTYHDLLKIIKDKDFLDNEENEDILEDIVLTLTLFEDREMIEERLKTYAHLFDDKVMKQLKRRRYTGWGRLSRKLINGIRDKQSGKTILDFLKSDGFANRNFMQLIHDDSLTFKEDIQKAQVSGQGDSLHEHIANLAGSPAIKKGILQTVKVVDELVKVMGRHKPENIVIEMARENQTTQKGQKNSRERMKRIEEGIKELGSQILKEHPVENTQLQNEKLYLYYLQNGRDMYVDQELDINRLSDYDVDHIVPQSFLKDDSIDNKVLTRSDKARGKSDNVPSEEVVKKMKNYWRQLLNAKLITQRKFDNLTKAERGGLSELDKAGFIKRQLVETRQITKHVAQILDSRMNTKYDENDKLIREVKVITLKSKLVSDFRKDFQFYKVREINNYHHAHDAYLNAVVGTALIKKYPKLESEFVYGDYKVYDVRKMIAKSEQEIGKATAKYFFYSNIMNFFKTEITLANGEIRKRPLIETNGETGEIVWDKGRDFATVRKVLSMPQVNIVKKTEVQTGGFSKESILPKRNSDKLIARKKDWDPKKYGGFDSPTVAYSVLVVAKVEKGKSKKLKSVKELLGITIMERSSFEKNPIDFLEAKGYKEVKKDLIIKLPKYSLFELENGRKRMLASAGELQKGNELALPSKYVNFLYLASHYEKLKGSPEDNEQKQLFVEQHKHYLDEIIEQISEFSKRVILADANLDKVLSAYNKHRDKPIREQAENIIHLFTLTNLGAPAAFKYFDTTIDRKRYTSTKEVLDATLIHQSITGLYETRIDLSQLGGDGGGGGGGSEAAAKGGVLNLEEEYRLHEKPVPSSIDPSWLQLFPTVWAERAGMGLANQVPPVVVELRSGASPVAVRQYPMSKEAREGIRPHIQRFLDLGVLVPCQSPWNTPLLPVKKPGTNDYRPVQDLREINKRVQDIHPTVPNPYNLLSSLPPSHTWYSVLDLKDAFFCLKLHPNSQPLFAFEWRDPEKGNTGQLTWTRLPQGFKNSPTLFNEALHRDLAPFRALNPQVVLLQYVDDLLVAAPTYRDCKEGTQKLLQELSKLGYRVSAKKAQLCQKEVTYLGYLLKEGKRWLTPARKATVMKIPPPTTPRQVREFLGTAGFCRLWIPGFASLAAPLYPLTKPSIPFIWTEEHQKAFDRIKEALLSAPALALPDLTKPFTLYVDERAGVARGVLTQTLGPWRRPVAYLSKKLDPVASGWPTCLKAVAAVALLLKDADKLTLGQNVTVIASHSLESIVRQPPDRWMTNARMTHYQSLLLNERVSFAPPAVLNPATLLPVESEATPVHRCSEILAEETGTRRDLKDQPLPGVPAWYTDGSSFIAEGKRRAGAAIVDGKRTVWASSLPEGTSAQKAELVALTQALRLAEGKDINIYTDSRYAFATAHIHGAIYKQRGWLTSAGKDIKNKEEILALLEAIHLPKRVAIIHCPGHQKGNDPVATGNRRADEAAKQAALSTRVLAETTKPAGKRTADGSEFEKRTADGSEFESPKKKAKVE

SEQ ID NO: 801 - protein, 2129 aa, synthetic construct
MPAAKRVKLDGGDKKYSIGLDIGTNSVGWAVITDEYKVPSKKFKVLGNTDRHSIKKNLIGALLFDSGETAEATRLKRTARRRYTRRKNRICYLQEIFSNEMAKVDDSFFHRLEESFLVEEDKKHERHPIFGNIVDEVAYHEKYPTIYHLRKKLVDSTDKADLRLIYLALAHMIKFRGHFLIEGDLNPDNSDVDKLFIQLVQTYNQLFEENPINASGVDAKAILSARLSKSRRLENLIAQLPGEKKNGLFGNLIALSLGLTPNFKSNFDLAEDAKLQLSKDTYDDDLDNLLAQIGDQYADLFLAAKNLSDAILLSDILRVNTEITKAPLSASMIKRYDEHHQDLTLLKALVRQQLPEKYKEIFFDQSKNGYAGYIDGGASQEEFYKFIKPILEKMDGTEELLVKLNREDLLRKQRTFDNGSIPHQIHLGELHAILRRQEDFYPFLKDNREKIEKILTFRIPYYVGPLARGNSRFAWMTRKSEETITPWNFEEVVDKGASAQSFIERMTNFDKNLPNEKVLPKHSLLYEYFTVYNELTKVKYVTEGMRKPAFLSGEQKKAIVDLLFKTNRKVTVKQLKEDYFKKIECFDSVEISGVEDRFNASLGTYHDLLKIIKDKDFLDNEENEDILEDIVLTLTLFEDREMIEERLKTYAHLFDDKVMKQLKRRRYTGWGRLSRKLINGIRDKQSGKTILDFLKSDGFANRNFMQLIHDDSLTFKEDIQKAQVSGQGDSLHEHIANLAGSPAIKKGILQTVKVVDELVKVMGRHKPENIVIEMARENQTTQKGQKNSRERMKRIEEGIKELGSQILKEHPVENTQLQNEKLYLYYLQNGRDMYVDQELDINRLSDYDVDHIVPQSFLKDDSIDNKVLTRSDKARGKSDNVPSEEVVKKMKNYWRQLLNAKLITQRKFDNLTKAERGGLSELDKAGFIKRQLVETRQITKHVAQILDSRMNTKYDENDKLIREVKVITLKSKLVSDFRKDFQFYKVREINNYHHAHDAYLNAVVGTALIKKYPKLESEFVYGDYKVYDVRKMIAKSEQEIGKATAKYFFYSNIMNFFKTEITLANGEIRKRPLIETNGETGEIVWDKGRDFATVRKVLSMPQVNIVKKTEVQTGGFSKESILPKRNSDKLIARKKDWDPKKYGGFDSPTVAYSVLVVAKVEKGKSKKLKSVKELLGITIMERSSFEKNPIDFLEAKGYKEVKKDLIIKLPKYSLFELENGRKRMLASAGELQKGNELALPSKYVNFLYLASHYEKLKGSPEDNEQKQLFVEQHKHYLDEIIEQISEFSKRVILADANLDKVLSAYNKHRDKPIREQAENIIHLFTLTNLGAPAAFKYFDTTIDRKRYTSTKEVLDATLIHQSITGLYETRIDLSQLGGDGGAEAAAKEAAAKEAAAKEAAAKALEAEAAAKEAAAKEAAAKEAAAKAGGVLNLEEEYRLHEKPVPSSIDPSWLQLFPTVWAERAGMGLANQVPPVVVELRSGASPVAVRQYPMSKEAREGIRPHIQRFLDLGVLVPCQSPWNTPLLPVKKPGTNDYRPVQDLREINKRVQDIHPTVPNPYNLLSSLPPSHTWYSVLDLKDAFFCLKLHPNSQPLFAFEWRDPEKGNTGQLTWTRLPQGFKNSPTLFNEALHRDLAPFRALNPQVVLLQYVDDLLVAAPTYRDCKEGTQKLLQELSKLGYRVSAKKAQLCQKEVTYLGYLLKEGKRWLTPARKATVMKIPPPTTPRQVREFLGTAGFCRLWIPGFASLAAPLYPLTKPSIPFIWTEEHQKAFDRIKEALLSAPALALPDLTKPFTLYVDERAGVARGVLTQTLGPWRRPVAYLSKKLDPVASGWPTCLKAVAAVALLLKDADKLTLGQNVTVIASHSLESIVRQPPDRWMTNARMTHYQSLLLNERVSFAPPAVLNPATLLPVESEATPVHRCSEILAEETGTRRDLKDQPLPGVPAWYTDGSSFIAEGKRRAGAAIVDGKRTVWASSLPEGTSAQKAELVALTQALRLAEGKDINIYTDSRYAFATAHIHGAIYKQRGWLTSAGKDIKNKEEILALLEAIHLPKRVAIIHCPGHQKGNDPVATGNRRADEAAKQAALSTRVLAETTKPAGKRTADGSEFEKRTADGSEFESPKKKAKVE

SEQ ID NO: 802 - protein, 2090 aa, synthetic construct
MPAAKRVKLDGGDKKYSIGLDIGTNSVGWAVITDEYKVPSKKFKVLGNTDRHSIKKNLIGALLFDSGETAEATRLKRTARRRYTRRKNRICYLQEIFSNEMAKVDDSFFHRLEESFLVEEDKKHERHPIFGNIVDEVAYHEKYPTIYHLRKKLVDSTDKADLRLIYLALAHMIKFRGHFLIEGDLNPDNSDVDKLFIQLVQTYNQLFEENPINASGVDAKAILSARLSKSRRLENLIAQLPGEKKNGLFGNLIALSLGLTPNFKSNFDLAEDAKLQLSKDTYDDDLDNLLAQIGDQYADLFLAAKNLSDAILLSDILRVNTEITKAPLSASMIKRYDEHHQDLTLLKALVRQQLPEKYKEIFFDQSKNGYAGYIDGGASQEEFYKFIKPILEKMDGTEELLVKLNREDLLRKQRTFDNGSIPHQIHLGELHAILRRQEDFYPFLKDNREKIEKILTFRIPYYVGPLARGNSRFAWMTRKSEETITPWNFEEVVDKGASAQSFIERMTNFDKNLPNEKVLPKHSLLYEYFTVYNELTKVKYVTEGMRKPAFLSGEQKKAIVDLLFKTNRKVTVKQLKEDYFKKIECFDSVEISGVEDRFNASLGTYHDLLKIIKDKDFLDNEENEDILEDIVLTLTLFEDREMIEERLKTYAHLFDDKVMKQLKRRRYTGWGRLSRKLINGIRDKQSGKTILDFLKSDGFANRNFMQLIHDDSLTFKEDIQKAQVSGQGDSLHEHIANLAGSPAIKKGILQTVKVVDELVKVMGRHKPENIVIEMARENQTTQKGQKNSRERMKRIEEGIKELGSQILKEHPVENTQLQNEKLYLYYLQNGRDMYVDQELDINRLSDYDVDHIVPQSFLKDDSIDNKVLTRSDKARGKSDNVPSEEVVKKMKNYWRQLLNAKLITQRKFDNLTKAERGGLSELDKAGFIKRQLVETRQITKHVAQILDSRMNTKYDENDKLIREVKVITLKSKLVSDFRKDFQFYKVREINNYHHAHDAYLNAVVGTALIKKYPKLESEFVYGDYKVYDVRKMIAKSEQEIGKATAKYFFYSNIMNFFKTEITLANGEIRKRPLIETNGETGEIVWDKGRDFATVRKVLSMPQVNIVKKTEVQTGGFSKESILPKRNSDKLIARKKDWDPKKYGGFDSPTVAYSVLVVAKVEKGKSKKLKSVKELLGITIMERSSFEKNPIDFLEAKGYKEVKKDLIIKLPKYSLFELENGRKRMLASAGELQKGNELALPSKYVNFLYLASHYEKLKGSPEDNEQKQLFVEQHKHYLDEIIEQISEFSKRVILADANLDKVLSAYNKHRDKPIREQAENIIHLFTLTNLGAPAAFKYFDTTIDRKRYTSTKEVLDATLIHQSITGLYETRIDLSQLGGDGGGGGGGGGGGVLNLEEEYRLHEKPVPSSIDPSWLQLFPTVWAERAGMGLANQVPPVVVELRSGASPVAVRQYPMSKEAREGIRPHIQRFLDLGVLVPCQSPWNTPLLPVKKPGTNDYRPVQDLREINKRVQDIHPTVPNPYNLLSSLPPSHTWYSVLDLKDAFFCLKLHPNSQPLFAFEWRDPEKGNTGQLTWTRLPQGFKNSPTLFNEALHRDLAPFRALNPQVVLLQYVDDLLVAAPTYRDCKEGTQKLLQELSKLGYRVSAKKAQLCQKEVTYLGYLLKEGKRWLTPARKATVMKIPPPTTPRQVREFLGTAGFCRLWIPGFASLAAPLYPLTKPSIPFIWTEEHQKAFDRIKEALLSAPALALPDLTKPFTLYVDERAGVARGVLTQTLGPWRRPVAYLSKKLDPVASGWPTCLKAVAAVALLLKDADKLTLGQNVTVIASHSLESIVRQPPDRWMTNARMTHYQSLLLNERVSFAPPAVLNPATLLPVESEATPVHRCSEILAEETGTRRDLKDQPLPGVPAWYTDGSSFIAEGKRRAGAAIVDGKRTVWASSLPEGTSAQKAELVALTQALRLAEGKDINIYTDSRYAFATAHIHGAIYKQRGWLTSAGKDIKNKEEILALLEAIHLPKRVAIIHCPGHQKGNDPVATGNRRADEAAKQAALSTRVLAETTKPAGKRTADGSEFEKRTADGSEFESPKKKAKVE

SEQ ID NO: 803 - protein, 2086 aa, synthetic construct
MPAAKRVKLDGGDKKYSIGLDIGTNSVGWAVITDEYKVPSKKFKVLGNTDRHSIKKNLIGALLFDSGETAEATRLKRTARRRYTRRKNRICYLQEIFSNEMAKVDDSFFHRLEESFLVEEDKKHERHPIFGNIVDEVAYHEKYPTIYHLRKKLVDSTDKADLRLIYLALAHMIKFRGHFLIEGDLNPDNSDVDKLFIQLVQTYNQLFEENPINASGVDAKAILSARLSKSRRLENLIAQLPGEKKNGLFGNLIALSLGLTPNFKSNFDLAEDAKLQLSKDTYDDDLDNLLAQIGDQYADLFLAAKNLSDAILLSDILRVNTEITKAPLSASMIKRYDEHHQDLTLLKALVRQQLPEKYKEIFFDQSKNGYAGYIDGGASQEEFYKFIKPILEKMDGTEELLVKLNREDLLRKQRTFDNGSIPHQIHLGELHAILRRQEDFYPFLKDNREKIEKILTFRIPYYVGPLARGNSRFAWMTRKSEETITPWNFEEVVDKGASAQSFIERMTNFDKNLPNEKVLPKHSLLYEYFTVYNELTKVKYVTEGMRKPAFLSGEQKKAIVDLLFKTNRKVTVKQLKEDYFKKIECFDSVEISGVEDRFNASLGTYHDLLKIIKDKDFLDNEENEDILEDIVLTLTLFEDREMIEERLKTYAHLFDDKVMKQLKRRRYTGWGRLSRKLINGIRDKQSGKTILDFLKSDGFANRNFMQLIHDDSLTFKEDIQKAQVSGQGDSLHEHIANLAGSPAIKKGILQTVKVVDELVKVMGRHKPENIVIEMARENQTTQKGQKNSRERMKRIEEGIKELGSQILKEHPVENTQLQNEKLYLYYLQNGRDMYVDQELDINRLSDYDVDHIVPQSFLKDDSIDNKVLTRSDKARGKSDNVPSEEVVKKMKNYWRQLLNAKLITQRKFDNLTKAERGGLSELDKAGFIKRQLVETRQITKHVAQILDSRMNTKYDENDKLIREVKVITLKSKLVSDFRKDFQFYKVREINNYHHAHDAYLNAVVGTALIKKYPKLESEFVYGDYKVYDVRKMIAKSEQEIGKATAKYFFYSNIMNFFKTEITLANGEIRKRPLIETNGETGEIVWDKGRDFATVRKVLSMPQVNIVKKTEVQTGGFSKESILPKRNSDKLIARKKDWDPKKYGGFDSPTVAYSVLVVAKVEKGKSKKLKSVKELLGITIMERSSFEKNPIDFLEAKGYKEVKKDLIIKLPKYSLFELENGRKRMLASAGELQKGNELALPSKYVNFLYLASHYEKLKGSPEDNEQKQLFVEQHKHYLDEIIEQISEFSKRVILADANLDKVLSAYNKHRDKPIREQAENIIHLFTLTNLGAPAAFKYFDTTIDRKRYTSTKEVLDATLIHQSITGLYETRIDLSQLGGDGGGSSGGVLNLEEEYRLHEKPVPSSIDPSWLQLFPTVWAERAGMGLANQVPPVVVELRSGASPVAVRQYPMSKEAREGIRPHIQRFLDLGVLVPCQSPWNTPLLPVKKPGTNDYRPVQDLREINKRVQDIHPTVPNPYNLLSSLPPSHTWYSVLDLKDAFFCLKLHPNSQPLFAFEWRDPEKGNTGQLTWTRLPQGFKNSPTLFNEALHRDLAPFRALNPQVVLLQYVDDLLVAAPTYRDCKEGTQKLLQELSKLGYRVSAKKAQLCQKEVTYLGYLLKEGKRWLTPARKATVMKIPPPTTPRQVREFLGTAGFCRLWIPGFASLAAPLYPLTKPSIPFIWTEEHQKAFDRIKEALLSAPALALPDLTKPFTLYVDERAGVARGVLTQTLGPWRRPVAYLSKKLDPVASGWPTCLKAVAAVALLLKDADKLTLGQNVTVIASHSLESIVRQPPDRWMTNARMTHYQSLLLNERVSFAPPAVLNPATLLPVESEATPVHRCSEILAEETGTRRDLKDQPLPGVPAWYTDGSSFIAEGKRRAGAAIVDGKRTVWASSLPEGTSAQKAELVALTQALRLAEGKDINIYTDSRYAFATAHIHGAIYKQRGWLTSAGKDIKNKEEILALLEAIHLPKRVAIIHCPGHQKGNDPVATGNRRADEAAKQAALSTRVLAETTKPAGKRTADGSEFEKRTADGSEFESPKKKAKVE

SEQ ID NO: 804 - protein, 2092 aa, synthetic construct
MPAAKRVKLDGGDKKYSIGLDIGTNSVGWAVITDEYKVPSKKFKVLGNTDRHSIKKNLIGALLFDSGETAEATRLKRTARRRYTRRKNRICYLQEIFSNEMAKVDDSFFHRLEESFLVEEDKKHERHPIFGNIVDEVAYHEKYPTIYHLRKKLVDSTDKADLRLIYLALAHMIKFRGHFLIEGDLNPDNSDVDKLFIQLVQTYNQLFEENPINASGVDAKAILSARLSKSRRLENLIAQLPGEKKNGLFGNLIALSLGLTPNFKSNFDLAEDAKLQLSKDTYDDDLDNLLAQIGDQYADLFLAAKNLSDAILLSDILRVNTEITKAPLSASMIKRYDEHHQDLTLLKALVRQQLPEKYKEIFFDQSKNGYAGYIDGGASQEEFYKFIKPILEKMDGTEELLVKLNREDLLRKQRTFDNGSIPHQIHLGELHAILRRQEDFYPFLKDNREKIEKILTFRIPYYVGPLARGNSRFAWMTRKSEETITPWNFEEVVDKGASAQSFIERMTNFDKNLPNEKVLPKHSLLYEYFTVYNELTKVKYVTEGMRKPAFLSGEQKKAIVDLLFKTNRKVTVKQLKEDYFKKIECFDSVEISGVEDRFNASLGTYHDLLKIIKDKDFLDNEENEDILEDIVLTLTLFEDREMIEERLKTYAHLFDDKVMKQLKRRRYTGWGRLSRKLINGIRDKQSGKTILDFLKSDGFANRNFMQLIHDDSLTFKEDIQKAQVSGQGDSLHEHIANLAGSPAIKKGILQTVKVVDELVKVMGRHKPENIVIEMARENQTTQKGQKNSRERMKRIEEGIKELGSQILKEHPVENTQLQNEKLYLYYLQNGRDMYVDQELDINRLSDYDVDHIVPQSFLKDDSIDNKVLTRSDKARGKSDNVPSEEVVKKMKNYWRQLLNAKLITQRKFDNLTKAERGGLSELDKAGFIKRQLVETRQITKHVAQILDSRMNTKYDENDKLIREVKVITLKSKLVSDFRKDFQFYKVREINNYHHAHDAYLNAVVGTALIKKYPKLESEFVYGDYKVYDVRKMIAKSEQEIGKATAKYFFYSNIMNFFKTEITLANGEIRKRPLIETNGETGEIVWDKGRDFATVRKVLSMPQVNIVKKTEVQTGGFSKESILPKRNSDKLIARKKDWDPKKYGGFDSPTVAYSVLVVAKVEKGKSKKLKSVKELLGITIMERSSFEKNPIDFLEAKGYKEVKKDLIIKLPKYSLFELENGRKRMLASAGELQKGNELALPSKYVNFLYLASHYEKLKGSPEDNEQKQLFVEQHKHYLDEIIEQISEFSKRVILADANLDKVLSAYNKHRDKPIREQAENIIHLFTLTNLGAPAAFKYFDTTIDRKRYTSTKEVLDATLIHQSITGLYETRIDLSQLGGDGGGGGGSSGGSGGVLNLEEEYRLHEKPVPSSIDPSWLQLFPTVWAERAGMGLANQVPPVVVELRSGASPVAVRQYPMSKEAREGIRPHIQRFLDLGVLVPCQSPWNTPLLPVKKPGTNDYRPVQDLREINKRVQDIHPTVPNPYNLLSSLPPSHTWYSVLDLKDAFFCLKLHPNSQPLFAFEWRDPEKGNTGQLTWTRLPQGFKNSPTLFNEALHRDLAPFRALNPQVVLLQYVDDLLVAAPTYRDCKEGTQKLLQELSKLGYRVSAKKAQLCQKEVTYLGYLLKEGKRWLTPARKATVMKIPPPTTPRQVREFLGTAGFCRLWIPGFASLAAPLYPLTKPSIPFIWTEEHQKAFDRIKEALLSAPALALPDLTKPFTLYVDERAGVARGVLTQTLGPWRRPVAYLSKKLDPVASGWPTCLKAVAAVALLLKDADKLTLGQNVTVIASHSLESIVRQPPDRWMTNARMTHYQSLLLNERVSFAPPAVLNPATLLPVESEATPVHRCSEILAEETGTRRDLKDQPLPGVPAWYTDGSSFIAEGKRRAGAAIVDGKRTVWASSLPEGTSAQKAELVALTQALRLAEGKDINIYTDSRYAFATAHIHGAIYKQRGWLTSAGKDIKNKEEILALLEAIHLPKRVAIIHCPGHQKGNDPVATGNRRADEAAKQAALSTRVLAETTKPAGKRTADGSEFEKRTADGSEFESPKKKAKVE

SEQ ID NO: 805 - protein, 2089 aa, synthetic construct
MPAAKRVKLDGGDKKYSIGLDIGTNSVGWAVITDEYKVPSKKFKVLGNTDRHSIKKNLIGALLFDSGETAEATRLKRTARRRYTRRKNRICYLQEIFSNEMAKVDDSFFHRLEESFLVEEDKKHERHPIFGNIVDEVAYHEKYPTIYHLRKKLVDSTDKADLRLIYLALAHMIKFRGHFLIEGDLNPDNSDVDKLFIQLVQTYNQLFEENPINASGVDAKAILSARLSKSRRLENLIAQLPGEKKNGLFGNLIALSLGLTPNFKSNFDLAEDAKLQLSKDTYDDDLDNLLAQIGDQYADLFLAAKNLSDAILLSDILRVNTEITKAPLSASMIKRYDEHHQDLTLLKALVRQQLPEKYKEIFFDQSKNGYAGYIDGGASQEEFYKFIKPILEKMDGTEELLVKLNREDLLRKQRTFDNGSIPHQIHLGELHAILRRQEDFYPFLKDNREKIEKILTFRIPYYVGPLARGNSRFAWMTRKSEETITPWNFEEVVDKGASAQSFIERMTNFDKNLPNEKVLPKHSLLYEYFTVYNELTKVKYVTEGMRKPAFLSGEQKKAIVDLLFKTNRKVTVKQLKEDYFKKIECFDSVEISGVEDRFNASLGTYHDLLKIIKDKDFLDNEENEDILEDIVLTLTLFEDREMIEERLKTYAHLFDDKVMKQLKRRRYTGWGRLSRKLINGIRDKQSGKTILDFLKSDGFANRNFMQLIHDDSLTFKEDIQKAQVSGQGDSLHEHIANLAGSPAIKKGILQTVKVVDELVKVMGRHKPENIVIEMARENQTTQKGQKNSRERMKRIEEGIKELGSQILKEHPVENTQLQNEKLYLYYLQNGRDMYVDQELDINRLSDYDVDHIVPQSFLKDDSIDNKVLTRSDKARGKSDNVPSEEVVKKMKNYWRQLLNAKLITQRKFDNLTKAERGGLSELDKAGFIKRQLVETRQITKHVAQILDSRMNTKYDENDKLIREVKVITLKSKLVSDFRKDFQFYKVREINNYHHAHDAYLNAVVGTALIKKYPKLESEFVYGDYKVYDVRKMIAKSEQEIGKATAKYFFYSNIMNFFKTEITLANGEIRKRPLIETNGETGEIVWDKGRDFATVRKVLSMPQVNIVKKTEVQTGGFSKESILPKRNSDKLIARKKDWDPKKYGGFDSPTVAYSVLVVAKVEKGKSKKLKSVKELLGITIMERSSFEKNPIDFLEAKGYKEVKKDLIIKLPKYSLFELENGRKRMLASAGELQKGNELALPSKYVNFLYLASHYEKLKGSPEDNEQKQLFVEQHKHYLDEIIEQISEFSKRVILADANLDKVLSAYNKHRDKPIREQAENIIHLFTLTNLGAPAAFKYFDTTIDRKRYTSTKEVLDATLIHQSITGLYETRIDLSQLGGDGGGGGGGGGGVLNLEEEYRLHEKPVPSSIDPSWLQLFPTVWAERAGMGLANQVPPVVVELRSGASPVAVRQYPMSKEAREGIRPHIQRFLDLGVLVPCQSPWNTPLLPVKKPGTNDYRPVQDLREINKRVQDIHPTVPNPYNLLSSLPPSHTWYSVLDLKDAFFCLKLHPNSQPLFAFEWRDPEKGNTGQLTWTRLPQGFKNSPTLFNEALHRDLAPFRALNPQVVLLQYVDDLLVAAPTYRDCKEGTQKLLQELSKLGYRVSAKKAQLCQKEVTYLGYLLKEGKRWLTPARKATVMKIPPPTTPRQVREFLGTAGFCRLWIPGFASLAAPLYPLTKPSIPFIWTEEHQKAFDRIKEALLSAPALALPDLTKPFTLYVDERAGVARGVLTQTLGPWRRPVAYLSKKLDPVASGWPTCLKAVAAVALLLKDADKLTLGQNVTVIASHSLESIVRQPPDRWMTNARMTHYQSLLLNERVSFAPPAVLNPATLLPVESEATPVHRCSEILAEETGTRRDLKDQPLPGVPAWYTDGSSFIAEGKRRAGAAIVDGKRTVWASSLPEGTSAQKAELVALTQALRLAEGKDINIYTDSRYAFATAHIHGAIYKQRGWLTSAGKDIKNKEEILALLEAIHLPKRVAIIHCPGHQKGNDPVATGNRRADEAAKQAALSTRVLAETTKPAGKRTADGSEFEKRTADGSEFESPKKKAKVE

SEQ ID NO: 806 - protein, 2099 aa, synthetic construct
MPAAKRVKLDGGDKKYSIGLDIGTNSVGWAVITDEYKVPSKKFKVLGNTDRHSIKKNLIGALLFDSGETAEATRLKRTARRRYTRRKNRICYLQEIFSNEMAKVDDSFFHRLEESFLVEEDKKHERHPIFGNIVDEVAYHEKYPTIYHLRKKLVDSTDKADLRLIYLALAHMIKFRGHFLIEGDLNPDNSDVDKLFIQLVQTYNQLFEENPINASGVDAKAILSARLSKSRRLENLIAQLPGEKKNGLFGNLIALSLGLTPNFKSNFDLAEDAKLQLSKDTYDDDLDNLLAQIGDQYADLFLAAKNLSDAILLSDILRVNTEITKAPLSASMIKRYDEHHQDLTLLKALVRQQLPEKYKEIFFDQSKNGYAGYIDGGASQEEFYKFIKPILEKMDGTEELLVKLNREDLLRKQRTFDNGSIPHQIHLGELHAILRRQEDFYPFLKDNREKIEKILTFRIPYYVGPLARGNSRFAWMTRKSEETITPWNFEEVVDKGASAQSFIERMTNFDKNLPNEKVLPKHSLLYEYFTVYNELTKVKYVTEGMRKPAFLSGEQKKAIVDLLFKTNRKVTVKQLKEDYFKKIECFDSVEISGVEDRFNASLGTYHDLLKIIKDKDFLDNEENEDILEDIVLTLTLFEDREMIEERLKTYAHLFDDKVMKQLKRRRYTGWGRLSRKLINGIRDKQSGKTILDFLKSDGFANRNFMQLIHDDSLTFKEDIQKAQVSGQGDSLHEHIANLAGSPAIKKGILQTVKVVDELVKVMGRHKPENIVIEMARENQTTQKGQKNSRERMKRIEEGIKELGSQILKEHPVENTQLQNEKLYLYYLQNGRDMYVDQELDINRLSDYDVDHIVPQSFLKDDSIDNKVLTRSDKARGKSDNVPSEEVVKKMKNYWRQLLNAKLITQRKFDNLTKAERGGLSELDKAGFIKRQLVETRQITKHVAQILDSRMNTKYDENDKLIREVKVITLKSKLVSDFRKDFQFYKVREINNYHHAHDAYLNAVVGTALIKKYPKLESEFVYGDYKVYDVRKMIAKSEQEIGKATAKYFFYSNIMNFFKTEITLANGEIRKRPLIETNGETGEIVWDKGRDFATVRKVLSMPQVNIVKKTEVQTGGFSKESILPKRNSDKLIARKKDWDPKKYGGFDSPTVAYSVLVVAKVEKGKSKKLKSVKELLGITIMERSSFEKNPIDFLEAKGYKEVKKDLIIKLPKYSLFELENGRKRMLASAGELQKGNELALPSKYVNFLYLASHYEKLKGSPEDNEQKQLFVEQHKHYLDEIIEQISEFSKRVILADANLDKVLSAYNKHRDKPIREQAENIIHLFTLTNLGAPAAFKYFDTTIDRKRYTSTKEVLDATLIHQSITGLYETRIDLSQLGGDGGSGSETPGTSESATPESGGVLNLEEEYRLHEKPVPSSIDPSWLQLFPTVWAERAGMGLANQVPPVVVELRSGASPVAVRQYPMSKEAREGIRPHIQRFLDLGVLVPCQSPWNTPLLPVKKPGTNDYRPVQDLREINKRVQDIHPTVPNPYNLLSSLPPSHTWYSVLDLKDAFFCLKLHPNSQPLFAFEWRDPEKGNTGQLTWTRLPQGFKNSPTLFNEALHRDLAPFRALNPQVVLLQYVDDLLVAAPTYRDCKEGTQKLLQELSKLGYRVSAKKAQLCQKEVTYLGYLLKEGKRWLTPARKATVMKIPPPTTPRQVREFLGTAGFCRLWIPGFASLAAPLYPLTKPSIPFIWTEEHQKAFDRIKEALLSAPALALPDLTKPFTLYVDERAGVARGVLTQTLGPWRRPVAYLSKKLDPVASGWPTCLKAVAAVALLLKDADKLTLGQNVTVIASHSLESIVRQPPDRWMTNARMTHYQSLLLNERVSFAPPAVLNPATLLPVESEATPVHRCSEILAEETGTRRDLKDQPLPGVPAWYTDGSSFIAEGKRRAGAAIVDGKRTVWASSLPEGTSAQKAELVALTQALRLAEGKDINIYTDSRYAFATAHIHGAIYKQRGWLTSAGKDIKNKEEILALLEAIHLPKRVAIIHCPGHQKGNDPVATGNRRADEAAKQAALSTRVLAETTKPAGKRTADGSEFEKRTADGSEFESPKKKAKVE

SEQ ID NO: 807 - protein, 2094 aa, synthetic construct
MPAAKRVKLDGGDKKYSIGLDIGTNSVGWAVITDEYKVPSKKFKVLGNTDRHSIKKNLIGALLFDSGETAEATRLKRTARRRYTRRKNRICYLQEIFSNEMAKVDDSFFHRLEESFLVEEDKKHERHPIFGNIVDEVAYHEKYPTIYHLRKKLVDSTDKADLRLIYLALAHMIKFRGHFLIEGDLNPDNSDVDKLFIQLVQTYNQLFEENPINASGVDAKAILSARLSKSRRLENLIAQLPGEKKNGLFGNLIALSLGLTPNFKSNFDLAEDAKLQLSKDTYDDDLDNLLAQIGDQYADLFLAAKNLSDAILLSDILRVNTEITKAPLSASMIKRYDEHHQDLTLLKALVRQQLPEKYKEIFFDQSKNGYAGYIDGGASQEEFYKFIKPILEKMDGTEELLVKLNREDLLRKQRTFDNGSIPHQIHLGELHAILRRQEDFYPFLKDNREKIEKILTFRIPYYVGPLARGNSRFAWMTRKSEETITPWNFEEVVDKGASAQSFIERMTNFDKNLPNEKVLPKHSLLYEYFTVYNELTKVKYVTEGMRKPAFLSGEQKKAIVDLLFKTNRKVTVKQLKEDYFKKIECFDSVEISGVEDRFNASLGTYHDLLKIIKDKDFLDNEENEDILEDIVLTLTLFEDREMIEERLKTYAHLFDDKVMKQLKRRRYTGWGRLSRKLINGIRDKQSGKTILDFLKSDGFANRNFMQLIHDDSLTFKEDIQKAQVSGQGDSLHEHIANLAGSPAIKKGILQTVKVVDELVKVMGRHKPENIVIEMARENQTTQKGQKNSRERMKRIEEGIKELGSQILKEHPVENTQLQNEKLYLYYLQNGRDMYVDQELDINRLSDYDVDHIVPQSFLKDDSIDNKVLTRSDKARGKSDNVPSEEVVKKMKNYWRQLLNAKLITQRKFDNLTKAERGGLSELDKAGFIKRQLVETRQITKHVAQILDSRMNTKYDENDKLIREVKVITLKSKLVSDFRKDFQFYKVREINNYHHAHDAYLNAVVGTALIKKYPKLESEFVYGDYKVYDVRKMIAKSEQEIGKATAKYFFYSNIMNFFKTEITLANGEIRKRPLIETNGETGEIVWDKGRDFATVRKVLSMPQVNIVKKTEVQTGGFSKESILPKRNSDKLIARKKDWDPKKYGGFDSPTVAYSVLVVAKVEKGKSKKLKSVKELLGITIMERSSFEKNPIDFLEAKGYKEVKKDLIIKLPKYSLFELENGRKRMLASAGELQKGNELALPSKYVNFLYLASHYEKLKGSPEDNEQKQLFVEQHKHYLDEIIEQISEFSKRVILADANLDKVLSAYNKHRDKPIREQAENIIHLFTLTNLGAPAAFKYFDTTIDRKRYTSTKEVLDATLIHQSITGLYETRIDLSQLGGDGGGGGGSSEAAAKGGVLNLEEEYRLHEKPVPSSIDPSWLQLFPTVWAERAGMGLANQVPPVVVELRSGASPVAVRQYPMSKEAREGIRPHIQRFLDLGVLVPCQSPWNTPLLPVKKPGTNDYRPVQDLREINKRVQDIHPTVPNPYNLLSSLPPSHTWYSVLDLKDAFFCLKLHPNSQPLFAFEWRDPEKGNTGQLTWTRLPQGFKNSPTLFNEALHRDLAPFRALNPQVVLLQYVDDLLVAAPTYRDCKEGTQKLLQELSKLGYRVSAKKAQLCQKEVTYLGYLLKEGKRWLTPARKATVMKIPPPTTPRQVREFLGTAGFCRLWIPGFASLAAPLYPLTKPSIPFIWTEEHQKAFDRIKEALLSAPALALPDLTKPFTLYVDERAGVARGVLTQTLGPWRRPVAYLSKKLDPVASGWPTCLKAVAAVALLLKDADKLTLGQNVTVIASHSLESIVRQPPDRWMTNARMTHYQSLLLNERVSFAPPAVLNPATLLPVESEATPVHRCSEILAEETGTRRDLKDQPLPGVPAWYTDGSSFIAEGKRRAGAAIVDGKRTVWASSLPEGTSAQKAELVALTQALRLAEGKDINIYTDSRYAFATAHIHGAIYKQRGWLTSAGKDIKNKEEILALLEAIHLPKRVAIIHCPGHQKGNDPVATGNRRADEAAKQAALSTRVLAETTKPAGKRTADGSEFEKRTADGSEFESPKKKAKVE

SEQ ID NO: 808 - protein, 2093 aa, synthetic construct
MPAAKRVKLDGGDKKYSIGLDIGTNSVGWAVITDEYKVPSKKFKVLGNTDRHSIKKNLIGALLFDSGETAEATRLKRTARRRYTRRKNRICYLQEIFSNEMAKVDDSFFHRLEESFLVEEDKKHERHPIFGNIVDEVAYHEKYPTIYHLRKKLVDSTDKADLRLIYLALAHMIKFRGHFLIEGDLNPDNSDVDKLFIQLVQTYNQLFEENPINASGVDAKAILSARLSKSRRLENLIAQLPGEKKNGLFGNLIALSLGLTPNFKSNFDLAEDAKLQLSKDTYDDDLDNLLAQIGDQYADLFLAAKNLSDAILLSDILRVNTEITKAPLSASMIKRYDEHHQDLTLLKALVRQQLPEKYKEIFFDQSKNGYAGYIDGGASQEEFYKFIKPILEKMDGTEELLVKLNREDLLRKQRTFDNGSIPHQIHLGELHAILRRQEDFYPFLKDNREKIEKILTFRIPYYVGPLARGNSRFAWMTRKSEETITPWNFEEVVDKGASAQSFIERMTNFDKNLPNEKVLPKHSLLYEYFTVYNELTKVKYVTEGMRKPAFLSGEQKKAIVDLLFKTNRKVTVKQLKEDYFKKIECFDSVEISGVEDRFNASLGTYHDLLKIIKDKDFLDNEENEDILEDIVLTLTLFEDREMIEERLKTYAHLFDDKVMKQLKRRRYTGWGRLSRKLINGIRDKQSGKTILDFLKSDGFANRNFMQLIHDDSLTFKEDIQKAQVSGQGDSLHEHIANLAGSPAIKKGILQTVKVVDELVKVMGRHKPENIVIEMARENQTTQKGQKNSRERMKRIEEGIKELGSQILKEHPVENTQLQNEKLYLYYLQNGRDMYVDQELDINRLSDYDVDHIVPQSFLKDDSIDNKVLTRSDKARGKSDNVPSEEVVKKMKNYWRQLLNAKLITQRKFDNLTKAERGGLSELDKAGFIKRQLVETRQITKHVAQILDSRMNTKYDENDKLIREVKVITLKSKLVSDFRKDFQFYKVREINNYHHAHDAYLNAVVGTALIKKYPKLESEFVYGDYKVYDVRKMIAKSEQEIGKATAKYFFYSNIMNFFKTEITLANGEIRKRPLIETNGETGEIVWDKGRDFATVRKVLSMPQVNIVKKTEVQTGGFSKESILPKRNSDKLIARKKDWDPKKYGGFDSPTVAYSVLVVAKVEKGKSKKLKSVKELLGITIMERSSFEKNPIDFLEAKGYKEVKKDLIIKLPKYSLFELENGRKRMLASAGELQKGNELALPSKYVNFLYLASHYEKLKGSPEDNEQKQLFVEQHKHYLDEIIEQISEFSKRVILADANLDKVLSAYNKHRDKPIREQAENIIHLFTLTNLGAPAAFKYFDTTIDRKRYTSTKEVLDATLIHQSITGLYETRIDLSQLGGDGGGGGGSGGGGSGGVLNLEEEYRLHEKPVPSSIDPSWLQLFPTVWAERAGMGLANQVPPVVVELRSGASPVAVRQYPMSKEAREGIRPHIQRFLDLGVLVPCQSPWNTPLLPVKKPGTNDYRPVQDLREINKRVQDIHPTVPNPYNLLSSLPPSHTWYSVLDLKDAFFCLKLHPNSQPLFAFEWRDPEKGNTGQLTWTRLPQGFKNSPTLFNEALHRDLAPFRALNPQVVLLQYVDDLLVAAPTYRDCKEGTQKLLQELSKLGYRVSAKKAQLCQKEVTYLGYLLKEGKRWLTPARKATVMKIPPPTTPRQVREFLGTAGFCRLWIPGFASLAAPLYPLTKPSIPFIWTEEHQKAFDRIKEALLSAPALALPDLTKPFTLYVDERAGVARGVLTQTLGPWRRPVAYLSKKLDPVASGWPTCLKAVAAVALLLKDADKLTLGQNVTVIASHSLESIVRQPPDRWMTNARMTHYQSLLLNERVSFAPPAVLNPATLLPVESEATPVHRCSEILAEETGTRRDLKDQPLPGVPAWYTDGSSFIAEGKRRAGAAIVDGKRTVWASSLPEGTSAQKAELVALTQALRLAEGKDINIYTDSRYAFATAHIHGAIYKQRGWLTSAGKDIKNKEEILALLEAIHLPKRVAIIHCPGHQKGNDPVATGNRRADEAAKQAALSTRVLAETTKPAGKRTADGSEFEKRTADGSEFESPKKKAKVE

SEQ ID NO: 809 - protein, 2094 aa, synthetic construct
MPAAKRVKLDGGDKKYSIGLDIGTNSVGWAVITDEYKVPSKKFKVLGNTDRHSIKKNLIGALLFDSGETAEATRLKRTARRRYTRRKNRICYLQEIFSNEMAKVDDSFFHRLEESFLVEEDKKHERHPIFGNIVDEVAYHEKYPTIYHLRKKLVDSTDKADLRLIYLALAHMIKFRGHFLIEGDLNPDNSDVDKLFIQLVQTYNQLFEENPINASGVDAKAILSARLSKSRRLENLIAQLPGEKKNGLFGNLIALSLGLTPNFKSNFDLAEDAKLQLSKDTYDDDLDNLLAQIGDQYADLFLAAKNLSDAILLSDILRVNTEITKAPLSASMIKRYDEHHQDLTLLKALVRQQLPEKYKEIFFDQSKNGYAGYIDGGASQEEFYKFIKPILEKMDGTEELLVKLNREDLLRKQRTFDNGSIPHQIHLGELHAILRRQEDFYPFLKDNREKIEKILTFRIPYYVGPLARGNSRFAWMTRKSEETITPWNFEEVVDKGASAQSFIERMTNFDKNLPNEKVLPKHSLLYEYFTVYNELTKVKYVTEGMRKPAFLSGEQKKAIVDLLFKTNRKVTVKQLKEDYFKKIECFDSVEISGVEDRFNASLGTYHDLLKIIKDKDFLDNEENEDILEDIVLTLTLFEDREMIEERLKTYAHLFDDKVMKQLKRRRYTGWGRLSRKLINGIRDKQSGKTILDFLKSDGFANRNFMQLIHDDSLTFKEDIQKAQVSGQGDSLHEHIANLAGSPAIKKGILQTVKVVDELVKVMGRHKPENIVIEMARENQTTQKGQKNSRERMKRIEEGIKELGSQILKEHPVENTQLQNEKLYLYYLQNGRDMYVDQELDINRLSDYDVDHIVPQSFLKDDSIDNKVLTRSDKARGKSDNVPSEEVVKKMKNYWRQLLNAKLITQRKFDNLTKAERGGLSELDKAGFIKRQLVETRQITKHVAQILDSRMNTKYDENDKLIREVKVITLKSKLVSDFRKDFQFYKVREINNYHHAHDAYLNAVVGTALIKKYPKLESEFVYGDYKVYDVRKMIAKSEQEIGKATAKYFFYSNIMNFFKTEITLANGEIRKRPLIETNGETGEIVWDKGRDFATVRKVLSMPQVNIVKKTEVQTGGFSKESILPKRNSDKLIARKKDWDPKKYGGFDSPTVAYSVLVVAKVEKGKSKKLKSVKELLGITIMERSSFEKNPIDFLEAKGYKEVKKDLIIKLPKYSLFELENGRKRMLASAGELQKGNELALPSKYVNFLYLASHYEKLKGSPEDNEQKQLFVEQHKHYLDEIIEQISEFSKRVILADANLDKVLSAYNKHRDKPIREQAENIIHLFTLTNLGAPAAFKYFDTTIDRKRYTSTKEVLDATLIHQSITGLYETRIDLSQLGGDGGGSSGGSEAAAKGGVLNLEEEYRLHEKPVPSSIDPSWLQLFPTVWAERAGMGLANQVPPVVVELRSGASPVAVRQYPMSKEAREGIRPHIQRFLDLGVLVPCQSPWNTPLLPVKKPGTNDYRPVQDLREINKRVQDIHPTVPNPYNLLSSLPPSHTWYSVLDLKDAFFCLKLHPNSQPLFAFEWRDPEKGNTGQLTWTRLPQGFKNSPTLFNEALHRDLAPFRALNPQVVLLQYVDDLLVAAPTYRDCKEGTQKLLQELSKLGYRVSAKKAQLCQKEVTYLGYLLKEGKRWLTPARKATVMKIPPPTTPRQVREFLGTAGFCRLWIPGFASLAAPLYPLTKPSIPFIWTEEHQKAFDRIKEALLSAPALALPDLTKPFTLYVDERAGVARGVLTQTLGPWRRPVAYLSKKLDPVASGWPTCLKAVAAVALLLKDADKLTLGQNVTVIASHSLESIVRQPPDRWMTNARMTHYQSLLLNERVSFAPPAVLNPATLLPVESEATPVHRCSEILAEETGTRRDLKDQPLPGVPAWYTDGSSFIAEGKRRAGAAIVDGKRTVWASSLPEGTSAQKAELVALTQALRLAEGKDINIYTDSRYAFATAHIHGAIYKQRGWLTSAGKDIKNKEEILALLEAIHLPKRVAIIHCPGHQKGNDPVATGNRRADEAAKQAALSTRVLAETTKPAGKRTADGSEFEKRTADGSEFESPKKKAKVE

SEQ ID NO: 810 - protein, 2089 aa, synthetic construct
MPAAKRVKLDGGDKKYSIGLDIGTNSVGWAVITDEYKVPSKKFKVLGNTDRHSIKKNLIGALLFDSGETAEATRLKRTARRRYTRRKNRICYLQEIFSNEMAKVDDSFFHRLEESFLVEEDKKHERHPIFGNIVDEVAYHEKYPTIYHLRKKLVDSTDKADLRLIYLALAHMIKFRGHFLIEGDLNPDNSDVDKLFIQLVQTYNQLFEENPINASGVDAKAILSARLSKSRRLENLIAQLPGEKKNGLFGNLIALSLGLTPNFKSNFDLAEDAKLQLSKDTYDDDLDNLLAQIGDQYADLFLAAKNLSDAILLSDILRVNTEITKAPLSASMIKRYDEHHQDLTLLKALVRQQLPEKYKEIFFDQSKNGYAGYIDGGASQEEFYKFIKPILEKMDGTEELLVKLNREDLLRKQRTFDNGSIPHQIHLGELHAILRRQEDFYPFLKDNREKIEKILTFRIPYYVGPLARGNSRFAWMTRKSEETITPWNFEEVVDKGASAQSFIERMTNFDKNLPNEKVLPKHSLLYEYFTVYNELTKVKYVTEGMRKPAFLSGEQKKAIVDLLFKTNRKVTVKQLKEDYFKKIECFDSVEISGVEDRFNASLGTYHDLLKIIKDKDFLDNEENEDILEDIVLTLTLFEDREMIEERLKTYAHLFDDKVMKQLKRRRYTGWGRLSRKLINGIRDKQSGKTILDFLKSDGFANRNFMQLIHDDSLTFKEDIQKAQVSGQGDSLHEHIANLAGSPAIKKGILQTVKVVDELVKVMGRHKPENIVIEMARENQTTQKGQKNSRERMKRIEEGIKELGSQILKEHPVENTQLQNEKLYLYYLQNGRDMYVDQELDINRLSDYDVDHIVPQSFLKDDSIDNKVLTRSDKARGKSDNVPSEEVVKKMKNYWRQLLNAKLITQRKFDNLTKAERGGLSELDKAGFIKRQLVETRQITKHVAQILDSRMNTKYDENDKLIREVKVITLKSKLVSDFRKDFQFYKVREINNYHHAHDAYLNAVVGTALIKKYPKLESEFVYGDYKVYDVRKMIAKSEQEIGKATAKYFFYSNIMNFFKTEITLANGEIRKRPLIETNGETGEIVWDKGRDFATVRKVLSMPQVNIVKKTEVQTGGFSKESILPKRNSDKLIARKKDWDPKKYGGFDSPTVAYSVLVVAKVEKGKSKKLKSVKELLGITIMERSSFEKNPIDFLEAKGYKEVKKDLIIKLPKYSLFELENGRKRMLASAGELQKGNELALPSKYVNFLYLASHYEKLKGSPEDNEQKQLFVEQHKHYLDEIIEQISEFSKRVILADANLDKVLSAYNKHRDKPIREQAENIIHLFTLTNLGAPAAFKYFDTTIDRKRYTSTKEVLDATLIHQSITGLYETRIDLSQLGGDGGPAPGGGGGVLNLEEEYRLHEKPVPSSIDPSWLQLFPTVWAERAGMGLANQVPPVVVELRSGASPVAVRQYPMSKEAREGIRPHIQRFLDLGVLVPCQSPWNTPLLPVKKPGTNDYRPVQDLREINKRVQDIHPTVPNPYNLLSSLPPSHTWYSVLDLKDAFFCLKLHPNSQPLFAFEWRDPEKGNTGQLTWTRLPQGFKNSPTLFNEALHRDLAPFRALNPQVVLLQYVDDLLVAAPTYRDCKEGTQKLLQELSKLGYRVSAKKAQLCQKEVTYLGYLLKEGKRWLTPARKATVMKIPPPTTPRQVREFLGTAGFCRLWIPGFASLAAPLYPLTKPSIPFIWTEEHQKAFDRIKEALLSAPALALPDLTKPFTLYVDERAGVARGVLTQTLGPWRRPVAYLSKKLDPVASGWPTCLKAVAAVALLLKDADKLTLGQNVTVIASHSLESIVRQPPDRWMTNARMTHYQSLLLNERVSFAPPAVLNPATLLPVESEATPVHRCSEILAEETGTRRDLKDQPLPGVPAWYTDGSSFIAEGKRRAGAAIVDGKRTVWASSLPEGTSAQKAELVALTQALRLAEGKDINIYTDSRYAFATAHIHGAIYKQRGWLTSAGKDIKNKEEILALLEAIHLPKRVAIIHCPGHQKGNDPVATGNRRADEAAKQAALSTRVLAETTKPAGKRTADGSEFEKRTADGSEFESPKKKAKVE

SEQ ID NO: 811 - protein, 2094 aa, synthetic construct
MPAAKRVKLDGGDKKYSIGLDIGTNSVGWAVITDEYKVPSKKFKVLGNTDRHSIKKNLIGALLFDSGETAEATRLKRTARRRYTRRKNRICYLQEIFSNEMAKVDDSFFHRLEESFLVEEDKKHERHPIFGNIVDEVAYHEKYPTIYHLRKKLVDSTDKADLRLIYLALAHMIKFRGHFLIEGDLNPDNSDVDKLFIQLVQTYNQLFEENPINASGVDAKAILSARLSKSRRLENLIAQLPGEKKNGLFGNLIALSLGLTPNFKSNFDLAEDAKLQLSKDTYDDDLDNLLAQIGDQYADLFLAAKNLSDAILLSDILRVNTEITKAPLSASMIKRYDEHHQDLTLLKALVRQQLPEKYKEIFFDQSKNGYAGYIDGGASQEEFYKFIKPILEKMDGTEELLVKLNREDLLRKQRTFDNGSIPHQIHLGELHAILRRQEDFYPFLKDNREKIEKILTFRIPYYVGPLARGNSRFAWMTRKSEETITPWNFEEVVDKGASAQSFIERMTNFDKNLPNEKVLPKHSLLYEYFTVYNELTKVKYVTEGMRKPAFLSGEQKKAIVDLLFKTNRKVTVKQLKEDYFKKIECFDSVEISGVEDRFNASLGTYHDLLKIIKDKDFLDNEENEDILEDIVLTLTLFEDREMIEERLKTYAHLFDDKVMKQLKRRRYTGWGRLSRKLINGIRDKQSGKTILDFLKSDGFANRNFMQLIHDDSLTFKEDIQKAQVSGQGDSLHEHIANLAGSPAIKKGILQTVKVVDELVKVMGRHKPENIVIEMARENQTTQKGQKNSRERMKRIEEGIKELGSQILKEHPVENTQLQNEKLYLYYLQNGRDMYVDQELDINRLSDYDVDHIVPQSFLKDDSIDNKVLTRSDKARGKSDNVPSEEVVKKMKNYWRQLLNAKLITQRKFDNLTKAERGGLSELDKAGFIKRQLVETRQITKHVAQILDSRMNTKYDENDKLIREVKVITLKSKLVSDFRKDFQFYKVREINNYHHAHDAYLNAVVGTALIKKYPKLESEFVYGDYKVYDVRKMIAKSEQEIGKATAKYFFYSNIMNFFKTEITLANGEIRKRPLIETNGETGEIVWDKGRDFATVRKVLSMPQVNIVKKTEVQTGGFSKESILPKRNSDKLIARKKDWDPKKYGGFDSPTVAYSVLVVAKVEKGKSKKLKSVKELLGITIMERSSFEKNPIDFLEAKGYKEVKKDLIIKLPKYSLFELENGRKRMLASAGELQKGNELALPSKYVNFLYLASHYEKLKGSPEDNEQKQLFVEQHKHYLDEIIEQISEFSKRVILADANLDKVLSAYNKHRDKPIREQAENIIHLFTLTNLGAPAAFKYFDTTIDRKRYTSTKEVLDATLIHQSITGLYETRIDLSQLGGDGGGGGEAAAKGSSGGVLNLEEEYRLHEKPVPSSIDPSWLQLFPTVWAERAGMGLANQVPPVVVELRSGASPVAVRQYPMSKEAREGIRPHIQRFLDLGVLVPCQSPWNTPLLPVKKPGTNDYRPVQDLREINKRVQDIHPTVPNPYNLLSSLPPSHTWYSVLDLKDAFFCLKLHPNSQPLFAFEWRDPEKGNTGQLTWTRLPQGFKNSPTLFNEALHRDLAPFRALNPQVVLLQYVDDLLVAAPTYRDCKEGTQKLLQELSKLGYRVSAKKAQLCQKEVTYLGYLLKEGKRWLTPARKATVMKIPPPTTPRQVREFLGTAGFCRLWIPGFASLAAPLYPLTKPSIPFIWTEEHQKAFDRIKEALLSAPALALPDLTKPFTLYVDERAGVARGVLTQTLGPWRRPVAYLSKKLDPVASGWPTCLKAVAAVALLLKDADKLTLGQNVTVIASHSLESIVRQPPDRWMTNARMTHYQSLLLNERVSFAPPAVLNPATLLPVESEATPVHRCSEILAEETGTRRDLKDQPLPGVPAWYTDGSSFIAEGKRRAGAAIVDGKRTVWASSLPEGTSAQKAELVALTQALRLAEGKDINIYTDSRYAFATAHIHGAIYKQRGWLTSAGKDIKNKEEILALLEAIHLPKRVAIIHCPGHQKGNDPVATGNRRADEAAKQAALSTRVLAETTKPAGKRTADGSEFEKRTADGSEFESPKKKAKVE

SEQ ID NO: 812 - protein, 2094 aa, synthetic construct
MPAAKRVKLDGGDKKYSIGLDIGTNSVGWAVITDEYKVPSKKFKVLGNTDRHSIKKNLIGALLFDSGETAEATRLKRTARRRYTRRKNRICYLQEIFSNEMAKVDDSFFHRLEESFLVEEDKKHERHPIFGNIVDEVAYHEKYPTIYHLRKKLVDSTDKADLRLIYLALAHMIKFRGHFLIEGDLNPDNSDVDKLFIQLVQTYNQLFEENPINASGVDAKAILSARLSKSRRLENLIAQLPGEKKNGLFGNLIALSLGLTPNFKSNFDLAEDAKLQLSKDTYDDDLDNLLAQIGDQYADLFLAAKNLSDAILLSDILRVNTEITKAPLSASMIKRYDEHHQDLTLLKALVRQQLPEKYKEIFFDQSKNGYAGYIDGGASQEEFYKFIKPILEKMDGTEELLVKLNREDLLRKQRTFDNGSIPHQIHLGELHAILRRQEDFYPFLKDNREKIEKILTFRIPYYVGPLARGNSRFAWMTRKSEETITPWNFEEVVDKGASAQSFIERMTNFDKNLPNEKVLPKHSLLYEYFTVYNELTKVKYVTEGMRKPAFLSGEQKKAIVDLLFKTNRKVTVKQLKEDYFKKIECFDSVEISGVEDRFNASLGTYHDLLKIIKDKDFLDNEENEDILEDIVLTLTLFEDREMIEERLKTYAHLFDDKVMKQLKRRRYTGWGRLSRKLINGIRDKQSGKTILDFLKSDGFANRNFMQLIHDDSLTFKEDIQKAQVSGQGDSLHEHIANLAGSPAIKKGILQTVKVVDELVKVMGRHKPENIVIEMARENQTTQKGQKNSRERMKRIEEGIKELGSQILKEHPVENTQLQNEKLYLYYLQNGRDMYVDQELDINRLSDYDVDHIVPQSFLKDDSIDNKVLTRSDKARGKSDNVPSEEVVKKMKNYWRQLLNAKLITQRKFDNLTKAERGGLSELDKAGFIKRQLVETRQITKHVAQILDSRMNTKYDENDKLIREVKVITLKSKLVSDFRKDFQFYKVREINNYHHAHDAYLNAVVGTALIKKYPKLESEFVYGDYKVYDVRKMIAKSEQEIGKATAKYFFYSNIMNFFKTEITLANGEIRKRPLIETNGETGEIVWDKGRDFATVRKVLSMPQVNIVKKTEVQTGGFSKESILPKRNSDKLIARKKDWDPKKYGGFDSPTVAYSVLVVAKVEKGKSKKLKSVKELLGITIMERSSFEKNPIDFLEAKGYKEVKKDLIIKLPKYSLFELENGRKRMLASAGELQKGNELALPSKYVNFLYLASHYEKLKGSPEDNEQKQLFVEQHKHYLDEIIEQISEFSKRVILADANLDKVLSAYNKHRDKPIREQAENIIHLFTLTNLGAPAAFKYFDTTIDRKRYTSTKEVLDATLIHQSITGLYETRIDLSQLGGDGGEAAAKGSSPAPGGVLNLEEEYRLHEKPVPSSIDPSWLQLFPTVWAERAGMGLANQVPPVVVELRSGASPVAVRQYPMSKEAREGIRPHIQRFLDLGVLVPCQSPWNTPLLPVKKPGTNDYRPVQDLREINKRVQDIHPTVPNPYNLLSSLPPSHTWYSVLDLKDAFFCLKLHPNSQPLFAFEWRDPEKGNTGQLTWTRLPQGFKNSPTLFNEALHRDLAPFRALNPQVVLLQYVDDLLVAAPTYRDCKEGTQKLLQELSKLGYRVSAKKAQLCQKEVTYLGYLLKEGKRWLTPARKATVMKIPPPTTPRQVREFLGTAGFCRLWIPGFASLAAPLYPLTKPSIPFIWTEEHQKAFDRIKEALLSAPALALPDLTKPFTLYVDERAGVARGVLTQTLGPWRRPVAYLSKKLDPVASGWPTCLKAVAAVALLLKDADKLTLGQNVTVIASHSLESIVRQPPDRWMTNARMTHYQSLLLNERVSFAPPAVLNPATLLPVESEATPVHRCSEILAEETGTRRDLKDQPLPGVPAWYTDGSSFIAEGKRRAGAAIVDGKRTVWASSLPEGTSAQKAELVALTQALRLAEGKDINIYTDSRYAFATAHIHGAIYKQRGWLTSAGKDIKNKEEILALLEAIHLPKRVAIIHCPGHQKGNDPVATGNRRADEAAKQAALSTRVLAETTKPAGKRTADGSEFEKRTADGSEFESPKKKAKVE

SEQ ID NO: 813 - protein, 2098 aa, synthetic construct
MPAAKRVKLDGGDKKYSIGLDIGTNSVGWAVITDEYKVPSKKFKVLGNTDRHSIKKNLIGALLFDSGETAEATRLKRTARRRYTRRKNRICYLQEIFSNEMAKVDDSFFHRLEESFLVEEDKKHERHPIFGNIVDEVAYHEKYPTIYHLRKKLVDSTDKADLRLIYLALAHMIKFRGHFLIEGDLNPDNSDVDKLFIQLVQTYNQLFEENPINASGVDAKAILSARLSKSRRLENLIAQLPGEKKNGLFGNLIALSLGLTPNFKSNFDLAEDAKLQLSKDTYDDDLDNLLAQIGDQYADLFLAAKNLSDAILLSDILRVNTEITKAPLSASMIKRYDEHHQDLTLLKALVRQQLPEKYKEIFFDQSKNGYAGYIDGGASQEEFYKFIKPILEKMDGTEELLVKLNREDLLRKQRTFDNGSIPHQIHLGELHAILRRQEDFYPFLKDNREKIEKILTFRIPYYVGPLARGNSRFAWMTRKSEETITPWNFEEVVDKGASAQSFIERMTNFDKNLPNEKVLPKHSLLYEYFTVYNELTKVKYVTEGMRKPAFLSGEQKKAIVDLLFKTNRKVTVKQLKEDYFKKIECFDSVEISGVEDRFNASLGTYHDLLKIIKDKDFLDNEENEDILEDIVLTLTLFEDREMIEERLKTYAHLFDDKVMKQLKRRRYTGWGRLSRKLINGIRDKQSGKTILDFLKSDGFANRNFMQLIHDDSLTFKEDIQKAQVSGQGDSLHEHIANLAGSPAIKKGILQTVKVVDELVKVMGRHKPENIVIEMARENQTTQKGQKNSRERMKRIEEGIKELGSQILKEHPVENTQLQNEKLYLYYLQNGRDMYVDQELDINRLSDYDVDHIVPQSFLKDDSIDNKVLTRSDKARGKSDNVPSEEVVKKMKNYWRQLLNAKLITQRKFDNLTKAERGGLSELDKAGFIKRQLVETRQITKHVAQILDSRMNTKYDENDKLIREVKVITLKSKLVSDFRKDFQFYKVREINNYHHAHDAYLNAVVGTALIKKYPKLESEFVYGDYKVYDVRKMIAKSEQEIGKATAKYFFYSNIMNFFKTEITLANGEIRKRPLIETNGETGEIVWDKGRDFATVRKVLSMPQVNIVKKTEVQTGGFSKESILPKRNSDKLIARKKDWDPKKYGGFDSPTVAYSVLVVAKVEKGKSKKLKSVKELLGITIMERSSFEKNPIDFLEAKGYKEVKKDLIIKLPKYSLFELENGRKRMLASAGELQKGNELALPSKYVNFLYLASHYEKLKGSPEDNEQKQLFVEQHKHYLDEIIEQISEFSKRVILADANLDKVLSAYNKHRDKPIREQAENIIHLFTLTNLGAPAAFKYFDTTIDRKRYTSTKEVLDATLIHQSITGLYETRIDLSQLGGDGGGSSGSSGSSGSSGSSGGVLNLEEEYRLHEKPVPSSIDPSWLQLFPTVWAERAGMGLANQVPPVVVELRSGASPVAVRQYPMSKEAREGIRPHIQRFLDLGVLVPCQSPWNTPLLPVKKPGTNDYRPVQDLREINKRVQDIHPTVPNPYNLLSSLPPSHTWYSVLDLKDAFFCLKLHPNSQPLFAFEWRDPEKGNTGQLTWTRLPQGFKNSPTLFNEALHRDLAPFRALNPQVVLLQYVDDLLVAAPTYRDCKEGTQKLLQELSKLGYRVSAKKAQLCQKEVTYLGYLLKEGKRWLTPARKATVMKIPPPTTPRQVREFLGTAGFCRLWIPGFASLAAPLYPLTKPSIPFIWTEEHQKAFDRIKEALLSAPALALPDLTKPFTLYVDERAGVARGVLTQTLGPWRRPVAYLSKKLDPVASGWPTCLKAVAAVALLLKDADKLTLGQNVTVIASHSLESIVRQPPDRWMTNARMTHYQSLLLNERVSFAPPAVLNPATLLPVESEATPVHRCSEILAEETGTRRDLKDQPLPGVPAWYTDGSSFIAEGKRRAGAAIVDGKRTVWASSLPEGTSAQKAELVALTQALRLAEGKDINIYTDSRYAFATAHIHGAIYKQRGWLTSAGKDIKNKEEILALLEAIHLPKRVAIIHCPGHQKGNDPVATGNRRADEAAKQAALSTRVLAETTKPAGKRTADGSEFEKRTADGSEFESPKKKAKVE

SEQ ID NO: 814 - protein, 2094 aa, synthetic construct
MPAAKRVKLDGGDKKYSIGLDIGTNSVGWAVITDEYKVPSKKFKVLGNTDRHSIKKNLIGALLFDSGETAEATRLKRTARRRYTRRKNRICYLQEIFSNEMAKVDDSFFHRLEESFLVEEDKKHERHPIFGNIVDEVAYHEKYPTIYHLRKKLVDSTDKADLRLIYLALAHMIKFRGHFLIEGDLNPDNSDVDKLFIQLVQTYNQLFEENPINASGVDAKAILSARLSKSRRLENLIAQLPGEKKNGLFGNLIALSLGLTPNFKSNFDLAEDAKLQLSKDTYDDDLDNLLAQIGDQYADLFLAAKNLSDAILLSDILRVNTEITKAPLSASMIKRYDEHHQDLTLLKALVRQQLPEKYKEIFFDQSKNGYAGYIDGGASQEEFYKFIKPILEKMDGTEELLVKLNREDLLRKQRTFDNGSIPHQIHLGELHAILRRQEDFYPFLKDNREKIEKILTFRIPYYVGPLARGNSRFAWMTRKSEETITPWNFEEVVDKGASAQSFIERMTNFDKNLPNEKVLPKHSLLYEYFTVYNELTKVKYVTEGMRKPAFLSGEQKKAIVDLLFKTNRKVTVKQLKEDYFKKIECFDSVEISGVEDRFNASLGTYHDLLKIIKDKDFLDNEENEDILEDIVLTLTLFEDREMIEERLKTYAHLFDDKVMKQLKRRRYTGWGRLSRKLINGIRDKQSGKTILDFLKSDGFANRNFMQLIHDDSLTFKEDIQKAQVSGQGDSLHEHIANLAGSPAIKKGILQTVKVVDELVKVMGRHKPENIVIEMARENQTTQKGQKNSRERMKRIEEGIKELGSQILKEHPVENTQLQNEKLYLYYLQNGRDMYVDQELDINRLSDYDVDHIVPQSFLKDDSIDNKVLTRSDKARGKSDNVPSEEVVKKMKNYWRQLLNAKLITQRKFDNLTKAERGGLSELDKAGFIKRQLVETRQITKHVAQILDSRMNTKYDENDKLIREVKVITLKSKLVSDFRKDFQFYKVREINNYHHAHDAYLNAVVGTALIKKYPKLESEFVYGDYKVYDVRKMIAKSEQEIGKATAKYFFYSNIMNFFKTEITLANGEIRKRPLIETNGETGEIVWDKGRDFATVRKVLSMPQVNIVKKTEVQTGGFSKESILPKRNSDKLIARKKDWDPKKYGGFDSPTVAYSVLVVAKVEKGKSKKLKSVKELLGITIMERSSFEKNPIDFLEAKGYKEVKKDLIIKLPKYSLFELENGRKRMLASAGELQKGNELALPSKYVNFLYLASHYEKLKGSPEDNEQKQLFVEQHKHYLDEIIEQISEFSKRVILADANLDKVLSAYNKHRDKPIREQAENIIHLFTLTNLGAPAAFKYFDTTIDRKRYTSTKEVLDATLIHQSITGLYETRIDLSQLGGDGGPAPAPAPAPAPGGVLNLEEEYRLHEKPVPSSIDPSWLQLFPTVWAERAGMGLANQVPPVVVELRSGASPVAVRQYPMSKEAREGIRPHIQRFLDLGVLVPCQSPWNTPLLPVKKPGTNDYRPVQDLREINKRVQDIHPTVPNPYNLLSSLPPSHTWYSVLDLKDAFFCLKLHPNSQPLFAFEWRDPEKGNTGQLTWTRLPQGFKNSPTLFNEALHRDLAPFRALNPQVVLLQYVDDLLVAAPTYRDCKEGTQKLLQELSKLGYRVSAKKAQLCQKEVTYLGYLLKEGKRWLTPARKATVMKIPPPTTPRQVREFLGTAGFCRLWIPGFASLAAPLYPLTKPSIPFIWTEEHQKAFDRIKEALLSAPALALPDLTKPFTLYVDERAGVARGVLTQTLGPWRRPVAYLSKKLDPVASGWPTCLKAVAAVALLLKDADKLTLGQNVTVIASHSLESIVRQPPDRWMTNARMTHYQSLLLNERVSFAPPAVLNPATLLPVESEATPVHRCSEILAEETGTRRDLKDQPLPGVPAWYTDGSSFIAEGKRRAGAAIVDGKRTVWASSLPEGTSAQKAELVALTQALRLAEGKDINIYTDSRYAFATAHIHGAIYKQRGWLTSAGKDIKNKEEILALLEAIHLPKRVAIIHCPGHQKGNDPVATGNRRADEAAKQAALSTRVLAETTKPAGKRTADGSEFEKRTADGSEFESPKKKAKVE

SEQ ID NO: 815 - protein, 2086 aa, synthetic construct
MPAAKRVKLDGGDKKYSIGLDIGTNSVGWAVITDEYKVPSKKFKVLGNTDRHSIKKNLIGALLFDSGETAEATRLKRTARRRYTRRKNRICYLQEIFSNEMAKVDDSFFHRLEESFLVEEDKKHERHPIFGNIVDEVAYHEKYPTIYHLRKKLVDSTDKADLRLIYLALAHMIKFRGHFLIEGDLNPDNSDVDKLFIQLVQTYNQLFEENPINASGVDAKAILSARLSKSRRLENLIAQLPGEKKNGLFGNLIALSLGLTPNFKSNFDLAEDAKLQLSKDTYDDDLDNLLAQIGDQYADLFLAAKNLSDAILLSDILRVNTEITKAPLSASMIKRYDEHHQDLTLLKALVRQQLPEKYKEIFFDQSKNGYAGYIDGGASQEEFYKFIKPILEKMDGTEELLVKLNREDLLRKQRTFDNGSIPHQIHLGELHAILRRQEDFYPFLKDNREKIEKILTFRIPYYVGPLARGNSRFAWMTRKSEETITPWNFEEVVDKGASAQSFIERMTNFDKNLPNEKVLPKHSLLYEYFTVYNELTKVKYVTEGMRKPAFLSGEQKKAIVDLLFKTNRKVTVKQLKEDYFKKIECFDSVEISGVEDRFNASLGTYHDLLKIIKDKDFLDNEENEDILEDIVLTLTLFEDREMIEERLKTYAHLFDDKVMKQLKRRRYTGWGRLSRKLINGIRDKQSGKTILDFLKSDGFANRNFMQLIHDDSLTFKEDIQKAQVSGQGDSLHEHIANLAGSPAIKKGILQTVKVVDELVKVMGRHKPENIVIEMARENQTTQKGQKNSRERMKRIEEGIKELGSQILKEHPVENTQLQNEKLYLYYLQNGRDMYVDQELDINRLSDYDVDHIVPQSFLKDDSIDNKVLTRSDKARGKSDNVPSEEVVKKMKNYWRQLLNAKLITQRKFDNLTKAERGGLSELDKAGFIKRQLVETRQITKHVAQILDSRMNTKYDENDKLIREVKVITLKSKLVSDFRKDFQFYKVREINNYHHAHDAYLNAVVGTALIKKYPKLESEFVYGDYKVYDVRKMIAKSEQEIGKATAKYFFYSNIMNFFKTEITLANGEIRKRPLIETNGETGEIVWDKGRDFATVRKVLSMPQVNIVKKTEVQTGGFSKESILPKRNSDKLIARKKDWDPKKYGGFDSPTVAYSVLVVAKVEKGKSKKLKSVKELLGITIMERSSFEKNPIDFLEAKGYKEVKKDLIIKLPKYSLFELENGRKRMLASAGELQKGNELALPSKYVNFLYLASHYEKLKGSPEDNEQKQLFVEQHKHYLDEIIEQISEFSKRVILADANLDKVLSAYNKHRDKPIREQAENIIHLFTLTNLGAPAAFKYFDTTIDRKRYTSTKEVLDATLIHQSITGLYETRIDLSQLGGDGGGGGGGVLNLEEEYRLHEKPVPSSIDPSWLQLFPTVWAERAGMGLANQVPPVVVELRSGASPVAVRQYPMSKEAREGIRPHIQRFLDLGVLVPCQSPWNTPLLPVKKPGTNDYRPVQDLREINKRVQDIHPTVPNPYNLLSSLPPSHTWYSVLDLKDAFFCLKLHPNSQPLFAFEWRDPEKGNTGQLTWTRLPQGFKNSPTLFNEALHRDLAPFRALNPQVVLLQYVDDLLVAAPTYRDCKEGTQKLLQELSKLGYRVSAKKAQLCQKEVTYLGYLLKEGKRWLTPARKATVMKIPPPTTPRQVREFLGTAGFCRLWIPGFASLAAPLYPLTKPSIPFIWTEEHQKAFDRIKEALLSAPALALPDLTKPFTLYVDERAGVARGVLTQTLGPWRRPVAYLSKKLDPVASGWPTCLKAVAAVALLLKDADKLTLGQNVTVIASHSLESIVRQPPDRWMTNARMTHYQSLLLNERVSFAPPAVLNPATLLPVESEATPVHRCSEILAEETGTRRDLKDQPLPGVPAWYTDGSSFIAEGKRRAGAAIVDGKRTVWASSLPEGTSAQKAELVALTQALRLAEGKDINIYTDSRYAFATAHIHGAIYKQRGWLTSAGKDIKNKEEILALLEAIHLPKRVAIIHCPGHQKGNDPVATGNRRADEAAKQAALSTRVLAETTKPAGKRTADGSEFEKRTADGSEFESPKKKAKVE

SEQ ID NO: 816 - protein, 2087 aa, synthetic construct
MPAAKRVKLDGGDKKYSIGLDIGTNSVGWAVITDEYKVPSKKFKVLGNTDRHSIKKNLIGALLFDSGETAEATRLKRTARRRYTRRKNRICYLQEIFSNEMAKVDDSFFHRLEESFLVEEDKKHERHPIFGNIVDEVAYHEKYPTIYHLRKKLVDSTDKADLRLIYLALAHMIKFRGHFLIEGDLNPDNSDVDKLFIQLVQTYNQLFEENPINASGVDAKAILSARLSKSRRLENLIAQLPGEKKNGLFGNLIALSLGLTPNFKSNFDLAEDAKLQLSKDTYDDDLDNLLAQIGDQYADLFLAAKNLSDAILLSDILRVNTEITKAPLSASMIKRYDEHHQDLTLLKALVRQQLPEKYKEIFFDQSKNGYAGYIDGGASQEEFYKFIKPILEKMDGTEELLVKLNREDLLRKQRTFDNGSIPHQIHLGELHAILRRQEDFYPFLKDNREKIEKILTFRIPYYVGPLARGNSRFAWMTRKSEETITPWNFEEVVDKGASAQSFIERMTNFDKNLPNEKVLPKHSLLYEYFTVYNELTKVKYVTEGMRKPAFLSGEQKKAIVDLLFKTNRKVTVKQLKEDYFKKIECFDSVEISGVEDRFNASLGTYHDLLKIIKDKDFLDNEENEDILEDIVLTLTLFEDREMIEERLKTYAHLFDDKVMKQLKRRRYTGWGRLSRKLINGIRDKQSGKTILDFLKSDGFANRNFMQLIHDDSLTFKEDIQKAQVSGQGDSLHEHIANLAGSPAIKKGILQTVKVVDELVKVMGRHKPENIVIEMARENQTTQKGQKNSRERMKRIEEGIKELGSQILKEHPVENTQLQNEKLYLYYLQNGRDMYVDQELDINRLSDYDVDHIVPQSFLKDDSIDNKVLTRSDKARGKSDNVPSEEVVKKMKNYWRQLLNAKLITQRKFDNLTKAERGGLSELDKAGFIKRQLVETRQITKHVAQILDSRMNTKYDENDKLIREVKVITLKSKLVSDFRKDFQFYKVREINNYHHAHDAYLNAVVGTALIKKYPKLESEFVYGDYKVYDVRKMIAKSEQEIGKATAKYFFYSNIMNFFKTEITLANGEIRKRPLIETNGETGEIVWDKGRDFATVRKVLSMPQVNIVKKTEVQTGGFSKESILPKRNSDKLIARKKDWDPKKYGGFDSPTVAYSVLVVAKVEKGKSKKLKSVKELLGITIMERSSFEKNPIDFLEAKGYKEVKKDLIIKLPKYSLFELENGRKRMLASAGELQKGNELALPSKYVNFLYLASHYEKLKGSPEDNEQKQLFVEQHKHYLDEIIEQISEFSKRVILADANLDKVLSAYNKHRDKPIREQAENIIHLFTLTNLGAPAAFKYFDTTIDRKRYTSTKEVLDATLIHQSITGLYETRIDLSQLGGDGGGGGGGGVLNLEEEYRLHEKPVPSSIDPSWLQLFPTVWAERAGMGLANQVPPVVVELRSGASPVAVRQYPMSKEAREGIRPHIQRFLDLGVLVPCQSPWNTPLLPVKKPGTNDYRPVQDLREINKRVQDIHPTVPNPYNLLSSLPPSHTWYSVLDLKDAFFCLKLHPNSQPLFAFEWRDPEKGNTGQLTWTRLPQGFKNSPTLFNEALHRDLAPFRALNPQVVLLQYVDDLLVAAPTYRDCKEGTQKLLQELSKLGYRVSAKKAQLCQKEVTYLGYLLKEGKRWLTPARKATVMKIPPPTTPRQVREFLGTAGFCRLWIPGFASLAAPLYPLTKPSIPFIWTEEHQKAFDRIKEALLSAPALALPDLTKPFTLYVDERAGVARGVLTQTLGPWRRPVAYLSKKLDPVASGWPTCLKAVAAVALLLKDADKLTLGQNVTVIASHSLESIVRQPPDRWMTNARMTHYQSLLLNERVSFAPPAVLNPATLLPVESEATPVHRCSEILAEETGTRRDLKDQPLPGVPAWYTDGSSFIAEGKRRAGAAIVDGKRTVWASSLPEGTSAQKAELVALTQALRLAEGKDINIYTDSRYAFATAHIHGAIYKQRGWLTSAGKDIKNKEEILALLEAIHLPKRVAIIHCPGHQKGNDPVATGNRRADEAAKQAALSTRVLAETTKPAGKRTADGSEFEKRTADGSEFESPKKKAKVE

SEQ ID NO: 817 - protein, 2091 aa, synthetic construct
MPAAKRVKLDGGDKKYSIGLDIGTNSVGWAVITDEYKVPSKKFKVLGNTDRHSIKKNLIGALLFDSGETAEATRLKRTARRRYTRRKNRICYLQEIFSNEMAKVDDSFFHRLEESFLVEEDKKHERHPIFGNIVDEVAYHEKYPTIYHLRKKLVDSTDKADLRLIYLALAHMIKFRGHFLIEGDLNPDNSDVDKLFIQLVQTYNQLFEENPINASGVDAKAILSARLSKSRRLENLIAQLPGEKKNGLFGNLIALSLGLTPNFKSNFDLAEDAKLQLSKDTYDDDLDNLLAQIGDQYADLFLAAKNLSDAILLSDILRVNTEITKAPLSASMIKRYDEHHQDLTLLKALVRQQLPEKYKEIFFDQSKNGYAGYIDGGASQEEFYKFIKPILEKMDGTEELLVKLNREDLLRKQRTFDNGSIPHQIHLGELHAILRRQEDFYPFLKDNREKIEKILTFRIPYYVGPLARGNSRFAWMTRKSEETITPWNFEEVVDKGASAQSFIERMTNFDKNLPNEKVLPKHSLLYEYFTVYNELTKVKYVTEGMRKPAFLSGEQKKAIVDLLFKTNRKVTVKQLKEDYFKKIECFDSVEISGVEDRFNASLGTYHDLLKIIKDKDFLDNEENEDILEDIVLTLTLFEDREMIEERLKTYAHLFDDKVMKQLKRRRYTGWGRLSRKLINGIRDKQSGKTILDFLKSDGFANRNFMQLIHDDSLTFKEDIQKAQVSGQGDSLHEHIANLAGSPAIKKGILQTVKVVDELVKVMGRHKPENIVIEMARENQTTQKGQKNSRERMKRIEEGIKELGSQILKEHPVENTQLQNEKLYLYYLQNGRDMYVDQELDINRLSDYDVDHIVPQSFLKDDSIDNKVLTRSDKARGKSDNVPSEEVVKKMKNYWRQLLNAKLITQRKFDNLTKAERGGLSELDKAGFIKRQLVETRQITKHVAQILDSRMNTKYDENDKLIREVKVITLKSKLVSDFRKDFQFYKVREINNYHHAHDAYLNAVVGTALIKKYPKLESEFVYGDYKVYDVRKMIAKSEQEIGKATAKYFFYSNIMNFFKTEITLANGEIRKRPLIETNGETGEIVWDKGRDFATVRKVLSMPQVNIVKKTEVQTGGFSKESILPKRNSDKLIARKKDWDPKKYGGFDSPTVAYSVLVVAKVEKGKSKKLKSVKELLGITIMERSSFEKNPIDFLEAKGYKEVKKDLIIKLPKYSLFELENGRKRMLASAGELQKGNELALPSKYVNFLYLASHYEKLKGSPEDNEQKQLFVEQHKHYLDEIIEQISEFSKRVILADANLDKVLSAYNKHRDKPIREQAENIIHLFTLTNLGAPAAFKYFDTTIDRKRYTSTKEVLDATLIHQSITGLYETRIDLSQLGGDGGEAAAKGGGGGVLNLEEEYRLHEKPVPSSIDPSWLQLFPTVWAERAGMGLANQVPPVVVELRSGASPVAVRQYPMSKEAREGIRPHIQRFLDLGVLVPCQSPWNTPLLPVKKPGTNDYRPVQDLREINKRVQDIHPTVPNPYNLLSSLPPSHTWYSVLDLKDAFFCLKLHPNSQPLFAFEWRDPEKGNTGQLTWTRLPQGFKNSPTLFNEALHRDLAPFRALNPQVVLLQYVDDLLVAAPTYRDCKEGTQKLLQELSKLGYRVSAKKAQLCQKEVTYLGYLLKEGKRWLTPARKATVMKIPPPTTPRQVREFLGTAGFCRLWIPGFASLAAPLYPLTKPSIPFIWTEEHQKAFDRIKEALLSAPALALPDLTKPFTLYVDERAGVARGVLTQTLGPWRRPVAYLSKKLDPVASGWPTCLKAVAAVALLLKDADKLTLGQNVTVIASHSLESIVRQPPDRWMTNARMTHYQSLLLNERVSFAPPAVLNPATLLPVESEATPVHRCSEILAEETGTRRDLKDQPLPGVPAWYTDGSSFIAEGKRRAGAAIVDGKRTVWASSLPEGTSAQKAELVALTQALRLAEGKDINIYTDSRYAFATAHIHGAIYKQRGWLTSAGKDIKNKEEILALLEAIHLPKRVAIIHCPGHQKGNDPVATGNRRADEAAKQAALSTRVLAETTKPAGKRTADGSEFEKRTADGSEFESPKKKAKVE

SEQ ID NO: 818 - protein, 2101 aa, synthetic construct
MPAAKRVKLDGGDKKYSIGLDIGTNSVGWAVITDEYKVPSKKFKVLGNTDRHSIKKNLIGALLFDSGETAEATRLKRTARRRYTRRKNRICYLQEIFSNEMAKVDDSFFHRLEESFLVEEDKKHERHPIFGNIVDEVAYHEKYPTIYHLRKKLVDSTDKADLRLIYLALAHMIKFRGHFLIEGDLNPDNSDVDKLFIQLVQTYNQLFEENPINASGVDAKAILSARLSKSRRLENLIAQLPGEKKNGLFGNLIALSLGLTPNFKSNFDLAEDAKLQLSKDTYDDDLDNLLAQIGDQYADLFLAAKNLSDAILLSDILRVNTEITKAPLSASMIKRYDEHHQDLTLLKALVRQQLPEKYKEIFFDQSKNGYAGYIDGGASQEEFYKFIKPILEKMDGTEELLVKLNREDLLRKQRTFDNGSIPHQIHLGELHAILRRQEDFYPFLKDNREKIEKILTFRIPYYVGPLARGNSRFAWMTRKSEETITPWNFEEVVDKGASAQSFIERMTNFDKNLPNEKVLPKHSLLYEYFTVYNELTKVKYVTEGMRKPAFLSGEQKKAIVDLLFKTNRKVTVKQLKEDYFKKIECFDSVEISGVEDRFNASLGTYHDLLKIIKDKDFLDNEENEDILEDIVLTLTLFEDREMIEERLKTYAHLFDDKVMKQLKRRRYTGWGRLSRKLINGIRDKQSGKTILDFLKSDGFANRNFMQLIHDDSLTFKEDIQKAQVSGQGDSLHEHIANLAGSPAIKKGILQTVKVVDELVKVMGRHKPENIVIEMARENQTTQKGQKNSRERMKRIEEGIKELGSQILKEHPVENTQLQNEKLYLYYLQNGRDMYVDQELDINRLSDYDVDHIVPQSFLKDDSIDNKVLTRSDKARGKSDNVPSEEVVKKMKNYWRQLLNAKLITQRKFDNLTKAERGGLSELDKAGFIKRQLVETRQITKHVAQILDSRMNTKYDENDKLIREVKVITLKSKLVSDFRKDFQFYKVREINNYHHAHDAYLNAVVGTALIKKYPKLESEFVYGDYKVYDVRKMIAKSEQEIGKATAKYFFYSNIMNFFKTEITLANGEIRKRPLIETNGETGEIVWDKGRDFATVRKVLSMPQVNIVKKTEVQTGGFSKESILPKRNSDKLIARKKDWDPKKYGGFDSPTVAYSVLVVAKVEKGKSKKLKSVKELLGITIMERSSFEKNPIDFLEAKGYKEVKKDLIIKLPKYSLFELENGRKRMLASAGELQKGNELALPSKYVNFLYLASHYEKLKGSPEDNEQKQLFVEQHKHYLDEIIEQISEFSKRVILADANLDKVLSAYNKHRDKPIREQAENIIHLFTLTNLGAPAAFKYFDTTIDRKRYTSTKEVLDATLIHQSITGLYETRIDLSQLGGDGGGSSGSSGSSGSSGSSGSSGGVLNLEEEYRLHEKPVPSSIDPSWLQLFPTVWAERAGMGLANQVPPVVVELRSGASPVAVRQYPMSKEAREGIRPHIQRFLDLGVLVPCQSPWNTPLLPVKKPGTNDYRPVQDLREINKRVQDIHPTVPNPYNLLSSLPPSHTWYSVLDLKDAFFCLKLHPNSQPLFAFEWRDPEKGNTGQLTWTRLPQGFKNSPTLFNEALHRDLAPFRALNPQVVLLQYVDDLLVAAPTYRDCKEGTQKLLQELSKLGYRVSAKKAQLCQKEVTYLGYLLKEGKRWLTPARKATVMKIPPPTTPRQVREFLGTAGFCRLWIPGFASLAAPLYPLTKPSIPFIWTEEHQKAFDRIKEALLSAPALALPDLTKPFTLYVDERAGVARGVLTQTLGPWRRPVAYLSKKLDPVASGWPTCLKAVAAVALLLKDADKLTLGQNVTVIASHSLESIVRQPPDRWMTNARMTHYQSLLLNERVSFAPPAVLNPATLLPVESEATPVHRCSEILAEETGTRRDLKDQPLPGVPAWYTDGSSFIAEGKRRAGAAIVDGKRTVWASSLPEGTSAQKAELVALTQALRLAEGKDINIYTDSRYAFATAHIHGAIYKQRGWLTSAGKDIKNKEEILALLEAIHLPKRVAIIHCPGHQKGNDPVATGNRRADEAAKQAALSTRVLAETTKPAGKRTADGSEFEKRTADGSEFESPKKKAKVE

SEQ ID NO: 819 - protein, 2091 aa, synthetic construct
MPAAKRVKLDGGDKKYSIGLDIGTNSVGWAVITDEYKVPSKKFKVLGNTDRHSIKKNLIGALLFDSGETAEATRLKRTARRRYTRRKNRICYLQEIFSNEMAKVDDSFFHRLEESFLVEEDKKHERHPIFGNIVDEVAYHEKYPTIYHLRKKLVDSTDKADLRLIYLALAHMIKFRGHFLIEGDLNPDNSDVDKLFIQLVQTYNQLFEENPINASGVDAKAILSARLSKSRRLENLIAQLPGEKKNGLFGNLIALSLGLTPNFKSNFDLAEDAKLQLSKDTYDDDLDNLLAQIGDQYADLFLAAKNLSDAILLSDILRVNTEITKAPLSASMIKRYDEHHQDLTLLKALVRQQLPEKYKEIFFDQSKNGYAGYIDGGASQEEFYKFIKPILEKMDGTEELLVKLNREDLLRKQRTFDNGSIPHQIHLGELHAILRRQEDFYPFLKDNREKIEKILTFRIPYYVGPLARGNSRFAWMTRKSEETITPWNFEEVVDKGASAQSFIERMTNFDKNLPNEKVLPKHSLLYEYFTVYNELTKVKYVTEGMRKPAFLSGEQKKAIVDLLFKTNRKVTVKQLKEDYFKKIECFDSVEISGVEDRFNASLGTYHDLLKIIKDKDFLDNEENEDILEDIVLTLTLFEDREMIEERLKTYAHLFDDKVMKQLKRRRYTGWGRLSRKLINGIRDKQSGKTILDFLKSDGFANRNFMQLIHDDSLTFKEDIQKAQVSGQGDSLHEHIANLAGSPAIKKGILQTVKVVDELVKVMGRHKPENIVIEMARENQTTQKGQKNSRERMKRIEEGIKELGSQILKEHPVENTQLQNEKLYLYYLQNGRDMYVDQELDINRLSDYDVDHIVPQSFLKDDSIDNKVLTRSDKARGKSDNVPSEEVVKKMKNYWRQLLNAKLITQRKFDNLTKAERGGLSELDKAGFIKRQLVETRQITKHVAQILDSRMNTKYDENDKLIREVKVITLKSKLVSDFRKDFQFYKVREINNYHHAHDAYLNAVVGTALIKKYPKLESEFVYGDYKVYDVRKMIAKSEQEIGKATAKYFFYSNIMNFFKTEITLANGEIRKRPLIETNGETGEIVWDKGRDFATVRKVLSMPQVNIVKKTEVQTGGFSKESILPKRNSDKLIARKKDWDPKKYGGFDSPTVAYSVLVVAKVEKGKSKKLKSVKELLGITIMERSSFEKNPIDFLEAKGYKEVKKDLIIKLPKYSLFELENGRKRMLASAGELQKGNELALPSKYVNFLYLASHYEKLKGSPEDNEQKQLFVEQHKHYLDEIIEQISEFSKRVILADANLDKVLSAYNKHRDKPIREQAENIIHLFTLTNLGAPAAFKYFDTTIDRKRYTSTKEVLDATLIHQSITGLYETRIDLSQLGGDGGPAPEAAAKGGVLNLEEEYRLHEKPVPSSIDPSWLQLFPTVWAERAGMGLANQVPPVVVELRSGASPVAVRQYPMSKEAREGIRPHIQRFLDLGVLVPCQSPWNTPLLPVKKPGTNDYRPVQDLREINKRVQDIHPTVPNPYNLLSSLPPSHTWYSVLDLKDAFFCLKLHPNSQPLFAFEWRDPEKGNTGQLTWTRLPQGFKNSPTLFNEALHRDLAPFRALNPQVVLLQYVDDLLVAAPTYRDCKEGTQKLLQELSKLGYRVSAKKAQLCQKEVTYLGYLLKEGKRWLTPARKATVMKIPPPTTPRQVREFLGTAGFCRLWIPGFASLAAPLYPLTKPSIPFIWTEEHQKAFDRIKEALLSAPALALPDLTKPFTLYVDERAGVARGVLTQTLGPWRRPVAYLSKKLDPVASGWPTCLKAVAAVALLLKDADKLTLGQNVTVIASHSLESIVRQPPDRWMTNARMTHYQSLLLNERVSFAPPAVLNPATLLPVESEATPVHRCSEILAEETGTRRDLKDQPLPGVPAWYTDGSSFIAEGKRRAGAAIVDGKRTVWASSLPEGTSAQKAELVALTQALRLAEGKDINIYTDSRYAFATAHIHGAIYKQRGWLTSAGKDIKNKEEILALLEAIHLPKRVAIIHCPGHQKGNDPVATGNRRADEAAKQAALSTRVLAETTKPAGKRTADGSEFEKRTADGSEFESPKKKAKVE

SEQ ID NO: 820 - protein, 2094 aa, synthetic construct
MPAAKRVKLDGGDKKYSIGLDIGTNSVGWAVITDEYKVPSKKFKVLGNTDRHSIKKNLIGALLFDSGETAEATRLKRTARRRYTRRKNRICYLQEIFSNEMAKVDDSFFHRLEESFLVEEDKKHERHPIFGNIVDEVAYHEKYPTIYHLRKKLVDSTDKADLRLIYLALAHMIKFRGHFLIEGDLNPDNSDVDKLFIQLVQTYNQLFEENPINASGVDAKAILSARLSKSRRLENLIAQLPGEKKNGLFGNLIALSLGLTPNFKSNFDLAEDAKLQLSKDTYDDDLDNLLAQIGDQYADLFLAAKNLSDAILLSDILRVNTEITKAPLSASMIKRYDEHHQDLTLLKALVRQQLPEKYKEIFFDQSKNGYAGYIDGGASQEEFYKFIKPILEKMDGTEELLVKLNREDLLRKQRTFDNGSIPHQIHLGELHAILRRQEDFYPFLKDNREKIEKILTFRIPYYVGPLARGNSRFAWMTRKSEETITPWNFEEVVDKGASAQSFIERMTNFDKNLPNEKVLPKHSLLYEYFTVYNELTKVKYVTEGMRKPAFLSGEQKKAIVDLLFKTNRKVTVKQLKEDYFKKIECFDSVEISGVEDRFNASLGTYHDLLKIIKDKDFLDNEENEDILEDIVLTLTLFEDREMIEERLKTYAHLFDDKVMKQLKRRRYTGWGRLSRKLINGIRDKQSGKTILDFLKSDGFANRNFMQLIHDDSLTFKEDIQKAQVSGQGDSLHEHIANLAGSPAIKKGILQTVKVVDELVKVMGRHKPENIVIEMARENQTTQKGQKNSRERMKRIEEGIKELGSQILKEHPVENTQLQNEKLYLYYLQNGRDMYVDQELDINRLSDYDVDHIVPQSFLKDDSIDNKVLTRSDKARGKSDNVPSEEVVKKMKNYWRQLLNAKLITQRKFDNLTKAERGGLSELDKAGFIKRQLVETRQITKHVAQILDSRMNTKYDENDKLIREVKVITLKSKLVSDFRKDFQFYKVREINNYHHAHDAYLNAVVGTALIKKYPKLESEFVYGDYKVYDVRKMIAKSEQEIGKATAKYFFYSNIMNFFKTEITLANGEIRKRPLIETNGETGEIVWDKGRDFATVRKVLSMPQVNIVKKTEVQTGGFSKESILPKRNSDKLIARKKDWDPKKYGGFDSPTVAYSVLVVAKVEKGKSKKLKSVKELLGITIMERSSFEKNPIDFLEAKGYKEVKKDLIIKLPKYSLFELENGRKRMLASAGELQKGNELALPSKYVNFLYLASHYEKLKGSPEDNEQKQLFVEQHKHYLDEIIEQISEFSKRVILADANLDKVLSAYNKHRDKPIREQAENIIHLFTLTNLGAPAAFKYFDTTIDRKRYTSTKEVLDATLIHQSITGLYETRIDLSQLGGDGGEAAAKGGSGSSGGVLNLEEEYRLHEKPVPSSIDPSWLQLFPTVWAERAGMGLANQVPPVVVELRSGASPVAVRQYPMSKEAREGIRPHIQRFLDLGVLVPCQSPWNTPLLPVKKPGTNDYRPVQDLREINKRVQDIHPTVPNPYNLLSSLPPSHTWYSVLDLKDAFFCLKLHPNSQPLFAFEWRDPEKGNTGQLTWTRLPQGFKNSPTLFNEALHRDLAPFRALNPQVVLLQYVDDLLVAAPTYRDCKEGTQKLLQELSKLGYRVSAKKAQLCQKEVTYLGYLLKEGKRWLTPARKATVMKIPPPTTPRQVREFLGTAGFCRLWIPGFASLAAPLYPLTKPSIPFIWTEEHQKAFDRIKEALLSAPALALPDLTKPFTLYVDERAGVARGVLTQTLGPWRRPVAYLSKKLDPVASGWPTCLKAVAAVALLLKDADKLTLGQNVTVIASHSLESIVRQPPDRWMTNARMTHYQSLLLNERVSFAPPAVLNPATLLPVESEATPVHRCSEILAEETGTRRDLKDQPLPGVPAWYTDGSSFIAEGKRRAGAAIVDGKRTVWASSLPEGTSAQKAELVALTQALRLAEGKDINIYTDSRYAFATAHIHGAIYKQRGWLTSAGKDIKNKEEILALLEAIHLPKRVAIIHCPGHQKGNDPVATGNRRADEAAKQAALSTRVLAETTKPAGKRTADGSEFEKRTADGSEFESPKKKAKVE

SEQ ID NO: 821 - protein, 2092 aa, synthetic construct
MPAAKRVKLDGGDKKYSIGLDIGTNSVGWAVITDEYKVPSKKFKVLGNTDRHSIKKNLIGALLFDSGETAEATRLKRTARRRYTRRKNRICYLQEIFSNEMAKVDDSFFHRLEESFLVEEDKKHERHPIFGNIVDEVAYHEKYPTIYHLRKKLVDSTDKADLRLIYLALAHMIKFRGHFLIEGDLNPDNSDVDKLFIQLVQTYNQLFEENPINASGVDAKAILSARLSKSRRLENLIAQLPGEKKNGLFGNLIALSLGLTPNFKSNFDLAEDAKLQLSKDTYDDDLDNLLAQIGDQYADLFLAAKNLSDAILLSDILRVNTEITKAPLSASMIKRYDEHHQDLTLLKALVRQQLPEKYKEIFFDQSKNGYAGYIDGGASQEEFYKFIKPILEKMDGTEELLVKLNREDLLRKQRTFDNGSIPHQIHLGELHAILRRQEDFYPFLKDNREKIEKILTFRIPYYVGPLARGNSRFAWMTRKSEETITPWNFEEVVDKGASAQSFIERMTNFDKNLPNEKVLPKHSLLYEYFTVYNELTKVKYVTEGMRKPAFLSGEQKKAIVDLLFKTNRKVTVKQLKEDYFKKIECFDSVEISGVEDRFNASLGTYHDLLKIIKDKDFLDNEENEDILEDIVLTLTLFEDREMIEERLKTYAHLFDDKVMKQLKRRRYTGWGRLSRKLINGIRDKQSGKTILDFLKSDGFANRNFMQLIHDDSLTFKEDIQKAQVSGQGDSLHEHIANLAGSPAIKKGILQTVKVVDELVKVMGRHKPENIVIEMARENQTTQKGQKNSRERMKRIEEGIKELGSQILKEHPVENTQLQNEKLYLYYLQNGRDMYVDQELDINRLSDYDVDHIVPQSFLKDDSIDNKVLTRSDKARGKSDNVPSEEVVKKMKNYWRQLLNAKLITQRKFDNLTKAERGGLSELDKAGFIKRQLVETRQITKHVAQILDSRMNTKYDENDKLIREVKVITLKSKLVSDFRKDFQFYKVREINNYHHAHDAYLNAVVGTALIKKYPKLESEFVYGDYKVYDVRKMIAKSEQEIGKATAKYFFYSNIMNFFKTEITLANGEIRKRPLIETNGETGEIVWDKGRDFATVRKVLSMPQVNIVKKTEVQTGGFSKESILPKRNSDKLIARKKDWDPKKYGGFDSPTVAYSVLVVAKVEKGKSKKLKSVKELLGITIMERSSFEKNPIDFLEAKGYKEVKKDLIIKLPKYSLFELENGRKRMLASAGELQKGNELALPSKYVNFLYLASHYEKLKGSPEDNEQKQLFVEQHKHYLDEIIEQISEFSKRVILADANLDKVLSAYNKHRDKPIREQAENIIHLFTLTNLGAPAAFKYFDTTIDRKRYTSTKEVLDATLIHQSITGLYETRIDLSQLGGDGGPAPAPAPAPGGVLNLEEEYRLHEKPVPSSIDPSWLQLFPTVWAERAGMGLANQVPPVVVELRSGASPVAVRQYPMSKEAREGIRPHIQRFLDLGVLVPCQSPWNTPLLPVKKPGTNDYRPVQDLREINKRVQDIHPTVPNPYNLLSSLPPSHTWYSVLDLKDAFFCLKLHPNSQPLFAFEWRDPEKGNTGQLTWTRLPQGFKNSPTLFNEALHRDLAPFRALNPQVVLLQYVDDLLVAAPTYRDCKEGTQKLLQELSKLGYRVSAKKAQLCQKEVTYLGYLLKEGKRWLTPARKATVMKIPPPTTPRQVREFLGTAGFCRLWIPGFASLAAPLYPLTKPSIPFIWTEEHQKAFDRIKEALLSAPALALPDLTKPFTLYVDERAGVARGVLTQTLGPWRRPVAYLSKKLDPVASGWPTCLKAVAAVALLLKDADKLTLGQNVTVIASHSLESIVRQPPDRWMTNARMTHYQSLLLNERVSFAPPAVLNPATLLPVESEATPVHRCSEILAEETGTRRDLKDQPLPGVPAWYTDGSSFIAEGKRRAGAAIVDGKRTVWASSLPEGTSAQKAELVALTQALRLAEGKDINIYTDSRYAFATAHIHGAIYKQRGWLTSAGKDIKNKEEILALLEAIHLPKRVAIIHCPGHQKGNDPVATGNRRADEAAKQAALSTRVLAETTKPAGKRTADGSEFEKRTADGSEFESPKKKAKVE

SEQ ID NO: 822 - protein, 2094 aa, synthetic construct
MPAAKRVKLDGGDKKYSIGLDIGTNSVGWAVITDEYKVPSKKFKVLGNTDRHSIKKNLIGALLFDSGETAEATRLKRTARRRYTRRKNRICYLQEIFSNEMAKVDDSFFHRLEESFLVEEDKKHERHPIFGNIVDEVAYHEKYPTIYHLRKKLVDSTDKADLRLIYLALAHMIKFRGHFLIEGDLNPDNSDVDKLFIQLVQTYNQLFEENPINASGVDAKAILSARLSKSRRLENLIAQLPGEKKNGLFGNLIALSLGLTPNFKSNFDLAEDAKLQLSKDTYDDDLDNLLAQIGDQYADLFLAAKNLSDAILLSDILRVNTEITKAPLSASMIKRYDEHHQDLTLLKALVRQQLPEKYKEIFFDQSKNGYAGYIDGGASQEEFYKFIKPILEKMDGTEELLVKLNREDLLRKQRTFDNGSIPHQIHLGELHAILRRQEDFYPFLKDNREKIEKILTFRIPYYVGPLARGNSRFAWMTRKSEETITPWNFEEVVDKGASAQSFIERMTNFDKNLPNEKVLPKHSLLYEYFTVYNELTKVKYVTEGMRKPAFLSGEQKKAIVDLLFKTNRKVTVKQLKEDYFKKIECFDSVEISGVEDRFNASLGTYHDLLKIIKDKDFLDNEENEDILEDIVLTLTLFEDREMIEERLKTYAHLFDDKVMKQLKRRRYTGWGRLSRKLINGIRDKQSGKTILDFLKSDGFANRNFMQLIHDDSLTFKEDIQKAQVSGQGDSLHEHIANLAGSPAIKKGILQTVKVVDELVKVMGRHKPENIVIEMARENQTTQKGQKNSRERMKRIEEGIKELGSQILKEHPVENTQLQNEKLYLYYLQNGRDMYVDQELDINRLSDYDVDHIVPQSFLKDDSIDNKVLTRSDKARGKSDNVPSEEVVKKMKNYWRQLLNAKLITQRKFDNLTKAERGGLSELDKAGFIKRQLVETRQITKHVAQILDSRMNTKYDENDKLIREVKVITLKSKLVSDFRKDFQFYKVREINNYHHAHDAYLNAVVGTALIKKYPKLESEFVYGDYKVYDVRKMIAKSEQEIGKATAKYFFYSNIMNFFKTEITLANGEIRKRPLIETNGETGEIVWDKGRDFATVRKVLSMPQVNIVKKTEVQTGGFSKESILPKRNSDKLIARKKDWDPKKYGGFDSPTVAYSVLVVAKVEKGKSKKLKSVKELLGITIMERSSFEKNPIDFLEAKGYKEVKKDLIIKLPKYSLFELENGRKRMLASAGELQKGNELALPSKYVNFLYLASHYEKLKGSPEDNEQKQLFVEQHKHYLDEIIEQISEFSKRVILADANLDKVLSAYNKHRDKPIREQAENIIHLFTLTNLGAPAAFKYFDTTIDRKRYTSTKEVLDATLIHQSITGLYETRIDLSQLGGDGGEAAAKGGGPAPGGVLNLEEEYRLHEKPVPSSIDPSWLQLFPTVWAERAGMGLANQVPPVVVELRSGASPVAVRQYPMSKEAREGIRPHIQRFLDLGVLVPCQSPWNTPLLPVKKPGTNDYRPVQDLREINKRVQDIHPTVPNPYNLLSSLPPSHTWYSVLDLKDAFFCLKLHPNSQPLFAFEWRDPEKGNTGQLTWTRLPQGFKNSPTLFNEALHRDLAPFRALNPQVVLLQYVDDLLVAAPTYRDCKEGTQKLLQELSKLGYRVSAKKAQLCQKEVTYLGYLLKEGKRWLTPARKATVMKIPPPTTPRQVREFLGTAGFCRLWIPGFASLAAPLYPLTKPSIPFIWTEEHQKAFDRIKEALLSAPALALPDLTKPFTLYVDERAGVARGVLTQTLGPWRRPVAYLSKKLDPVASGWPTCLKAVAAVALLLKDADKLTLGQNVTVIASHSLESIVRQPPDRWMTNARMTHYQSLLLNERVSFAPPAVLNPATLLPVESEATPVHRCSEILAEETGTRRDLKDQPLPGVPAWYTDGSSFIAEGKRRAGAAIVDGKRTVWASSLPEGTSAQKAELVALTQALRLAEGKDINIYTDSRYAFATAHIHGAIYKQRGWLTSAGKDIKNKEEILALLEAIHLPKRVAIIHCPGHQKGNDPVATGNRRADEAAKQAALSTRVLAETTKPAGKRTADGSEFEKRTADGSEFESPKKKAKVE

SEQ ID NO: 823 - protein, 2088 aa, synthetic construct
MPAAKRVKLDGGDKKYSIGLDIGTNSVGWAVITDEYKVPSKKFKVLGNTDRHSIKKNLIGALLFDSGETAEATRLKRTARRRYTRRKNRICYLQEIFSNEMAKVDDSFFHRLEESFLVEEDKKHERHPIFGNIVDEVAYHEKYPTIYHLRKKLVDSTDKADLRLIYLALAHMIKFRGHFLIEGDLNPDNSDVDKLFIQLVQTYNQLFEENPINASGVDAKAILSARLSKSRRLENLIAQLPGEKKNGLFGNLIALSLGLTPNFKSNFDLAEDAKLQLSKDTYDDDLDNLLAQIGDQYADLFLAAKNLSDAILLSDILRVNTEITKAPLSASMIKRYDEHHQDLTLLKALVRQQLPEKYKEIFFDQSKNGYAGYIDGGASQEEFYKFIKPILEKMDGTEELLVKLNREDLLRKQRTFDNGSIPHQIHLGELHAILRRQEDFYPFLKDNREKIEKILTFRIPYYVGPLARGNSRFAWMTRKSEETITPWNFEEVVDKGASAQSFIERMTNFDKNLPNEKVLPKHSLLYEYFTVYNELTKVKYVTEGMRKPAFLSGEQKKAIVDLLFKTNRKVTVKQLKEDYFKKIECFDSVEISGVEDRFNASLGTYHDLLKIIKDKDFLDNEENEDILEDIVLTLTLFEDREMIEERLKTYAHLFDDKVMKQLKRRRYTGWGRLSRKLINGIRDKQSGKTILDFLKSDGFANRNFMQLIHDDSLTFKEDIQKAQVSGQGDSLHEHIANLAGSPAIKKGILQTVKVVDELVKVMGRHKPENIVIEMARENQTTQKGQKNSRERMKRIEEGIKELGSQILKEHPVENTQLQNEKLYLYYLQNGRDMYVDQELDINRLSDYDVDHIVPQSFLKDDSIDNKVLTRSDKARGKSDNVPSEEVVKKMKNYWRQLLNAKLITQRKFDNLTKAERGGLSELDKAGFIKRQLVETRQITKHVAQILDSRMNTKYDENDKLIREVKVITLKSKLVSDFRKDFQFYKVREINNYHHAHDAYLNAVVGTALIKKYPKLESEFVYGDYKVYDVRKMIAKSEQEIGKATAKYFFYSNIMNFFKTEITLANGEIRKRPLIETNGETGEIVWDKGRDFATVRKVLSMPQVNIVKKTEVQTGGFSKESILPKRNSDKLIARKKDWDPKKYGGFDSPTVAYSVLVVAKVEKGKSKKLKSVKELLGITIMERSSFEKNPIDFLEAKGYKEVKKDLIIKLPKYSLFELENGRKRMLASAGELQKGNELALPSKYVNFLYLASHYEKLKGSPEDNEQKQLFVEQHKHYLDEIIEQISEFSKRVILADANLDKVLSAYNKHRDKPIREQAENIIHLFTLTNLGAPAAFKYFDTTIDRKRYTSTKEVLDATLIHQSITGLYETRIDLSQLGGDGGEAAAKGGVLNLEEEYRLHEKPVPSSIDPSWLQLFPTVWAERAGMGLANQVPPVVVELRSGASPVAVRQYPMSKEAREGIRPHIQRFLDLGVLVPCQSPWNTPLLPVKKPGTNDYRPVQDLREINKRVQDIHPTVPNPYNLLSSLPPSHTWYSVLDLKDAFFCLKLHPNSQPLFAFEWRDPEKGNTGQLTWTRLPQGFKNSPTLFNEALHRDLAPFRALNPQVVLLQYVDDLLVAAPTYRDCKEGTQKLLQELSKLGYRVSAKKAQLCQKEVTYLGYLLKEGKRWLTPARKATVMKIPPPTTPRQVREFLGTAGFCRLWIPGFASLAAPLYPLTKPSIPFIWTEEHQKAFDRIKEALLSAPALALPDLTKPFTLYVDERAGVARGVLTQTLGPWRRPVAYLSKKLDPVASGWPTCLKAVAAVALLLKDADKLTLGQNVTVIASHSLESIVRQPPDRWMTNARMTHYQSLLLNERVSFAPPAVLNPATLLPVESEATPVHRCSEILAEETGTRRDLKDQPLPGVPAWYTDGSSFIAEGKRRAGAAIVDGKRTVWASSLPEGTSAQKAELVALTQALRLAEGKDINIYTDSRYAFATAHIHGAIYKQRGWLTSAGKDIKNKEEILALLEAIHLPKRVAIIHCPGHQKGNDPVATGNRRADEAAKQAALSTRVLAETTKPAGKRTADGSEFEKRTADGSEFESPKKKAKVE

SEQ ID NO: 824 - protein, 2095 aa, synthetic construct
MPAAKRVKLDGGDKKYSIGLDIGTNSVGWAVITDEYKVPSKKFKVLGNTDRHSIKKNLIGALLFDSGETAEATRLKRTARRRYTRRKNRICYLQEIFSNEMAKVDDSFFHRLEESFLVEEDKKHERHPIFGNIVDEVAYHEKYPTIYHLRKKLVDSTDKADLRLIYLALAHMIKFRGHFLIEGDLNPDNSDVDKLFIQLVQTYNQLFEENPINASGVDAKAILSARLSKSRRLENLIAQLPGEKKNGLFGNLIALSLGLTPNFKSNFDLAEDAKLQLSKDTYDDDLDNLLAQIGDQYADLFLAAKNLSDAILLSDILRVNTEITKAPLSASMIKRYDEHHQDLTLLKALVRQQLPEKYKEIFFDQSKNGYAGYIDGGASQEEFYKFIKPILEKMDGTEELLVKLNREDLLRKQRTFDNGSIPHQIHLGELHAILRRQEDFYPFLKDNREKIEKILTFRIPYYVGPLARGNSRFAWMTRKSEETITPWNFEEVVDKGASAQSFIERMTNFDKNLPNEKVLPKHSLLYEYFTVYNELTKVKYVTEGMRKPAFLSGEQKKAIVDLLFKTNRKVTVKQLKEDYFKKIECFDSVEISGVEDRFNASLGTYHDLLKIIKDKDFLDNEENEDILEDIVLTLTLFEDREMIEERLKTYAHLFDDKVMKQLKRRRYTGWGRLSRKLINGIRDKQSGKTILDFLKSDGFANRNFMQLIHDDSLTFKEDIQKAQVSGQGDSLHEHIANLAGSPAIKKGILQTVKVVDELVKVMGRHKPENIVIEMARENQTTQKGQKNSRERMKRIEEGIKELGSQILKEHPVENTQLQNEKLYLYYLQNGRDMYVDQELDINRLSDYDVDHIVPQSFLKDDSIDNKVLTRSDKARGKSDNVPSEEVVKKMKNYWRQLLNAKLITQRKFDNLTKAERGGLSELDKAGFIKRQLVETRQITKHVAQILDSRMNTKYDENDKLIREVKVITLKSKLVSDFRKDFQFYKVREINNYHHAHDAYLNAVVGTALIKKYPKLESEFVYGDYKVYDVRKMIAKSEQEIGKATAKYFFYSNIMNFFKTEITLANGEIRKRPLIETNGETGEIVWDKGRDFATVRKVLSMPQVNIVKKTEVQTGGFSKESILPKRNSDKLIARKKDWDPKKYGGFDSPTVAYSVLVVAKVEKGKSKKLKSVKELLGITIMERSSFEKNPIDFLEAKGYKEVKKDLIIKLPKYSLFELENGRKRMLASAGELQKGNELALPSKYVNFLYLASHYEKLKGSPEDNEQKQLFVEQHKHYLDEIIEQISEFSKRVILADANLDKVLSAYNKHRDKPIREQAENIIHLFTLTNLGAPAAFKYFDTTIDRKRYTSTKEVLDATLIHQSITGLYETRIDLSQLGGDGGGGSGGSGGSGGSGGVLNLEEEYRLHEKPVPSSIDPSWLQLFPTVWAERAGMGLANQVPPVVVELRSGASPVAVRQYPMSKEAREGIRPHIQRFLDLGVLVPCQSPWNTPLLPVKKPGTNDYRPVQDLREINKRVQDIHPTVPNPYNLLSSLPPSHTWYSVLDLKDAFFCLKLHPNSQPLFAFEWRDPEKGNTGQLTWTRLPQGFKNSPTLFNEALHRDLAPFRALNPQVVLLQYVDDLLVAAPTYRDCKEGTQKLLQELSKLGYRVSAKKAQLCQKEVTYLGYLLKEGKRWLTPARKATVMKIPPPTTPRQVREFLGTAGFCRLWIPGFASLAAPLYPLTKPSIPFIWTEEHQKAFDRIKEALLSAPALALPDLTKPFTLYVDERAGVARGVLTQTLGPWRRPVAYLSKKLDPVASGWPTCLKAVAAVALLLKDADKLTLGQNVTVIASHSLESIVRQPPDRWMTNARMTHYQSLLLNERVSFAPPAVLNPATLLPVESEATPVHRCSEILAEETGTRRDLKDQPLPGVPAWYTDGSSFIAEGKRRAGAAIVDGKRTVWASSLPEGTSAQKAELVALTQALRLAEGKDINIYTDSRYAFATAHIHGAIYKQRGWLTSAGKDIKNKEEILALLEAIHLPKRVAIIHCPGHQKGNDPVATGNRRADEAAKQAALSTRVLAETTKPAGKRTADGSEFEKRTADGSEFESPKKKAKVE

SEQ ID NO: 825 - protein, 2094 aa, synthetic construct
MPAAKRVKLDGGDKKYSIGLDIGTNSVGWAVITDEYKVPSKKFKVLGNTDRHSIKKNLIGALLFDSGETAEATRLKRTARRRYTRRKNRICYLQEIFSNEMAKVDDSFFHRLEESFLVEEDKKHERHPIFGNIVDEVAYHEKYPTIYHLRKKLVDSTDKADLRLIYLALAHMIKFRGHFLIEGDLNPDNSDVDKLFIQLVQTYNQLFEENPINASGVDAKAILSARLSKSRRLENLIAQLPGEKKNGLFGNLIALSLGLTPNFKSNFDLAEDAKLQLSKDTYDDDLDNLLAQIGDQYADLFLAAKNLSDAILLSDILRVNTEITKAPLSASMIKRYDEHHQDLTLLKALVRQQLPEKYKEIFFDQSKNGYAGYIDGGASQEEFYKFIKPILEKMDGTEELLVKLNREDLLRKQRTFDNGSIPHQIHLGELHAILRRQEDFYPFLKDNREKIEKILTFRIPYYVGPLARGNSRFAWMTRKSEETITPWNFEEVVDKGASAQSFIERMTNFDKNLPNEKVLPKHSLLYEYFTVYNELTKVKYVTEGMRKPAFLSGEQKKAIVDLLFKTNRKVTVKQLKEDYFKKIECFDSVEISGVEDRFNASLGTYHDLLKIIKDKDFLDNEENEDILEDIVLTLTLFEDREMIEERLKTYAHLFDDKVMKQLKRRRYTGWGRLSRKLINGIRDKQSGKTILDFLKSDGFANRNFMQLIHDDSLTFKEDIQKAQVSGQGDSLHEHIANLAGSPAIKKGILQTVKVVDELVKVMGRHKPENIVIEMARENQTTQKGQKNSRERMKRIEEGIKELGSQILKEHPVENTQLQNEKLYLYYLQNGRDMYVDQELDINRLSDYDVDHIVPQSFLKDDSIDNKVLTRSDKARGKSDNVPSEEVVKKMKNYWRQLLNAKLITQRKFDNLTKAERGGLSELDKAGFIKRQLVETRQITKHVAQILDSRMNTKYDENDKLIREVKVITLKSKLVSDFRKDFQFYKVREINNYHHAHDAYLNAVVGTALIKKYPKLESEFVYGDYKVYDVRKMIAKSEQEIGKATAKYFFYSNIMNFFKTEITLANGEIRKRPLIETNGETGEIVWDKGRDFATVRKVLSMPQVNIVKKTEVQTGGFSKESILPKRNSDKLIARKKDWDPKKYGGFDSPTVAYSVLVVAKVEKGKSKKLKSVKELLGITIMERSSFEKNPIDFLEAKGYKEVKKDLIIKLPKYSLFELENGRKRMLASAGELQKGNELALPSKYVNFLYLASHYEKLKGSPEDNEQKQLFVEQHKHYLDEIIEQISEFSKRVILADANLDKVLSAYNKHRDKPIREQAENIIHLFTLTNLGAPAAFKYFDTTIDRKRYTSTKEVLDATLIHQSITGLYETRIDLSQLGGDGGGGSGSSEAAAKGGVLNLEEEYRLHEKPVPSSIDPSWLQLFPTVWAERAGMGLANQVPPVVVELRSGASPVAVRQYPMSKEAREGIRPHIQRFLDLGVLVPCQSPWNTPLLPVKKPGTNDYRPVQDLREINKRVQDIHPTVPNPYNLLSSLPPSHTWYSVLDLKDAFFCLKLHPNSQPLFAFEWRDPEKGNTGQLTWTRLPQGFKNSPTLFNEALHRDLAPFRALNPQVVLLQYVDDLLVAAPTYRDCKEGTQKLLQELSKLGYRVSAKKAQLCQKEVTYLGYLLKEGKRWLTPARKATVMKIPPPTTPRQVREFLGTAGFCRLWIPGFASLAAPLYPLTKPSIPFIWTEEHQKAFDRIKEALLSAPALALPDLTKPFTLYVDERAGVARGVLTQTLGPWRRPVAYLSKKLDPVASGWPTCLKAVAAVALLLKDADKLTLGQNVTVIASHSLESIVRQPPDRWMTNARMTHYQSLLLNERVSFAPPAVLNPATLLPVESEATPVHRCSEILAEETGTRRDLKDQPLPGVPAWYTDGSSFIAEGKRRAGAAIVDGKRTVWASSLPEGTSAQKAELVALTQALRLAEGKDINIYTDSRYAFATAHIHGAIYKQRGWLTSAGKDIKNKEEILALLEAIHLPKRVAIIHCPGHQKGNDPVATGNRRADEAAKQAALSTRVLAETTKPAGKRTADGSEFEKRTADGSEFESPKKKAKVE

SEQ ID NO: 826 - protein, 2094 aa, synthetic construct
MPAAKRVKLDGGDKKYSIGLDIGTNSVGWAVITDEYKVPSKKFKVLGNTDRHSIKKNLIGALLFDSGETAEATRLKRTARRRYTRRKNRICYLQEIFSNEMAKVDDSFFHRLEESFLVEEDKKHERHPIFGNIVDEVAYHEKYPTIYHLRKKLVDSTDKADLRLIYLALAHMIKFRGHFLIEGDLNPDNSDVDKLFIQLVQTYNQLFEENPINASGVDAKAILSARLSKSRRLENLIAQLPGEKKNGLFGNLIALSLGLTPNFKSNFDLAEDAKLQLSKDTYDDDLDNLLAQIGDQYADLFLAAKNLSDAILLSDILRVNTEITKAPLSASMIKRYDEHHQDLTLLKALVRQQLPEKYKEIFFDQSKNGYAGYIDGGASQEEFYKFIKPILEKMDGTEELLVKLNREDLLRKQRTFDNGSIPHQIHLGELHAILRRQEDFYPFLKDNREKIEKILTFRIPYYVGPLARGNSRFAWMTRKSEETITPWNFEEVVDKGASAQSFIERMTNFDKNLPNEKVLPKHSLLYEYFTVYNELTKVKYVTEGMRKPAFLSGEQKKAIVDLLFKTNRKVTVKQLKEDYFKKIECFDSVEISGVEDRFNASLGTYHDLLKIIKDKDFLDNEENEDILEDIVLTLTLFEDREMIEERLKTYAHLFDDKVMKQLKRRRYTGWGRLSRKLINGIRDKQSGKTILDFLKSDGFANRNFMQLIHDDSLTFKEDIQKAQVSGQGDSLHEHIANLAGSPAIKKGILQTVKVVDELVKVMGRHKPENIVIEMARENQTTQKGQKNSRERMKRIEEGIKELGSQILKEHPVENTQLQNEKLYLYYLQNGRDMYVDQELDINRLSDYDVDHIVPQSFLKDDSIDNKVLTRSDKARGKSDNVPSEEVVKKMKNYWRQLLNAKLITQRKFDNLTKAERGGLSELDKAGFIKRQLVETRQITKHVAQILDSRMNTKYDENDKLIREVKVITLKSKLVSDFRKDFQFYKVREINNYHHAHDAYLNAVVGTALIKKYPKLESEFVYGDYKVYDVRKMIAKSEQEIGKATAKYFFYSNIMNFFKTEITLANGEIRKRPLIETNGETGEIVWDKGRDFATVRKVLSMPQVNIVKKTEVQTGGFSKESILPKRNSDKLIARKKDWDPKKYGGFDSPTVAYSVLVVAKVEKGKSKKLKSVKELLGITIMERSSFEKNPIDFLEAKGYKEVKKDLIIKLPKYSLFELENGRKRMLASAGELQKGNELALPSKYVNFLYLASHYEKLKGSPEDNEQKQLFVEQHKHYLDEIIEQISEFSKRVILADANLDKVLSAYNKHRDKPIREQAENIIHLFTLTNLGAPAAFKYFDTTIDRKRYTSTKEVLDATLIHQSITGLYETRIDLSQLGGDGGEAAAKGGGGSSGGVLNLEEEYRLHEKPVPSSIDPSWLQLFPTVWAERAGMGLANQVPPVVVELRSGASPVAVRQYPMSKEAREGIRPHIQRFLDLGVLVPCQSPWNTPLLPVKKPGTNDYRPVQDLREINKRVQDIHPTVPNPYNLLSSLPPSHTWYSVLDLKDAFFCLKLHPNSQPLFAFEWRDPEKGNTGQLTWTRLPQGFKNSPTLFNEALHRDLAPFRALNPQVVLLQYVDDLLVAAPTYRDCKEGTQKLLQELSKLGYRVSAKKAQLCQKEVTYLGYLLKEGKRWLTPARKATVMKIPPPTTPRQVREFLGTAGFCRLWIPGFASLAAPLYPLTKPSIPFIWTEEHQKAFDRIKEALLSAPALALPDLTKPFTLYVDERAGVARGVLTQTLGPWRRPVAYLSKKLDPVASGWPTCLKAVAAVALLLKDADKLTLGQNVTVIASHSLESIVRQPPDRWMTNARMTHYQSLLLNERVSFAPPAVLNPATLLPVESEATPVHRCSEILAEETGTRRDLKDQPLPGVPAWYTDGSSFIAEGKRRAGAAIVDGKRTVWASSLPEGTSAQKAELVALTQALRLAEGKDINIYTDSRYAFATAHIHGAIYKQRGWLTSAGKDIKNKEEILALLEAIHLPKRVAIIHCPGHQKGNDPVATGNRRADEAAKQAALSTRVLAETTKPAGKRTADGSEFEKRTADGSEFESPKKKAKVE

SEQ ID NO: 827 - protein, 2103 aa, synthetic construct
MPAAKRVKLDGGDKKYSIGLDIGTNSVGWAVITDEYKVPSKKFKVLGNTDRHSIKKNLIGALLFDSGETAEATRLKRTARRRYTRRKNRICYLQEIFSNEMAKVDDSFFHRLEESFLVEEDKKHERHPIFGNIVDEVAYHEKYPTIYHLRKKLVDSTDKADLRLIYLALAHMIKFRGHFLIEGDLNPDNSDVDKLFIQLVQTYNQLFEENPINASGVDAKAILSARLSKSRRLENLIAQLPGEKKNGLFGNLIALSLGLTPNFKSNFDLAEDAKLQLSKDTYDDDLDNLLAQIGDQYADLFLAAKNLSDAILLSDILRVNTEITKAPLSASMIKRYDEHHQDLTLLKALVRQQLPEKYKEIFFDQSKNGYAGYIDGGASQEEFYKFIKPILEKMDGTEELLVKLNREDLLRKQRTFDNGSIPHQIHLGELHAILRRQEDFYPFLKDNREKIEKILTFRIPYYVGPLARGNSRFAWMTRKSEETITPWNFEEVVDKGASAQSFIERMTNFDKNLPNEKVLPKHSLLYEYFTVYNELTKVKYVTEGMRKPAFLSGEQKKAIVDLLFKTNRKVTVKQLKEDYFKKIECFDSVEISGVEDRFNASLGTYHDLLKIIKDKDFLDNEENEDILEDIVLTLTLFEDREMIEERLKTYAHLFDDKVMKQLKRRRYTGWGRLSRKLINGIRDKQSGKTILDFLKSDGFANRNFMQLIHDDSLTFKEDIQKAQVSGQGDSLHEHIANLAGSPAIKKGILQTVKVVDELVKVMGRHKPENIVIEMARENQTTQKGQKNSRERMKRIEEGIKELGSQILKEHPVENTQLQNEKLYLYYLQNGRDMYVDQELDINRLSDYDVDHIVPQSFLKDDSIDNKVLTRSDKARGKSDNVPSEEVVKKMKNYWRQLLNAKLITQRKFDNLTKAERGGLSELDKAGFIKRQLVETRQITKHVAQILDSRMNTKYDENDKLIREVKVITLKSKLVSDFRKDFQFYKVREINNYHHAHDAYLNAVVGTALIKKYPKLESEFVYGDYKVYDVRKMIAKSEQEIGKATAKYFFYSNIMNFFKTEITLANGEIRKRPLIETNGETGEIVWDKGRDFATVRKVLSMPQVNIVKKTEVQTGGFSKESILPKRNSDKLIARKKDWDPKKYGGFDSPTVAYSVLVVAKVEKGKSKKLKSVKELLGITIMERSSFEKNPIDFLEAKGYKEVKKDLIIKLPKYSLFELENGRKRMLASAGELQKGNELALPSKYVNFLYLASHYEKLKGSPEDNEQKQLFVEQHKHYLDEIIEQISEFSKRVILADANLDKVLSAYNKHRDKPIREQAENIIHLFTLTNLGAPAAFKYFDTTIDRKRYTSTKEVLDATLIHQSITGLYETRIDLSQLGGDGGEAAAKEAAAKEAAAKEAAAKGGVLNLEEEYRLHEKPVPSSIDPSWLQLFPTVWAERAGMGLANQVPPVVVELRSGASPVAVRQYPMSKEAREGIRPHIQRFLDLGVLVPCQSPWNTPLLPVKKPGTNDYRPVQDLREINKRVQDIHPTVPNPYNLLSSLPPSHTWYSVLDLKDAFFCLKLHPNSQPLFAFEWRDPEKGNTGQLTWTRLPQGFKNSPTLFNEALHRDLAPFRALNPQVVLLQYVDDLLVAAPTYRDCKEGTQKLLQELSKLGYRVSAKKAQLCQKEVTYLGYLLKEGKRWLTPARKATVMKIPPPTTPRQVREFLGTAGFCRLWIPGFASLAAPLYPLTKPSIPFIWTEEHQKAFDRIKEALLSAPALALPDLTKPFTLYVDERAGVARGVLTQTLGPWRRPVAYLSKKLDPVASGWPTCLKAVAAVALLLKDADKLTLGQNVTVIASHSLESIVRQPPDRWMTNARMTHYQSLLLNERVSFAPPAVLNPATLLPVESEATPVHRCSEILAEETGTRRDLKDQPLPGVPAWYTDGSSFIAEGKRRAGAAIVDGKRTVWASSLPEGTSAQKAELVALTQALRLAEGKDINIYTDSRYAFATAHIHGAIYKQRGWLTSAGKDIKNKEEILALLEAIHLPKRVAIIHCPGHQKGNDPVATGNRRADEAAKQAALSTRVLAETTKPAGKRTADGSEFEKRTADGSEFESPKKKAKVE

SEQ ID NO: 828 - protein, 2092 aa, synthetic construct
MPAAKRVKLDGGDKKYSIGLDIGTNSVGWAVITDEYKVPSKKFKVLGNTDRHSIKKNLIGALLFDSGETAEATRLKRTARRRYTRRKNRICYLQEIFSNEMAKVDDSFFHRLEESFLVEEDKKHERHPIFGNIVDEVAYHEKYPTIYHLRKKLVDSTDKADLRLIYLALAHMIKFRGHFLIEGDLNPDNSDVDKLFIQLVQTYNQLFEENPINASGVDAKAILSARLSKSRRLENLIAQLPGEKKNGLFGNLIALSLGLTPNFKSNFDLAEDAKLQLSKDTYDDDLDNLLAQIGDQYADLFLAAKNLSDAILLSDILRVNTEITKAPLSASMIKRYDEHHQDLTLLKALVRQQLPEKYKEIFFDQSKNGYAGYIDGGASQEEFYKFIKPILEKMDGTEELLVKLNREDLLRKQRTFDNGSIPHQIHLGELHAILRRQEDFYPFLKDNREKIEKILTFRIPYYVGPLARGNSRFAWMTRKSEETITPWNFEEVVDKGASAQSFIERMTNFDKNLPNEKVLPKHSLLYEYFTVYNELTKVKYVTEGMRKPAFLSGEQKKAIVDLLFKTNRKVTVKQLKEDYFKKIECFDSVEISGVEDRFNASLGTYHDLLKIIKDKDFLDNEENEDILEDIVLTLTLFEDREMIEERLKTYAHLFDDKVMKQLKRRRYTGWGRLSRKLINGIRDKQSGKTILDFLKSDGFANRNFMQLIHDDSLTFKEDIQKAQVSGQGDSLHEHIANLAGSPAIKKGILQTVKVVDELVKVMGRHKPENIVIEMARENQTTQKGQKNSRERMKRIEEGIKELGSQILKEHPVENTQLQNEKLYLYYLQNGRDMYVDQELDINRLSDYDVDHIVPQSFLKDDSIDNKVLTRSDKARGKSDNVPSEEVVKKMKNYWRQLLNAKLITQRKFDNLTKAERGGLSELDKAGFIKRQLVETRQITKHVAQILDSRMNTKYDENDKLIREVKVITLKSKLVSDFRKDFQFYKVREINNYHHAHDAYLNAVVGTALIKKYPKLESEFVYGDYKVYDVRKMIAKSEQEIGKATAKYFFYSNIMNFFKTEITLANGEIRKRPLIETNGETGEIVWDKGRDFATVRKVLSMPQVNIVKKTEVQTGGFSKESILPKRNSDKLIARKKDWDPKKYGGFDSPTVAYSVLVVAKVEKGKSKKLKSVKELLGITIMERSSFEKNPIDFLEAKGYKEVKKDLIIKLPKYSLFELENGRKRMLASAGELQKGNELALPSKYVNFLYLASHYEKLKGSPEDNEQKQLFVEQHKHYLDEIIEQISEFSKRVILADANLDKVLSAYNKHRDKPIREQAENIIHLFTLTNLGAPAAFKYFDTTIDRKRYTSTKEVLDATLIHQSITGLYETRIDLSQLGGDGGGGSGGGGSSGGVLNLEEEYRLHEKPVPSSIDPSWLQLFPTVWAERAGMGLANQVPPVVVELRSGASPVAVRQYPMSKEAREGIRPHIQRFLDLGVLVPCQSPWNTPLLPVKKPGTNDYRPVQDLREINKRVQDIHPTVPNPYNLLSSLPPSHTWYSVLDLKDAFFCLKLHPNSQPLFAFEWRDPEKGNTGQLTWTRLPQGFKNSPTLFNEALHRDLAPFRALNPQVVLLQYVDDLLVAAPTYRDCKEGTQKLLQELSKLGYRVSAKKAQLCQKEVTYLGYLLKEGKRWLTPARKATVMKIPPPTTPRQVREFLGTAGFCRLWIPGFASLAAPLYPLTKPSIPFIWTEEHQKAFDRIKEALLSAPALALPDLTKPFTLYVDERAGVARGVLTQTLGPWRRPVAYLSKKLDPVASGWPTCLKAVAAVALLLKDADKLTLGQNVTVIASHSLESIVRQPPDRWMTNARMTHYQSLLLNERVSFAPPAVLNPATLLPVESEATPVHRCSEILAEETGTRRDLKDQPLPGVPAWYTDGSSFIAEGKRRAGAAIVDGKRTVWASSLPEGTSAQKAELVALTQALRLAEGKDINIYTDSRYAFATAHIHGAIYKQRGWLTSAGKDIKNKEEILALLEAIHLPKRVAIIHCPGHQKGNDPVATGNRRADEAAKQAALSTRVLAETTKPAGKRTADGSEFEKRTADGSEFESPKKKAKVE

SEQ ID NO: 829 - protein, 2094 aa, synthetic construct
MPAAKRVKLDGGDKKYSIGLDIGTNSVGWAVITDEYKVPSKKFKVLGNTDRHSIKKNLIGALLFDSGETAEATRLKRTARRRYTRRKNRICYLQEIFSNEMAKVDDSFFHRLEESFLVEEDKKHERHPIFGNIVDEVAYHEKYPTIYHLRKKLVDSTDKADLRLIYLALAHMIKFRGHFLIEGDLNPDNSDVDKLFIQLVQTYNQLFEENPINASGVDAKAILSARLSKSRRLENLIAQLPGEKKNGLFGNLIALSLGLTPNFKSNFDLAEDAKLQLSKDTYDDDLDNLLAQIGDQYADLFLAAKNLSDAILLSDILRVNTEITKAPLSASMIKRYDEHHQDLTLLKALVRQQLPEKYKEIFFDQSKNGYAGYIDGGASQEEFYKFIKPILEKMDGTEELLVKLNREDLLRKQRTFDNGSIPHQIHLGELHAILRRQEDFYPFLKDNREKIEKILTFRIPYYVGPLARGNSRFAWMTRKSEETITPWNFEEVVDKGASAQSFIERMTNFDKNLPNEKVLPKHSLLYEYFTVYNELTKVKYVTEGMRKPAFLSGEQKKAIVDLLFKTNRKVTVKQLKEDYFKKIECFDSVEISGVEDRFNASLGTYHDLLKIIKDKDFLDNEENEDILEDIVLTLTLFEDREMIEERLKTYAHLFDDKVMKQLKRRRYTGWGRLSRKLINGIRDKQSGKTILDFLKSDGFANRNFMQLIHDDSLTFKEDIQKAQVSGQGDSLHEHIANLAGSPAIKKGILQTVKVVDELVKVMGRHKPENIVIEMARENQTTQKGQKNSRERMKRIEEGIKELGSQILKEHPVENTQLQNEKLYLYYLQNGRDMYVDQELDINRLSDYDVDHIVPQSFLKDDSIDNKVLTRSDKARGKSDNVPSEEVVKKMKNYWRQLLNAKLITQRKFDNLTKAERGGLSELDKAGFIKRQLVETRQITKHVAQILDSRMNTKYDENDKLIREVKVITLKSKLVSDFRKDFQFYKVREINNYHHAHDAYLNAVVGTALIKKYPKLESEFVYGDYKVYDVRKMIAKSEQEIGKATAKYFFYSNIMNFFKTEITLANGEIRKRPLIETNGETGEIVWDKGRDFATVRKVLSMPQVNIVKKTEVQTGGFSKESILPKRNSDKLIARKKDWDPKKYGGFDSPTVAYSVLVVAKVEKGKSKKLKSVKELLGITIMERSSFEKNPIDFLEAKGYKEVKKDLIIKLPKYSLFELENGRKRMLASAGELQKGNELALPSKYVNFLYLASHYEKLKGSPEDNEQKQLFVEQHKHYLDEIIEQISEFSKRVILADANLDKVLSAYNKHRDKPIREQAENIIHLFTLTNLGAPAAFKYFDTTIDRKRYTSTKEVLDATLIHQSITGLYETRIDLSQLGGDGGEAAAKGGSPAPGGVLNLEEEYRLHEKPVPSSIDPSWLQLFPTVWAERAGMGLANQVPPVVVELRSGASPVAVRQYPMSKEAREGIRPHIQRFLDLGVLVPCQSPWNTPLLPVKKPGTNDYRPVQDLREINKRVQDIHPTVPNPYNLLSSLPPSHTWYSVLDLKDAFFCLKLHPNSQPLFAFEWRDPEKGNTGQLTWTRLPQGFKNSPTLFNEALHRDLAPFRALNPQVVLLQYVDDLLVAAPTYRDCKEGTQKLLQELSKLGYRVSAKKAQLCQKEVTYLGYLLKEGKRWLTPARKATVMKIPPPTTPRQVREFLGTAGFCRLWIPGFASLAAPLYPLTKPSIPFIWTEEHQKAFDRIKEALLSAPALALPDLTKPFTLYVDERAGVARGVLTQTLGPWRRPVAYLSKKLDPVASGWPTCLKAVAAVALLLKDADKLTLGQNVTVIASHSLESIVRQPPDRWMTNARMTHYQSLLLNERVSFAPPAVLNPATLLPVESEATPVHRCSEILAEETGTRRDLKDQPLPGVPAWYTDGSSFIAEGKRRAGAAIVDGKRTVWASSLPEGTSAQKAELVALTQALRLAEGKDINIYTDSRYAFATAHIHGAIYKQRGWLTSAGKDIKNKEEILALLEAIHLPKRVAIIHCPGHQKGNDPVATGNRRADEAAKQAALSTRVLAETTKPAGKRTADGSEFEKRTADGSEFESPKKKAKVE

SEQ ID NO: 830 - protein, 2094 aa, synthetic construct
MPAAKRVKLDGGDKKYSIGLDIGTNSVGWAVITDEYKVPSKKFKVLGNTDRHSIKKNLIGALLFDSGETAEATRLKRTARRRYTRRKNRICYLQEIFSNEMAKVDDSFFHRLEESFLVEEDKKHERHPIFGNIVDEVAYHEKYPTIYHLRKKLVDSTDKADLRLIYLALAHMIKFRGHFLIEGDLNPDNSDVDKLFIQLVQTYNQLFEENPINASGVDAKAILSARLSKSRRLENLIAQLPGEKKNGLFGNLIALSLGLTPNFKSNFDLAEDAKLQLSKDTYDDDLDNLLAQIGDQYADLFLAAKNLSDAILLSDILRVNTEITKAPLSASMIKRYDEHHQDLTLLKALVRQQLPEKYKEIFFDQSKNGYAGYIDGGASQEEFYKFIKPILEKMDGTEELLVKLNREDLLRKQRTFDNGSIPHQIHLGELHAILRRQEDFYPFLKDNREKIEKILTFRIPYYVGPLARGNSRFAWMTRKSEETITPWNFEEVVDKGASAQSFIERMTNFDKNLPNEKVLPKHSLLYEYFTVYNELTKVKYVTEGMRKPAFLSGEQKKAIVDLLFKTNRKVTVKQLKEDYFKKIECFDSVEISGVEDRFNASLGTYHDLLKIIKDKDFLDNEENEDILEDIVLTLTLFEDREMIEERLKTYAHLFDDKVMKQLKRRRYTGWGRLSRKLINGIRDKQSGKTILDFLKSDGFANRNFMQLIHDDSLTFKEDIQKAQVSGQGDSLHEHIANLAGSPAIKKGILQTVKVVDELVKVMGRHKPENIVIEMARENQTTQKGQKNSRERMKRIEEGIKELGSQILKEHPVENTQLQNEKLYLYYLQNGRDMYVDQELDINRLSDYDVDHIVPQSFLKDDSIDNKVLTRSDKARGKSDNVPSEEVVKKMKNYWRQLLNAKLITQRKFDNLTKAERGGLSELDKAGFIKRQLVETRQITKHVAQILDSRMNTKYDENDKLIREVKVITLKSKLVSDFRKDFQFYKVREINNYHHAHDAYLNAVVGTALIKKYPKLESEFVYGDYKVYDVRKMIAKSEQEIGKATAKYFFYSNIMNFFKTEITLANGEIRKRPLIETNGETGEIVWDKGRDFATVRKVLSMPQVNIVKKTEVQTGGFSKESILPKRNSDKLIARKKDWDPKKYGGFDSPTVAYSVLVVAKVEKGKSKKLKSVKELLGITIMERSSFEKNPIDFLEAKGYKEVKKDLIIKLPKYSLFELENGRKRMLASAGELQKGNELALPSKYVNFLYLASHYEKLKGSPEDNEQKQLFVEQHKHYLDEIIEQISEFSKRVILADANLDKVLSAYNKHRDKPIREQAENIIHLFTLTNLGAPAAFKYFDTTIDRKRYTSTKEVLDATLIHQSITGLYETRIDLSQLGGDGGEAAAKGGGGGSGGVLNLEEEYRLHEKPVPSSIDPSWLQLFPTVWAERAGMGLANQVPPVVVELRSGASPVAVRQYPMSKEAREGIRPHIQRFLDLGVLVPCQSPWNTPLLPVKKPGTNDYRPVQDLREINKRVQDIHPTVPNPYNLLSSLPPSHTWYSVLDLKDAFFCLKLHPNSQPLFAFEWRDPEKGNTGQLTWTRLPQGFKNSPTLFNEALHRDLAPFRALNPQVVLLQYVDDLLVAAPTYRDCKEGTQKLLQELSKLGYRVSAKKAQLCQKEVTYLGYLLKEGKRWLTPARKATVMKIPPPTTPRQVREFLGTAGFCRLWIPGFASLAAPLYPLTKPSIPFIWTEEHQKAFDRIKEALLSAPALALPDLTKPFTLYVDERAGVARGVLTQTLGPWRRPVAYLSKKLDPVASGWPTCLKAVAAVALLLKDADKLTLGQNVTVIASHSLESIVRQPPDRWMTNARMTHYQSLLLNERVSFAPPAVLNPATLLPVESEATPVHRCSEILAEETGTRRDLKDQPLPGVPAWYTDGSSFIAEGKRRAGAAIVDGKRTVWASSLPEGTSAQKAELVALTQALRLAEGKDINIYTDSRYAFATAHIHGAIYKQRGWLTSAGKDIKNKEEILALLEAIHLPKRVAIIHCPGHQKGNDPVATGNRRADEAAKQAALSTRVLAETTKPAGKRTADGSEFEKRTADGSEFESPKKKAKVE

SEQ ID NO: 831 - protein, 2094 aa, synthetic construct
MPAAKRVKLDGGDKKYSIGLDIGTNSVGWAVITDEYKVPSKKFKVLGNTDRHSIKKNLIGALLFDSGETAEATRLKRTARRRYTRRKNRICYLQEIFSNEMAKVDDSFFHRLEESFLVEEDKKHERHPIFGNIVDEVAYHEKYPTIYHLRKKLVDSTDKADLRLIYLALAHMIKFRGHFLIEGDLNPDNSDVDKLFIQLVQTYNQLFEENPINASGVDAKAILSARLSKSRRLENLIAQLPGEKKNGLFGNLIALSLGLTPNFKSNFDLAEDAKLQLSKDTYDDDLDNLLAQIGDQYADLFLAAKNLSDAILLSDILRVNTEITKAPLSASMIKRYDEHHQDLTLLKALVRQQLPEKYKEIFFDQSKNGYAGYIDGGASQEEFYKFIKPILEKMDGTEELLVKLNREDLLRKQRTFDNGSIPHQIHLGELHAILRRQEDFYPFLKDNREKIEKILTFRIPYYVGPLARGNSRFAWMTRKSEETITPWNFEEVVDKGASAQSFIERMTNFDKNLPNEKVLPKHSLLYEYFTVYNELTKVKYVTEGMRKPAFLSGEQKKAIVDLLFKTNRKVTVKQLKEDYFKKIECFDSVEISGVEDRFNASLGTYHDLLKIIKDKDFLDNEENEDILEDIVLTLTLFEDREMIEERLKTYAHLFDDKVMKQLKRRRYTGWGRLSRKLINGIRDKQSGKTILDFLKSDGFANRNFMQLIHDDSLTFKEDIQKAQVSGQGDSLHEHIANLAGSPAIKKGILQTVKVVDELVKVMGRHKPENIVIEMARENQTTQKGQKNSRERMKRIEEGIKELGSQILKEHPVENTQLQNEKLYLYYLQNGRDMYVDQELDINRLSDYDVDHIVPQSFLKDDSIDNKVLTRSDKARGKSDNVPSEEVVKKMKNYWRQLLNAKLITQRKFDNLTKAERGGLSELDKAGFIKRQLVETRQITKHVAQILDSRMNTKYDENDKLIREVKVITLKSKLVSDFRKDFQFYKVREINNYHHAHDAYLNAVVGTALIKKYPKLESEFVYGDYKVYDVRKMIAKSEQEIGKATAKYFFYSNIMNFFKTEITLANGEIRKRPLIETNGETGEIVWDKGRDFATVRKVLSMPQVNIVKKTEVQTGGFSKESILPKRNSDKLIARKKDWDPKKYGGFDSPTVAYSVLVVAKVEKGKSKKLKSVKELLGITIMERSSFEKNPIDFLEAKGYKEVKKDLIIKLPKYSLFELENGRKRMLASAGELQKGNELALPSKYVNFLYLASHYEKLKGSPEDNEQKQLFVEQHKHYLDEIIEQISEFSKRVILADANLDKVLSAYNKHRDKPIREQAENIIHLFTLTNLGAPAAFKYFDTTIDRKRYTSTKEVLDATLIHQSITGLYETRIDLSQLGGDGGPAPGSSEAAAKGGVLNLEEEYRLHEKPVPSSIDPSWLQLFPTVWAERAGMGLANQVPPVVVELRSGASPVAVRQYPMSKEAREGIRPHIQRFLDLGVLVPCQSPWNTPLLPVKKPGTNDYRPVQDLREINKRVQDIHPTVPNPYNLLSSLPPSHTWYSVLDLKDAFFCLKLHPNSQPLFAFEWRDPEKGNTGQLTWTRLPQGFKNSPTLFNEALHRDLAPFRALNPQVVLLQYVDDLLVAAPTYRDCKEGTQKLLQELSKLGYRVSAKKAQLCQKEVTYLGYLLKEGKRWLTPARKATVMKIPPPTTPRQVREFLGTAGFCRLWIPGFASLAAPLYPLTKPSIPFIWTEEHQKAFDRIKEALLSAPALALPDLTKPFTLYVDERAGVARGVLTQTLGPWRRPVAYLSKKLDPVASGWPTCLKAVAAVALLLKDADKLTLGQNVTVIASHSLESIVRQPPDRWMTNARMTHYQSLLLNERVSFAPPAVLNPATLLPVESEATPVHRCSEILAEETGTRRDLKDQPLPGVPAWYTDGSSFIAEGKRRAGAAIVDGKRTVWASSLPEGTSAQKAELVALTQALRLAEGKDINIYTDSRYAFATAHIHGAIYKQRGWLTSAGKDIKNKEEILALLEAIHLPKRVAIIHCPGHQKGNDPVATGNRRADEAAKQAALSTRVLAETTKPAGKRTADGSEFEKRTADGSEFESPKKKAKVE

SEQ ID NO: 832 - protein, 2091 aa, synthetic construct
MPAAKRVKLDGGDKKYSIGLDIGTNSVGWAVITDEYKVPSKKFKVLGNTDRHSIKKNLIGALLFDSGETAEATRLKRTARRRYTRRKNRICYLQEIFSNEMAKVDDSFFHRLEESFLVEEDKKHERHPIFGNIVDEVAYHEKYPTIYHLRKKLVDSTDKADLRLIYLALAHMIKFRGHFLIEGDLNPDNSDVDKLFIQLVQTYNQLFEENPINASGVDAKAILSARLSKSRRLENLIAQLPGEKKNGLFGNLIALSLGLTPNFKSNFDLAEDAKLQLSKDTYDDDLDNLLAQIGDQYADLFLAAKNLSDAILLSDILRVNTEITKAPLSASMIKRYDEHHQDLTLLKALVRQQLPEKYKEIFFDQSKNGYAGYIDGGASQEEFYKFIKPILEKMDGTEELLVKLNREDLLRKQRTFDNGSIPHQIHLGELHAILRRQEDFYPFLKDNREKIEKILTFRIPYYVGPLARGNSRFAWMTRKSEETITPWNFEEVVDKGASAQSFIERMTNFDKNLPNEKVLPKHSLLYEYFTVYNELTKVKYVTEGMRKPAFLSGEQKKAIVDLLFKTNRKVTVKQLKEDYFKKIECFDSVEISGVEDRFNASLGTYHDLLKIIKDKDFLDNEENEDILEDIVLTLTLFEDREMIEERLKTYAHLFDDKVMKQLKRRRYTGWGRLSRKLINGIRDKQSGKTILDFLKSDGFANRNFMQLIHDDSLTFKEDIQKAQVSGQGDSLHEHIANLAGSPAIKKGILQTVKVVDELVKVMGRHKPENIVIEMARENQTTQKGQKNSRERMKRIEEGIKELGSQILKEHPVENTQLQNEKLYLYYLQNGRDMYVDQELDINRLSDYDVDHIVPQSFLKDDSIDNKVLTRSDKARGKSDNVPSEEVVKKMKNYWRQLLNAKLITQRKFDNLTKAERGGLSELDKAGFIKRQLVETRQITKHVAQILDSRMNTKYDENDKLIREVKVITLKSKLVSDFRKDFQFYKVREINNYHHAHDAYLNAVVGTALIKKYPKLESEFVYGDYKVYDVRKMIAKSEQEIGKATAKYFFYSNIMNFFKTEITLANGEIRKRPLIETNGETGEIVWDKGRDFATVRKVLSMPQVNIVKKTEVQTGGFSKESILPKRNSDKLIARKKDWDPKKYGGFDSPTVAYSVLVVAKVEKGKSKKLKSVKELLGITIMERSSFEKNPIDFLEAKGYKEVKKDLIIKLPKYSLFELENGRKRMLASAGELQKGNELALPSKYVNFLYLASHYEKLKGSPEDNEQKQLFVEQHKHYLDEIIEQISEFSKRVILADANLDKVLSAYNKHRDKPIREQAENIIHLFTLTNLGAPAAFKYFDTTIDRKRYTSTKEVLDATLIHQSITGLYETRIDLSQLGGDGGEAAAKGGSGGVLNLEEEYRLHEKPVPSSIDPSWLQLFPTVWAERAGMGLANQVPPVVVELRSGASPVAVRQYPMSKEAREGIRPHIQRFLDLGVLVPCQSPWNTPLLPVKKPGTNDYRPVQDLREINKRVQDIHPTVPNPYNLLSSLPPSHTWYSVLDLKDAFFCLKLHPNSQPLFAFEWRDPEKGNTGQLTWTRLPQGFKNSPTLFNEALHRDLAPFRALNPQVVLLQYVDDLLVAAPTYRDCKEGTQKLLQELSKLGYRVSAKKAQLCQKEVTYLGYLLKEGKRWLTPARKATVMKIPPPTTPRQVREFLGTAGFCRLWIPGFASLAAPLYPLTKPSIPFIWTEEHQKAFDRIKEALLSAPALALPDLTKPFTLYVDERAGVARGVLTQTLGPWRRPVAYLSKKLDPVASGWPTCLKAVAAVALLLKDADKLTLGQNVTVIASHSLESIVRQPPDRWMTNARMTHYQSLLLNERVSFAPPAVLNPATLLPVESEATPVHRCSEILAEETGTRRDLKDQPLPGVPAWYTDGSSFIAEGKRRAGAAIVDGKRTVWASSLPEGTSAQKAELVALTQALRLAEGKDINIYTDSRYAFATAHIHGAIYKQRGWLTSAGKDIKNKEEILALLEAIHLPKRVAIIHCPGHQKGNDPVATGNRRADEAAKQAALSTRVLAETTKPAGKRTADGSEFEKRTADGSEFESPKKKAKVE

SEQ ID NO: 833 - protein, 2093 aa, synthetic construct
MPAAKRVKLDGGDKKYSIGLDIGTNSVGWAVITDEYKVPSKKFKVLGNTDRHSIKKNLIGALLFDSGETAEATRLKRTARRRYTRRKNRICYLQEIFSNEMAKVDDSFFHRLEESFLVEEDKKHERHPIFGNIVDEVAYHEKYPTIYHLRKKLVDSTDKADLRLIYLALAHMIKFRGHFLIEGDLNPDNSDVDKLFIQLVQTYNQLFEENPINASGVDAKAILSARLSKSRRLENLIAQLPGEKKNGLFGNLIALSLGLTPNFKSNFDLAEDAKLQLSKDTYDDDLDNLLAQIGDQYADLFLAAKNLSDAILLSDILRVNTEITKAPLSASMIKRYDEHHQDLTLLKALVRQQLPEKYKEIFFDQSKNGYAGYIDGGASQEEFYKFIKPILEKMDGTEELLVKLNREDLLRKQRTFDNGSIPHQIHLGELHAILRRQEDFYPFLKDNREKIEKILTFRIPYYVGPLARGNSRFAWMTRKSEETITPWNFEEVVDKGASAQSFIERMTNFDKNLPNEKVLPKHSLLYEYFTVYNELTKVKYVTEGMRKPAFLSGEQKKAIVDLLFKTNRKVTVKQLKEDYFKKIECFDSVEISGVEDRFNASLGTYHDLLKIIKDKDFLDNEENEDILEDIVLTLTLFEDREMIEERLKTYAHLFDDKVMKQLKRRRYTGWGRLSRKLINGIRDKQSGKTILDFLKSDGFANRNFMQLIHDDSLTFKEDIQKAQVSGQGDSLHEHIANLAGSPAIKKGILQTVKVVDELVKVMGRHKPENIVIEMARENQTTQKGQKNSRERMKRIEEGIKELGSQILKEHPVENTQLQNEKLYLYYLQNGRDMYVDQELDINRLSDYDVDHIVPQSFLKDDSIDNKVLTRSDKARGKSDNVPSEEVVKKMKNYWRQLLNAKLITQRKFDNLTKAERGGLSELDKAGFIKRQLVETRQITKHVAQILDSRMNTKYDENDKLIREVKVITLKSKLVSDFRKDFQFYKVREINNYHHAHDAYLNAVVGTALIKKYPKLESEFVYGDYKVYDVRKMIAKSEQEIGKATAKYFFYSNIMNFFKTEITLANGEIRKRPLIETNGETGEIVWDKGRDFATVRKVLSMPQVNIVKKTEVQTGGFSKESILPKRNSDKLIARKKDWDPKKYGGFDSPTVAYSVLVVAKVEKGKSKKLKSVKELLGITIMERSSFEKNPIDFLEAKGYKEVKKDLIIKLPKYSLFELENGRKRMLASAGELQKGNELALPSKYVNFLYLASHYEKLKGSPEDNEQKQLFVEQHKHYLDEIIEQISEFSKRVILADANLDKVLSAYNKHRDKPIREQAENIIHLFTLTNLGAPAAFKYFDTTIDRKRYTSTKEVLDATLIHQSITGLYETRIDLSQLGGDGGEAAAKEAAAKGGVLNLEEEYRLHEKPVPSSIDPSWLQLFPTVWAERAGMGLANQVPPVVVELRSGASPVAVRQYPMSKEAREGIRPHIQRFLDLGVLVPCQSPWNTPLLPVKKPGTNDYRPVQDLREINKRVQDIHPTVPNPYNLLSSLPPSHTWYSVLDLKDAFFCLKLHPNSQPLFAFEWRDPEKGNTGQLTWTRLPQGFKNSPTLFNEALHRDLAPFRALNPQVVLLQYVDDLLVAAPTYRDCKEGTQKLLQELSKLGYRVSAKKAQLCQKEVTYLGYLLKEGKRWLTPARKATVMKIPPPTTPRQVREFLGTAGFCRLWIPGFASLAAPLYPLTKPSIPFIWTEEHQKAFDRIKEALLSAPALALPDLTKPFTLYVDERAGVARGVLTQTLGPWRRPVAYLSKKLDPVASGWPTCLKAVAAVALLLKDADKLTLGQNVTVIASHSLESIVRQPPDRWMTNARMTHYQSLLLNERVSFAPPAVLNPATLLPVESEATPVHRCSEILAEETGTRRDLKDQPLPGVPAWYTDGSSFIAEGKRRAGAAIVDGKRTVWASSLPEGTSAQKAELVALTQALRLAEGKDINIYTDSRYAFATAHIHGAIYKQRGWLTSAGKDIKNKEEILALLEAIHLPKRVAIIHCPGHQKGNDPVATGNRRADEAAKQAALSTRVLAETTKPAGKRTADGSEFEKRTADGSEFESPKKKAKVE

SEQ ID NO: 834 - protein, 2094 aa, synthetic construct
MPAAKRVKLDGGDKKYSIGLDIGTNSVGWAVITDEYKVPSKKFKVLGNTDRHSIKKNLIGALLFDSGETAEATRLKRTARRRYTRRKNRICYLQEIFSNEMAKVDDSFFHRLEESFLVEEDKKHERHPIFGNIVDEVAYHEKYPTIYHLRKKLVDSTDKADLRLIYLALAHMIKFRGHFLIEGDLNPDNSDVDKLFIQLVQTYNQLFEENPINASGVDAKAILSARLSKSRRLENLIAQLPGEKKNGLFGNLIALSLGLTPNFKSNFDLAEDAKLQLSKDTYDDDLDNLLAQIGDQYADLFLAAKNLSDAILLSDILRVNTEITKAPLSASMIKRYDEHHQDLTLLKALVRQQLPEKYKEIFFDQSKNGYAGYIDGGASQEEFYKFIKPILEKMDGTEELLVKLNREDLLRKQRTFDNGSIPHQIHLGELHAILRRQEDFYPFLKDNREKIEKILTFRIPYYVGPLARGNSRFAWMTRKSEETITPWNFEEVVDKGASAQSFIERMTNFDKNLPNEKVLPKHSLLYEYFTVYNELTKVKYVTEGMRKPAFLSGEQKKAIVDLLFKTNRKVTVKQLKEDYFKKIECFDSVEISGVEDRFNASLGTYHDLLKIIKDKDFLDNEENEDILEDIVLTLTLFEDREMIEERLKTYAHLFDDKVMKQLKRRRYTGWGRLSRKLINGIRDKQSGKTILDFLKSDGFANRNFMQLIHDDSLTFKEDIQKAQVSGQGDSLHEHIANLAGSPAIKKGILQTVKVVDELVKVMGRHKPENIVIEMARENQTTQKGQKNSRERMKRIEEGIKELGSQILKEHPVENTQLQNEKLYLYYLQNGRDMYVDQELDINRLSDYDVDHIVPQSFLKDDSIDNKVLTRSDKARGKSDNVPSEEVVKKMKNYWRQLLNAKLITQRKFDNLTKAERGGLSELDKAGFIKRQLVETRQITKHVAQILDSRMNTKYDENDKLIREVKVITLKSKLVSDFRKDFQFYKVREINNYHHAHDAYLNAVVGTALIKKYPKLESEFVYGDYKVYDVRKMIAKSEQEIGKATAKYFFYSNIMNFFKTEITLANGEIRKRPLIETNGETGEIVWDKGRDFATVRKVLSMPQVNIVKKTEVQTGGFSKESILPKRNSDKLIARKKDWDPKKYGGFDSPTVAYSVLVVAKVEKGKSKKLKSVKELLGITIMERSSFEKNPIDFLEAKGYKEVKKDLIIKLPKYSLFELENGRKRMLASAGELQKGNELALPSKYVNFLYLASHYEKLKGSPEDNEQKQLFVEQHKHYLDEIIEQISEFSKRVILADANLDKVLSAYNKHRDKPIREQAENIIHLFTLTNLGAPAAFKYFDTTIDRKRYTSTKEVLDATLIHQSITGLYETRIDLSQLGGDGGEAAAKPAPGSSGGVLNLEEEYRLHEKPVPSSIDPSWLQLFPTVWAERAGMGLANQVPPVVVELRSGASPVAVRQYPMSKEAREGIRPHIQRFLDLGVLVPCQSPWNTPLLPVKKPGTNDYRPVQDLREINKRVQDIHPTVPNPYNLLSSLPPSHTWYSVLDLKDAFFCLKLHPNSQPLFAFEWRDPEKGNTGQLTWTRLPQGFKNSPTLFNEALHRDLAPFRALNPQVVLLQYVDDLLVAAPTYRDCKEGTQKLLQELSKLGYRVSAKKAQLCQKEVTYLGYLLKEGKRWLTPARKATVMKIPPPTTPRQVREFLGTAGFCRLWIPGFASLAAPLYPLTKPSIPFIWTEEHQKAFDRIKEALLSAPALALPDLTKPFTLYVDERAGVARGVLTQTLGPWRRPVAYLSKKLDPVASGWPTCLKAVAAVALLLKDADKLTLGQNVTVIASHSLESIVRQPPDRWMTNARMTHYQSLLLNERVSFAPPAVLNPATLLPVESEATPVHRCSEILAEETGTRRDLKDQPLPGVPAWYTDGSSFIAEGKRRAGAAIVDGKRTVWASSLPEGTSAQKAELVALTQALRLAEGKDINIYTDSRYAFATAHIHGAIYKQRGWLTSAGKDIKNKEEILALLEAIHLPKRVAIIHCPGHQKGNDPVATGNRRADEAAKQAALSTRVLAETTKPAGKRTADGSEFEKRTADGSEFESPKKKAKVE

SEQ ID NO: 835 - protein, 2092 aa, synthetic construct
MPAAKRVKLDGGDKKYSIGLDIGTNSVGWAVITDEYKVPSKKFKVLGNTDRHSIKKNLIGALLFDSGETAEATRLKRTARRRYTRRKNRICYLQEIFSNEMAKVDDSFFHRLEESFLVEEDKKHERHPIFGNIVDEVAYHEKYPTIYHLRKKLVDSTDKADLRLIYLALAHMIKFRGHFLIEGDLNPDNSDVDKLFIQLVQTYNQLFEENPINASGVDAKAILSARLSKSRRLENLIAQLPGEKKNGLFGNLIALSLGLTPNFKSNFDLAEDAKLQLSKDTYDDDLDNLLAQIGDQYADLFLAAKNLSDAILLSDILRVNTEITKAPLSASMIKRYDEHHQDLTLLKALVRQQLPEKYKEIFFDQSKNGYAGYIDGGASQEEFYKFIKPILEKMDGTEELLVKLNREDLLRKQRTFDNGSIPHQIHLGELHAILRRQEDFYPFLKDNREKIEKILTFRIPYYVGPLARGNSRFAWMTRKSEETITPWNFEEVVDKGASAQSFIERMTNFDKNLPNEKVLPKHSLLYEYFTVYNELTKVKYVTEGMRKPAFLSGEQKKAIVDLLFKTNRKVTVKQLKEDYFKKIECFDSVEISGVEDRFNASLGTYHDLLKIIKDKDFLDNEENEDILEDIVLTLTLFEDREMIEERLKTYAHLFDDKVMKQLKRRRYTGWGRLSRKLINGIRDKQSGKTILDFLKSDGFANRNFMQLIHDDSLTFKEDIQKAQVSGQGDSLHEHIANLAGSPAIKKGILQTVKVVDELVKVMGRHKPENIVIEMARENQTTQKGQKNSRERMKRIEEGIKELGSQILKEHPVENTQLQNEKLYLYYLQNGRDMYVDQELDINRLSDYDVDHIVPQSFLKDDSIDNKVLTRSDKARGKSDNVPSEEVVKKMKNYWRQLLNAKLITQRKFDNLTKAERGGLSELDKAGFIKRQLVETRQITKHVAQILDSRMNTKYDENDKLIREVKVITLKSKLVSDFRKDFQFYKVREINNYHHAHDAYLNAVVGTALIKKYPKLESEFVYGDYKVYDVRKMIAKSEQEIGKATAKYFFYSNIMNFFKTEITLANGEIRKRPLIETNGETGEIVWDKGRDFATVRKVLSMPQVNIVKKTEVQTGGFSKESILPKRNSDKLIARKKDWDPKKYGGFDSPTVAYSVLVVAKVEKGKSKKLKSVKELLGITIMERSSFEKNPIDFLEAKGYKEVKKDLIIKLPKYSLFELENGRKRMLASAGELQKGNELALPSKYVNFLYLASHYEKLKGSPEDNEQKQLFVEQHKHYLDEIIEQISEFSKRVILADANLDKVLSAYNKHRDKPIREQAENIIHLFTLTNLGAPAAFKYFDTTIDRKRYTSTKEVLDATLIHQSITGLYETRIDLSQLGGDGGGSSGSSGSSGGVLNLEEEYRLHEKPVPSSIDPSWLQLFPTVWAERAGMGLANQVPPVVVELRSGASPVAVRQYPMSKEAREGIRPHIQRFLDLGVLVPCQSPWNTPLLPVKKPGTNDYRPVQDLREINKRVQDIHPTVPNPYNLLSSLPPSHTWYSVLDLKDAFFCLKLHPNSQPLFAFEWRDPEKGNTGQLTWTRLPQGFKNSPTLFNEALHRDLAPFRALNPQVVLLQYVDDLLVAAPTYRDCKEGTQKLLQELSKLGYRVSAKKAQLCQKEVTYLGYLLKEGKRWLTPARKATVMKIPPPTTPRQVREFLGTAGFCRLWIPGFASLAAPLYPLTKPSIPFIWTEEHQKAFDRIKEALLSAPALALPDLTKPFTLYVDERAGVARGVLTQTLGPWRRPVAYLSKKLDPVASGWPTCLKAVAAVALLLKDADKLTLGQNVTVIASHSLESIVRQPPDRWMTNARMTHYQSLLLNERVSFAPPAVLNPATLLPVESEATPVHRCSEILAEETGTRRDLKDQPLPGVPAWYTDGSSFIAEGKRRAGAAIVDGKRTVWASSLPEGTSAQKAELVALTQALRLAEGKDINIYTDSRYAFATAHIHGAIYKQRGWLTSAGKDIKNKEEILALLEAIHLPKRVAIIHCPGHQKGNDPVATGNRRADEAAKQAALSTRVLAETTKPAGKRTADGSEFEKRTADGSEFESPKKKAKVE

SEQ ID NO: 836 - protein, 2091 aa, synthetic construct
MPAAKRVKLDGGDKKYSIGLDIGTNSVGWAVITDEYKVPSKKFKVLGNTDRHSIKKNLIGALLFDSGETAEATRLKRTARRRYTRRKNRICYLQEIFSNEMAKVDDSFFHRLEESFLVEEDKKHERHPIFGNIVDEVAYHEKYPTIYHLRKKLVDSTDKADLRLIYLALAHMIKFRGHFLIEGDLNPDNSDVDKLFIQLVQTYNQLFEENPINASGVDAKAILSARLSKSRRLENLIAQLPGEKKNGLFGNLIALSLGLTPNFKSNFDLAEDAKLQLSKDTYDDDLDNLLAQIGDQYADLFLAAKNLSDAILLSDILRVNTEITKAPLSASMIKRYDEHHQDLTLLKALVRQQLPEKYKEIFFDQSKNGYAGYIDGGASQEEFYKFIKPILEKMDGTEELLVKLNREDLLRKQRTFDNGSIPHQIHLGELHAILRRQEDFYPFLKDNREKIEKILTFRIPYYVGPLARGNSRFAWMTRKSEETITPWNFEEVVDKGASAQSFIERMTNFDKNLPNEKVLPKHSLLYEYFTVYNELTKVKYVTEGMRKPAFLSGEQKKAIVDLLFKTNRKVTVKQLKEDYFKKIECFDSVEISGVEDRFNASLGTYHDLLKIIKDKDFLDNEENEDILEDIVLTLTLFEDREMIEERLKTYAHLFDDKVMKQLKRRRYTGWGRLSRKLINGIRDKQSGKTILDFLKSDGFANRNFMQLIHDDSLTFKEDIQKAQVSGQGDSLHEHIANLAGSPAIKKGILQTVKVVDELVKVMGRHKPENIVIEMARENQTTQKGQKNSRERMKRIEEGIKELGSQILKEHPVENTQLQNEKLYLYYLQNGRDMYVDQELDINRLSDYDVDHIVPQSFLKDDSIDNKVLTRSDKARGKSDNVPSEEVVKKMKNYWRQLLNAKLITQRKFDNLTKAERGGLSELDKAGFIKRQLVETRQITKHVAQILDSRMNTKYDENDKLIREVKVITLKSKLVSDFRKDFQFYKVREINNYHHAHDAYLNAVVGTALIKKYPKLESEFVYGDYKVYDVRKMIAKSEQEIGKATAKYFFYSNIMNFFKTEITLANGEIRKRPLIETNGETGEIVWDKGRDFATVRKVLSMPQVNIVKKTEVQTGGFSKESILPKRNSDKLIARKKDWDPKKYGGFDSPTVAYSVLVVAKVEKGKSKKLKSVKELLGITIMERSSFEKNPIDFLEAKGYKEVKKDLIIKLPKYSLFELENGRKRMLASAGELQKGNELALPSKYVNFLYLASHYEKLKGSPEDNEQKQLFVEQHKHYLDEIIEQISEFSKRVILADANLDKVLSAYNKHRDKPIREQAENIIHLFTLTNLGAPAAFKYFDTTIDRKRYTSTKEVLDATLIHQSITGLYETRIDLSQLGGDGGEAAAKGSSGGVLNLEEEYRLHEKPVPSSIDPSWLQLFPTVWAERAGMGLANQVPPVVVELRSGASPVAVRQYPMSKEAREGIRPHIQRFLDLGVLVPCQSPWNTPLLPVKKPGTNDYRPVQDLREINKRVQDIHPTVPNPYNLLSSLPPSHTWYSVLDLKDAFFCLKLHPNSQPLFAFEWRDPEKGNTGQLTWTRLPQGFKNSPTLFNEALHRDLAPFRALNPQVVLLQYVDDLLVAAPTYRDCKEGTQKLLQELSKLGYRVSAKKAQLCQKEVTYLGYLLKEGKRWLTPARKATVMKIPPPTTPRQVREFLGTAGFCRLWIPGFASLAAPLYPLTKPSIPFIWTEEHQKAFDRIKEALLSAPALALPDLTKPFTLYVDERAGVARGVLTQTLGPWRRPVAYLSKKLDPVASGWPTCLKAVAAVALLLKDADKLTLGQNVTVIASHSLESIVRQPPDRWMTNARMTHYQSLLLNERVSFAPPAVLNPATLLPVESEATPVHRCSEILAEETGTRRDLKDQPLPGVPAWYTDGSSFIAEGKRRAGAAIVDGKRTVWASSLPEGTSAQKAELVALTQALRLAEGKDINIYTDSRYAFATAHIHGAIYKQRGWLTSAGKDIKNKEEILALLEAIHLPKRVAIIHCPGHQKGNDPVATGNRRADEAAKQAALSTRVLAETTKPAGKRTADGSEFEKRTADGSEFESPKKKAKVE

SEQ ID NO: 837 - protein, 2091 aa, synthetic construct
MPAAKRVKLDGGDKKYSIGLDIGTNSVGWAVITDEYKVPSKKFKVLGNTDRHSIKKNLIGALLFDSGETAEATRLKRTARRRYTRRKNRICYLQEIFSNEMAKVDDSFFHRLEESFLVEEDKKHERHPIFGNIVDEVAYHEKYPTIYHLRKKLVDSTDKADLRLIYLALAHMIKFRGHFLIEGDLNPDNSDVDKLFIQLVQTYNQLFEENPINASGVDAKAILSARLSKSRRLENLIAQLPGEKKNGLFGNLIALSLGLTPNFKSNFDLAEDAKLQLSKDTYDDDLDNLLAQIGDQYADLFLAAKNLSDAILLSDILRVNTEITKAPLSASMIKRYDEHHQDLTLLKALVRQQLPEKYKEIFFDQSKNGYAGYIDGGASQEEFYKFIKPILEKMDGTEELLVKLNREDLLRKQRTFDNGSIPHQIHLGELHAILRRQEDFYPFLKDNREKIEKILTFRIPYYVGPLARGNSRFAWMTRKSEETITPWNFEEVVDKGASAQSFIERMTNFDKNLPNEKVLPKHSLLYEYFTVYNELTKVKYVTEGMRKPAFLSGEQKKAIVDLLFKTNRKVTVKQLKEDYFKKIECFDSVEISGVEDRFNASLGTYHDLLKIIKDKDFLDNEENEDILEDIVLTLTLFEDREMIEERLKTYAHLFDDKVMKQLKRRRYTGWGRLSRKLINGIRDKQSGKTILDFLKSDGFANRNFMQLIHDDSLTFKEDIQKAQVSGQGDSLHEHIANLAGSPAIKKGILQTVKVVDELVKVMGRHKPENIVIEMARENQTTQKGQKNSRERMKRIEEGIKELGSQILKEHPVENTQLQNEKLYLYYLQNGRDMYVDQELDINRLSDYDVDHIVPQSFLKDDSIDNKVLTRSDKARGKSDNVPSEEVVKKMKNYWRQLLNAKLITQRKFDNLTKAERGGLSELDKAGFIKRQLVETRQITKHVAQILDSRMNTKYDENDKLIREVKVITLKSKLVSDFRKDFQFYKVREINNYHHAHDAYLNAVVGTALIKKYPKLESEFVYGDYKVYDVRKMIAKSEQEIGKATAKYFFYSNIMNFFKTEITLANGEIRKRPLIETNGETGEIVWDKGRDFATVRKVLSMPQVNIVKKTEVQTGGFSKESILPKRNSDKLIARKKDWDPKKYGGFDSPTVAYSVLVVAKVEKGKSKKLKSVKELLGITIMERSSFEKNPIDFLEAKGYKEVKKDLIIKLPKYSLFELENGRKRMLASAGELQKGNELALPSKYVNFLYLASHYEKLKGSPEDNEQKQLFVEQHKHYLDEIIEQISEFSKRVILADANLDKVLSAYNKHRDKPIREQAENIIHLFTLTNLGAPAAFKYFDTTIDRKRYTSTKEVLDATLIHQSITGLYETRIDLSQLGGDGGGGGEAAAKGGVLNLEEEYRLHEKPVPSSIDPSWLQLFPTVWAERAGMGLANQVPPVVVELRSGASPVAVRQYPMSKEAREGIRPHIQRFLDLGVLVPCQSPWNTPLLPVKKPGTNDYRPVQDLREINKRVQDIHPTVPNPYNLLSSLPPSHTWYSVLDLKDAFFCLKLHPNSQPLFAFEWRDPEKGNTGQLTWTRLPQGFKNSPTLFNEALHRDLAPFRALNPQVVLLQYVDDLLVAAPTYRDCKEGTQKLLQELSKLGYRVSAKKAQLCQKEVTYLGYLLKEGKRWLTPARKATVMKIPPPTTPRQVREFLGTAGFCRLWIPGFASLAAPLYPLTKPSIPFIWTEEHQKAFDRIKEALLSAPALALPDLTKPFTLYVDERAGVARGVLTQTLGPWRRPVAYLSKKLDPVASGWPTCLKAVAAVALLLKDADKLTLGQNVTVIASHSLESIVRQPPDRWMTNARMTHYQSLLLNERVSFAPPAVLNPATLLPVESEATPVHRCSEILAEETGTRRDLKDQPLPGVPAWYTDGSSFIAEGKRRAGAAIVDGKRTVWASSLPEGTSAQKAELVALTQALRLAEGKDINIYTDSRYAFATAHIHGAIYKQRGWLTSAGKDIKNKEEILALLEAIHLPKRVAIIHCPGHQKGNDPVATGNRRADEAAKQAALSTRVLAETTKPAGKRTADGSEFEKRTADGSEFESPKKKAKVE

SEQ ID NO: 838 - protein, 2091 aa, synthetic construct
MPAAKRVKLDGGDKKYSIGLDIGTNSVGWAVITDEYKVPSKKFKVLGNTDRHSIKKNLIGALLFDSGETAEATRLKRTARRRYTRRKNRICYLQEIFSNEMAKVDDSFFHRLEESFLVEEDKKHERHPIFGNIVDEVAYHEKYPTIYHLRKKLVDSTDKADLRLIYLALAHMIKFRGHFLIEGDLNPDNSDVDKLFIQLVQTYNQLFEENPINASGVDAKAILSARLSKSRRLENLIAQLPGEKKNGLFGNLIALSLGLTPNFKSNFDLAEDAKLQLSKDTYDDDLDNLLAQIGDQYADLFLAAKNLSDAILLSDILRVNTEITKAPLSASMIKRYDEHHQDLTLLKALVRQQLPEKYKEIFFDQSKNGYAGYIDGGASQEEFYKFIKPILEKMDGTEELLVKLNREDLLRKQRTFDNGSIPHQIHLGELHAILRRQEDFYPFLKDNREKIEKILTFRIPYYVGPLARGNSRFAWMTRKSEETITPWNFEEVVDKGASAQSFIERMTNFDKNLPNEKVLPKHSLLYEYFTVYNELTKVKYVTEGMRKPAFLSGEQKKAIVDLLFKTNRKVTVKQLKEDYFKKIECFDSVEISGVEDRFNASLGTYHDLLKIIKDKDFLDNEENEDILEDIVLTLTLFEDREMIEERLKTYAHLFDDKVMKQLKRRRYTGWGRLSRKLINGIRDKQSGKTILDFLKSDGFANRNFMQLIHDDSLTFKEDIQKAQVSGQGDSLHEHIANLAGSPAIKKGILQTVKVVDELVKVMGRHKPENIVIEMARENQTTQKGQKNSRERMKRIEEGIKELGSQILKEHPVENTQLQNEKLYLYYLQNGRDMYVDQELDINRLSDYDVDHIVPQSFLKDDSIDNKVLTRSDKARGKSDNVPSEEVVKKMKNYWRQLLNAKLITQRKFDNLTKAERGGLSELDKAGFIKRQLVETRQITKHVAQILDSRMNTKYDENDKLIREVKVITLKSKLVSDFRKDFQFYKVREINNYHHAHDAYLNAVVGTALIKKYPKLESEFVYGDYKVYDVRKMIAKSEQEIGKATAKYFFYSNIMNFFKTEITLANGEIRKRPLIETNGETGEIVWDKGRDFATVRKVLSMPQVNIVKKTEVQTGGFSKESILPKRNSDKLIARKKDWDPKKYGGFDSPTVAYSVLVVAKVEKGKSKKLKSVKELLGITIMERSSFEKNPIDFLEAKGYKEVKKDLIIKLPKYSLFELENGRKRMLASAGELQKGNELALPSKYVNFLYLASHYEKLKGSPEDNEQKQLFVEQHKHYLDEIIEQISEFSKRVILADANLDKVLSAYNKHRDKPIREQAENIIHLFTLTNLGAPAAFKYFDTTIDRKRYTSTKEVLDATLIHQSITGLYETRIDLSQLGGDGGGSSEAAAKGGVLNLEEEYRLHEKPVPSSIDPSWLQLFPTVWAERAGMGLANQVPPVVVELRSGASPVAVRQYPMSKEAREGIRPHIQRFLDLGVLVPCQSPWNTPLLPVKKPGTNDYRPVQDLREINKRVQDIHPTVPNPYNLLSSLPPSHTWYSVLDLKDAFFCLKLHPNSQPLFAFEWRDPEKGNTGQLTWTRLPQGFKNSPTLFNEALHRDLAPFRALNPQVVLLQYVDDLLVAAPTYRDCKEGTQKLLQELSKLGYRVSAKKAQLCQKEVTYLGYLLKEGKRWLTPARKATVMKIPPPTTPRQVREFLGTAGFCRLWIPGFASLAAPLYPLTKPSIPFIWTEEHQKAFDRIKEALLSAPALALPDLTKPFTLYVDERAGVARGVLTQTLGPWRRPVAYLSKKLDPVASGWPTCLKAVAAVALLLKDADKLTLGQNVTVIASHSLESIVRQPPDRWMTNARMTHYQSLLLNERVSFAPPAVLNPATLLPVESEATPVHRCSEILAEETGTRRDLKDQPLPGVPAWYTDGSSFIAEGKRRAGAAIVDGKRTVWASSLPEGTSAQKAELVALTQALRLAEGKDINIYTDSRYAFATAHIHGAIYKQRGWLTSAGKDIKNKEEILALLEAIHLPKRVAIIHCPGHQKGNDPVATGNRRADEAAKQAALSTRVLAETTKPAGKRTADGSEFEKRTADGSEFESPKKKAKVE

SEQ ID NO: 839 - protein, 2094 aa, synthetic construct
MPAAKRVKLDGGDKKYSIGLDIGTNSVGWAVITDEYKVPSKKFKVLGNTDRHSIKKNLIGALLFDSGETAEATRLKRTARRRYTRRKNRICYLQEIFSNEMAKVDDSFFHRLEESFLVEEDKKHERHPIFGNIVDEVAYHEKYPTIYHLRKKLVDSTDKADLRLIYLALAHMIKFRGHFLIEGDLNPDNSDVDKLFIQLVQTYNQLFEENPINASGVDAKAILSARLSKSRRLENLIAQLPGEKKNGLFGNLIALSLGLTPNFKSNFDLAEDAKLQLSKDTYDDDLDNLLAQIGDQYADLFLAAKNLSDAILLSDILRVNTEITKAPLSASMIKRYDEHHQDLTLLKALVRQQLPEKYKEIFFDQSKNGYAGYIDGGASQEEFYKFIKPILEKMDGTEELLVKLNREDLLRKQRTFDNGSIPHQIHLGELHAILRRQEDFYPFLKDNREKIEKILTFRIPYYVGPLARGNSRFAWMTRKSEETITPWNFEEVVDKGASAQSFIERMTNFDKNLPNEKVLPKHSLLYEYFTVYNELTKVKYVTEGMRKPAFLSGEQKKAIVDLLFKTNRKVTVKQLKEDYFKKIECFDSVEISGVEDRFNASLGTYHDLLKIIKDKDFLDNEENEDILEDIVLTLTLFEDREMIEERLKTYAHLFDDKVMKQLKRRRYTGWGRLSRKLINGIRDKQSGKTILDFLKSDGFANRNFMQLIHDDSLTFKEDIQKAQVSGQGDSLHEHIANLAGSPAIKKGILQTVKVVDELVKVMGRHKPENIVIEMARENQTTQKGQKNSRERMKRIEEGIKELGSQILKEHPVENTQLQNEKLYLYYLQNGRDMYVDQELDINRLSDYDVDHIVPQSFLKDDSIDNKVLTRSDKARGKSDNVPSEEVVKKMKNYWRQLLNAKLITQRKFDNLTKAERGGLSELDKAGFIKRQLVETRQITKHVAQILDSRMNTKYDENDKLIREVKVITLKSKLVSDFRKDFQFYKVREINNYHHAHDAYLNAVVGTALIKKYPKLESEFVYGDYKVYDVRKMIAKSEQEIGKATAKYFFYSNIMNFFKTEITLANGEIRKRPLIETNGETGEIVWDKGRDFATVRKVLSMPQVNIVKKTEVQTGGFSKESILPKRNSDKLIARKKDWDPKKYGGFDSPTVAYSVLVVAKVEKGKSKKLKSVKELLGITIMERSSFEKNPIDFLEAKGYKEVKKDLIIKLPKYSLFELENGRKRMLASAGELQKGNELALPSKYVNFLYLASHYEKLKGSPEDNEQKQLFVEQHKHYLDEIIEQISEFSKRVILADANLDKVLSAYNKHRDKPIREQAENIIHLFTLTNLGAPAAFKYFDTTIDRKRYTSTKEVLDATLIHQSITGLYETRIDLSQLGGDGGGSSPAPEAAAKGGVLNLEEEYRLHEKPVPSSIDPSWLQLFPTVWAERAGMGLANQVPPVVVELRSGASPVAVRQYPMSKEAREGIRPHIQRFLDLGVLVPCQSPWNTPLLPVKKPGTNDYRPVQDLREINKRVQDIHPTVPNPYNLLSSLPPSHTWYSVLDLKDAFFCLKLHPNSQPLFAFEWRDPEKGNTGQLTWTRLPQGFKNSPTLFNEALHRDLAPFRALNPQVVLLQYVDDLLVAAPTYRDCKEGTQKLLQELSKLGYRVSAKKAQLCQKEVTYLGYLLKEGKRWLTPARKATVMKIPPPTTPRQVREFLGTAGFCRLWIPGFASLAAPLYPLTKPSIPFIWTEEHQKAFDRIKEALLSAPALALPDLTKPFTLYVDERAGVARGVLTQTLGPWRRPVAYLSKKLDPVASGWPTCLKAVAAVALLLKDADKLTLGQNVTVIASHSLESIVRQPPDRWMTNARMTHYQSLLLNERVSFAPPAVLNPATLLPVESEATPVHRCSEILAEETGTRRDLKDQPLPGVPAWYTDGSSFIAEGKRRAGAAIVDGKRTVWASSLPEGTSAQKAELVALTQALRLAEGKDINIYTDSRYAFATAHIHGAIYKQRGWLTSAGKDIKNKEEILALLEAIHLPKRVAIIHCPGHQKGNDPVATGNRRADEAAKQAALSTRVLAETTKPAGKRTADGSEFEKRTADGSEFESPKKKAKVE

SEQ ID NO: 840 - protein, 2092 aa, synthetic construct
MPAAKRVKLDGGDKKYSIGLDIGTNSVGWAVITDEYKVPSKKFKVLGNTDRHSIKKNLIGALLFDSGETAEATRLKRTARRRYTRRKNRICYLQEIFSNEMAKVDDSFFHRLEESFLVEEDKKHERHPIFGNIVDEVAYHEKYPTIYHLRKKLVDSTDKADLRLIYLALAHMIKFRGHFLIEGDLNPDNSDVDKLFIQLVQTYNQLFEENPINASGVDAKAILSARLSKSRRLENLIAQLPGEKKNGLFGNLIALSLGLTPNFKSNFDLAEDAKLQLSKDTYDDDLDNLLAQIGDQYADLFLAAKNLSDAILLSDILRVNTEITKAPLSASMIKRYDEHHQDLTLLKALVRQQLPEKYKEIFFDQSKNGYAGYIDGGASQEEFYKFIKPILEKMDGTEELLVKLNREDLLRKQRTFDNGSIPHQIHLGELHAILRRQEDFYPFLKDNREKIEKILTFRIPYYVGPLARGNSRFAWMTRKSEETITPWNFEEVVDKGASAQSFIERMTNFDKNLPNEKVLPKHSLLYEYFTVYNELTKVKYVTEGMRKPAFLSGEQKKAIVDLLFKTNRKVTVKQLKEDYFKKIECFDSVEISGVEDRFNASLGTYHDLLKIIKDKDFLDNEENEDILEDIVLTLTLFEDREMIEERLKTYAHLFDDKVMKQLKRRRYTGWGRLSRKLINGIRDKQSGKTILDFLKSDGFANRNFMQLIHDDSLTFKEDIQKAQVSGQGDSLHEHIANLAGSPAIKKGILQTVKVVDELVKVMGRHKPENIVIEMARENQTTQKGQKNSRERMKRIEEGIKELGSQILKEHPVENTQLQNEKLYLYYLQNGRDMYVDQELDINRLSDYDVDHIVPQSFLKDDSIDNKVLTRSDKARGKSDNVPSEEVVKKMKNYWRQLLNAKLITQRKFDNLTKAERGGLSELDKAGFIKRQLVETRQITKHVAQILDSRMNTKYDENDKLIREVKVITLKSKLVSDFRKDFQFYKVREINNYHHAHDAYLNAVVGTALIKKYPKLESEFVYGDYKVYDVRKMIAKSEQEIGKATAKYFFYSNIMNFFKTEITLANGEIRKRPLIETNGETGEIVWDKGRDFATVRKVLSMPQVNIVKKTEVQTGGFSKESILPKRNSDKLIARKKDWDPKKYGGFDSPTVAYSVLVVAKVEKGKSKKLKSVKELLGITIMERSSFEKNPIDFLEAKGYKEVKKDLIIKLPKYSLFELENGRKRMLASAGELQKGNELALPSKYVNFLYLASHYEKLKGSPEDNEQKQLFVEQHKHYLDEIIEQISEFSKRVILADANLDKVLSAYNKHRDKPIREQAENIIHLFTLTNLGAPAAFKYFDTTIDRKRYTSTKEVLDATLIHQSITGLYETRIDLSQLGGDGGGSSPAPGGSGGVLNLEEEYRLHEKPVPSSIDPSWLQLFPTVWAERAGMGLANQVPPVVVELRSGASPVAVRQYPMSKEAREGIRPHIQRFLDLGVLVPCQSPWNTPLLPVKKPGTNDYRPVQDLREINKRVQDIHPTVPNPYNLLSSLPPSHTWYSVLDLKDAFFCLKLHPNSQPLFAFEWRDPEKGNTGQLTWTRLPQGFKNSPTLFNEALHRDLAPFRALNPQVVLLQYVDDLLVAAPTYRDCKEGTQKLLQELSKLGYRVSAKKAQLCQKEVTYLGYLLKEGKRWLTPARKATVMKIPPPTTPRQVREFLGTAGFCRLWIPGFASLAAPLYPLTKPSIPFIWTEEHQKAFDRIKEALLSAPALALPDLTKPFTLYVDERAGVARGVLTQTLGPWRRPVAYLSKKLDPVASGWPTCLKAVAAVALLLKDADKLTLGQNVTVIASHSLESIVRQPPDRWMTNARMTHYQSLLLNERVSFAPPAVLNPATLLPVESEATPVHRCSEILAEETGTRRDLKDQPLPGVPAWYTDGSSFIAEGKRRAGAAIVDGKRTVWASSLPEGTSAQKAELVALTQALRLAEGKDINIYTDSRYAFATAHIHGAIYKQRGWLTSAGKDIKNKEEILALLEAIHLPKRVAIIHCPGHQKGNDPVATGNRRADEAAKQAALSTRVLAETTKPAGKRTADGSEFEKRTADGSEFESPKKKAKVE

SEQ ID NO: 841 - protein, 2094 aa, synthetic construct
MPAAKRVKLDGGDKKYSIGLDIGTNSVGWAVITDEYKVPSKKFKVLGNTDRHSIKKNLIGALLFDSGETAEATRLKRTARRRYTRRKNRICYLQEIFSNEMAKVDDSFFHRLEESFLVEEDKKHERHPIFGNIVDEVAYHEKYPTIYHLRKKLVDSTDKADLRLIYLALAHMIKFRGHFLIEGDLNPDNSDVDKLFIQLVQTYNQLFEENPINASGVDAKAILSARLSKSRRLENLIAQLPGEKKNGLFGNLIALSLGLTPNFKSNFDLAEDAKLQLSKDTYDDDLDNLLAQIGDQYADLFLAAKNLSDAILLSDILRVNTEITKAPLSASMIKRYDEHHQDLTLLKALVRQQLPEKYKEIFFDQSKNGYAGYIDGGASQEEFYKFIKPILEKMDGTEELLVKLNREDLLRKQRTFDNGSIPHQIHLGELHAILRRQEDFYPFLKDNREKIEKILTFRIPYYVGPLARGNSRFAWMTRKSEETITPWNFEEVVDKGASAQSFIERMTNFDKNLPNEKVLPKHSLLYEYFTVYNELTKVKYVTEGMRKPAFLSGEQKKAIVDLLFKTNRKVTVKQLKEDYFKKIECFDSVEISGVEDRFNASLGTYHDLLKIIKDKDFLDNEENEDILEDIVLTLTLFEDREMIEERLKTYAHLFDDKVMKQLKRRRYTGWGRLSRKLINGIRDKQSGKTILDFLKSDGFANRNFMQLIHDDSLTFKEDIQKAQVSGQGDSLHEHIANLAGSPAIKKGILQTVKVVDELVKVMGRHKPENIVIEMARENQTTQKGQKNSRERMKRIEEGIKELGSQILKEHPVENTQLQNEKLYLYYLQNGRDMYVDQELDINRLSDYDVDHIVPQSFLKDDSIDNKVLTRSDKARGKSDNVPSEEVVKKMKNYWRQLLNAKLITQRKFDNLTKAERGGLSELDKAGFIKRQLVETRQITKHVAQILDSRMNTKYDENDKLIREVKVITLKSKLVSDFRKDFQFYKVREINNYHHAHDAYLNAVVGTALIKKYPKLESEFVYGDYKVYDVRKMIAKSEQEIGKATAKYFFYSNIMNFFKTEITLANGEIRKRPLIETNGETGEIVWDKGRDFATVRKVLSMPQVNIVKKTEVQTGGFSKESILPKRNSDKLIARKKDWDPKKYGGFDSPTVAYSVLVVAKVEKGKSKKLKSVKELLGITIMERSSFEKNPIDFLEAKGYKEVKKDLIIKLPKYSLFELENGRKRMLASAGELQKGNELALPSKYVNFLYLASHYEKLKGSPEDNEQKQLFVEQHKHYLDEIIEQISEFSKRVILADANLDKVLSAYNKHRDKPIREQAENIIHLFTLTNLGAPAAFKYFDTTIDRKRYTSTKEVLDATLIHQSITGLYETRIDLSQLGGDGGGGGEAAAKGGSGGVLNLEEEYRLHEKPVPSSIDPSWLQLFPTVWAERAGMGLANQVPPVVVELRSGASPVAVRQYPMSKEAREGIRPHIQRFLDLGVLVPCQSPWNTPLLPVKKPGTNDYRPVQDLREINKRVQDIHPTVPNPYNLLSSLPPSHTWYSVLDLKDAFFCLKLHPNSQPLFAFEWRDPEKGNTGQLTWTRLPQGFKNSPTLFNEALHRDLAPFRALNPQVVLLQYVDDLLVAAPTYRDCKEGTQKLLQELSKLGYRVSAKKAQLCQKEVTYLGYLLKEGKRWLTPARKATVMKIPPPTTPRQVREFLGTAGFCRLWIPGFASLAAPLYPLTKPSIPFIWTEEHQKAFDRIKEALLSAPALALPDLTKPFTLYVDERAGVARGVLTQTLGPWRRPVAYLSKKLDPVASGWPTCLKAVAAVALLLKDADKLTLGQNVTVIASHSLESIVRQPPDRWMTNARMTHYQSLLLNERVSFAPPAVLNPATLLPVESEATPVHRCSEILAEETGTRRDLKDQPLPGVPAWYTDGSSFIAEGKRRAGAAIVDGKRTVWASSLPEGTSAQKAELVALTQALRLAEGKDINIYTDSRYAFATAHIHGAIYKQRGWLTSAGKDIKNKEEILALLEAIHLPKRVAIIHCPGHQKGNDPVATGNRRADEAAKQAALSTRVLAETTKPAGKRTADGSEFEKRTADGSEFESPKKKAKVE

SEQ ID NO: 842 - protein, 2091 aa, synthetic construct
MPAAKRVKLDGGDKKYSIGLDIGTNSVGWAVITDEYKVPSKKFKVLGNTDRHSIKKNLIGALLFDSGETAEATRLKRTARRRYTRRKNRICYLQEIFSNEMAKVDDSFFHRLEESFLVEEDKKHERHPIFGNIVDEVAYHEKYPTIYHLRKKLVDSTDKADLRLIYLALAHMIKFRGHFLIEGDLNPDNSDVDKLFIQLVQTYNQLFEENPINASGVDAKAILSARLSKSRRLENLIAQLPGEKKNGLFGNLIALSLGLTPNFKSNFDLAEDAKLQLSKDTYDDDLDNLLAQIGDQYADLFLAAKNLSDAILLSDILRVNTEITKAPLSASMIKRYDEHHQDLTLLKALVRQQLPEKYKEIFFDQSKNGYAGYIDGGASQEEFYKFIKPILEKMDGTEELLVKLNREDLLRKQRTFDNGSIPHQIHLGELHAILRRQEDFYPFLKDNREKIEKILTFRIPYYVGPLARGNSRFAWMTRKSEETITPWNFEEVVDKGASAQSFIERMTNFDKNLPNEKVLPKHSLLYEYFTVYNELTKVKYVTEGMRKPAFLSGEQKKAIVDLLFKTNRKVTVKQLKEDYFKKIECFDSVEISGVEDRFNASLGTYHDLLKIIKDKDFLDNEENEDILEDIVLTLTLFEDREMIEERLKTYAHLFDDKVMKQLKRRRYTGWGRLSRKLINGIRDKQSGKTILDFLKSDGFANRNFMQLIHDDSLTFKEDIQKAQVSGQGDSLHEHIANLAGSPAIKKGILQTVKVVDELVKVMGRHKPENIVIEMARENQTTQKGQKNSRERMKRIEEGIKELGSQILKEHPVENTQLQNEKLYLYYLQNGRDMYVDQELDINRLSDYDVDHIVPQSFLKDDSIDNKVLTRSDKARGKSDNVPSEEVVKKMKNYWRQLLNAKLITQRKFDNLTKAERGGLSELDKAGFIKRQLVETRQITKHVAQILDSRMNTKYDENDKLIREVKVITLKSKLVSDFRKDFQFYKVREINNYHHAHDAYLNAVVGTALIKKYPKLESEFVYGDYKVYDVRKMIAKSEQEIGKATAKYFFYSNIMNFFKTEITLANGEIRKRPLIETNGETGEIVWDKGRDFATVRKVLSMPQVNIVKKTEVQTGGFSKESILPKRNSDKLIARKKDWDPKKYGGFDSPTVAYSVLVVAKVEKGKSKKLKSVKELLGITIMERSSFEKNPIDFLEAKGYKEVKKDLIIKLPKYSLFELENGRKRMLASAGELQKGNELALPSKYVNFLYLASHYEKLKGSPEDNEQKQLFVEQHKHYLDEIIEQISEFSKRVILADANLDKVLSAYNKHRDKPIREQAENIIHLFTLTNLGAPAAFKYFDTTIDRKRYTSTKEVLDATLIHQSITGLYETRIDLSQLGGDGGGGGGGGGGGGVLNLEEEYRLHEKPVPSSIDPSWLQLFPTVWAERAGMGLANQVPPVVVELRSGASPVAVRQYPMSKEAREGIRPHIQRFLDLGVLVPCQSPWNTPLLPVKKPGTNDYRPVQDLREINKRVQDIHPTVPNPYNLLSSLPPSHTWYSVLDLKDAFFCLKLHPNSQPLFAFEWRDPEKGNTGQLTWTRLPQGFKNSPTLFNEALHRDLAPFRALNPQVVLLQYVDDLLVAAPTYRDCKEGTQKLLQELSKLGYRVSAKKAQLCQKEVTYLGYLLKEGKRWLTPARKATVMKIPPPTTPRQVREFLGTAGFCRLWIPGFASLAAPLYPLTKPSIPFIWTEEHQKAFDRIKEALLSAPALALPDLTKPFTLYVDERAGVARGVLTQTLGPWRRPVAYLSKKLDPVASGWPTCLKAVAAVALLLKDADKLTLGQNVTVIASHSLESIVRQPPDRWMTNARMTHYQSLLLNERVSFAPPAVLNPATLLPVESEATPVHRCSEILAEETGTRRDLKDQPLPGVPAWYTDGSSFIAEGKRRAGAAIVDGKRTVWASSLPEGTSAQKAELVALTQALRLAEGKDINIYTDSRYAFATAHIHGAIYKQRGWLTSAGKDIKNKEEILALLEAIHLPKRVAIIHCPGHQKGNDPVATGNRRADEAAKQAALSTRVLAETTKPAGKRTADGSEFEKRTADGSEFESPKKKAKVE

SEQ ID NO: 843 - protein, 2103 aa, synthetic construct
MPAAKRVKLDGGDKKYSIGLDIGTNSVGWAVITDEYKVPSKKFKVLGNTDRHSIKKNLIGALLFDSGETAEATRLKRTARRRYTRRKNRICYLQEIFSNEMAKVDDSFFHRLEESFLVEEDKKHERHPIFGNIVDEVAYHEKYPTIYHLRKKLVDSTDKADLRLIYLALAHMIKFRGHFLIEGDLNPDNSDVDKLFIQLVQTYNQLFEENPINASGVDAKAILSARLSKSRRLENLIAQLPGEKKNGLFGNLIALSLGLTPNFKSNFDLAEDAKLQLSKDTYDDDLDNLLAQIGDQYADLFLAAKNLSDAILLSDILRVNTEITKAPLSASMIKRYDEHHQDLTLLKALVRQQLPEKYKEIFFDQSKNGYAGYIDGGASQEEFYKFIKPILEKMDGTEELLVKLNREDLLRKQRTFDNGSIPHQIHLGELHAILRRQEDFYPFLKDNREKIEKILTFRIPYYVGPLARGNSRFAWMTRKSEETITPWNFEEVVDKGASAQSFIERMTNFDKNLPNEKVLPKHSLLYEYFTVYNELTKVKYVTEGMRKPAFLSGEQKKAIVDLLFKTNRKVTVKQLKEDYFKKIECFDSVEISGVEDRFNASLGTYHDLLKIIKDKDFLDNEENEDILEDIVLTLTLFEDREMIEERLKTYAHLFDDKVMKQLKRRRYTGWGRLSRKLINGIRDKQSGKTILDFLKSDGFANRNFMQLIHDDSLTFKEDIQKAQVSGQGDSLHEHIANLAGSPAIKKGILQTVKVVDELVKVMGRHKPENIVIEMARENQTTQKGQKNSRERMKRIEEGIKELGSQILKEHPVENTQLQNEKLYLYYLQNGRDMYVDQELDINRLSDYDVDHIVPQSFLKDDSIDNKVLTRSDKARGKSDNVPSEEVVKKMKNYWRQLLNAKLITQRKFDNLTKAERGGLSELDKAGFIKRQLVETRQITKHVAQILDSRMNTKYDENDKLIREVKVITLKSKLVSDFRKDFQFYKVREINNYHHAHDAYLNAVVGTALIKKYPKLESEFVYGDYKVYDVRKMIAKSEQEIGKATAKYFFYSNIMNFFKTEITLANGEIRKRPLIETNGETGEIVWDKGRDFATVRKVLSMPQVNIVKKTEVQTGGFSKESILPKRNSDKLIARKKDWDPKKYGGFDSPTVAYSVLVVAKVEKGKSKKLKSVKELLGITIMERSSFEKNPIDFLEAKGYKEVKKDLIIKLPKYSLFELENGRKRMLASAGELQKGNELALPSKYVNFLYLASHYEKLKGSPEDNEQKQLFVEQHKHYLDEIIEQISEFSKRVILADANLDKVLSAYNKHRDKPIREQAENIIHLFTLTNLGAPAAFKYFDTTIDRKRYTSTKEVLDATLIHQSITGLYETRIDLSQLGGDGGGGGGSGGGGSGGGGSGGGGSGGVLNLEEEYRLHEKPVPSSIDPSWLQLFPTVWAERAGMGLANQVPPVVVELRSGASPVAVRQYPMSKEAREGIRPHIQRFLDLGVLVPCQSPWNTPLLPVKKPGTNDYRPVQDLREINKRVQDIHPTVPNPYNLLSSLPPSHTWYSVLDLKDAFFCLKLHPNSQPLFAFEWRDPEKGNTGQLTWTRLPQGFKNSPTLFNEALHRDLAPFRALNPQVVLLQYVDDLLVAAPTYRDCKEGTQKLLQELSKLGYRVSAKKAQLCQKEVTYLGYLLKEGKRWLTPARKATVMKIPPPTTPRQVREFLGTAGFCRLWIPGFASLAAPLYPLTKPSIPFIWTEEHQKAFDRIKEALLSAPALALPDLTKPFTLYVDERAGVARGVLTQTLGPWRRPVAYLSKKLDPVASGWPTCLKAVAAVALLLKDADKLTLGQNVTVIASHSLESIVRQPPDRWMTNARMTHYQSLLLNERVSFAPPAVLNPATLLPVESEATPVHRCSEILAEETGTRRDLKDQPLPGVPAWYTDGSSFIAEGKRRAGAAIVDGKRTVWASSLPEGTSAQKAELVALTQALRLAEGKDINIYTDSRYAFATAHIHGAIYKQRGWLTSAGKDIKNKEEILALLEAIHLPKRVAIIHCPGHQKGNDPVATGNRRADEAAKQAALSTRVLAETTKPAGKRTADGSEFEKRTADGSEFESPKKKAKVE

SEQ ID NO: 844 - protein, 2094 aa, synthetic construct
MPAAKRVKLDGGDKKYSIGLDIGTNSVGWAVITDEYKVPSKKFKVLGNTDRHSIKKNLIGALLFDSGETAEATRLKRTARRRYTRRKNRICYLQEIFSNEMAKVDDSFFHRLEESFLVEEDKKHERHPIFGNIVDEVAYHEKYPTIYHLRKKLVDSTDKADLRLIYLALAHMIKFRGHFLIEGDLNPDNSDVDKLFIQLVQTYNQLFEENPINASGVDAKAILSARLSKSRRLENLIAQLPGEKKNGLFGNLIALSLGLTPNFKSNFDLAEDAKLQLSKDTYDDDLDNLLAQIGDQYADLFLAAKNLSDAILLSDILRVNTEITKAPLSASMIKRYDEHHQDLTLLKALVRQQLPEKYKEIFFDQSKNGYAGYIDGGASQEEFYKFIKPILEKMDGTEELLVKLNREDLLRKQRTFDNGSIPHQIHLGELHAILRRQEDFYPFLKDNREKIEKILTFRIPYYVGPLARGNSRFAWMTRKSEETITPWNFEEVVDKGASAQSFIERMTNFDKNLPNEKVLPKHSLLYEYFTVYNELTKVKYVTEGMRKPAFLSGEQKKAIVDLLFKTNRKVTVKQLKEDYFKKIECFDSVEISGVEDRFNASLGTYHDLLKIIKDKDFLDNEENEDILEDIVLTLTLFEDREMIEERLKTYAHLFDDKVMKQLKRRRYTGWGRLSRKLINGIRDKQSGKTILDFLKSDGFANRNFMQLIHDDSLTFKEDIQKAQVSGQGDSLHEHIANLAGSPAIKKGILQTVKVVDELVKVMGRHKPENIVIEMARENQTTQKGQKNSRERMKRIEEGIKELGSQILKEHPVENTQLQNEKLYLYYLQNGRDMYVDQELDINRLSDYDVDHIVPQSFLKDDSIDNKVLTRSDKARGKSDNVPSEEVVKKMKNYWRQLLNAKLITQRKFDNLTKAERGGLSELDKAGFIKRQLVETRQITKHVAQILDSRMNTKYDENDKLIREVKVITLKSKLVSDFRKDFQFYKVREINNYHHAHDAYLNAVVGTALIKKYPKLESEFVYGDYKVYDVRKMIAKSEQEIGKATAKYFFYSNIMNFFKTEITLANGEIRKRPLIETNGETGEIVWDKGRDFATVRKVLSMPQVNIVKKTEVQTGGFSKESILPKRNSDKLIARKKDWDPKKYGGFDSPTVAYSVLVVAKVEKGKSKKLKSVKELLGITIMERSSFEKNPIDFLEAKGYKEVKKDLIIKLPKYSLFELENGRKRMLASAGELQKGNELALPSKYVNFLYLASHYEKLKGSPEDNEQKQLFVEQHKHYLDEIIEQISEFSKRVILADANLDKVLSAYNKHRDKPIREQAENIIHLFTLTNLGAPAAFKYFDTTIDRKRYTSTKEVLDATLIHQSITGLYETRIDLSQLGGDGGGGSEAAAKPAPGGVLNLEEEYRLHEKPVPSSIDPSWLQLFPTVWAERAGMGLANQVPPVVVELRSGASPVAVRQYPMSKEAREGIRPHIQRFLDLGVLVPCQSPWNTPLLPVKKPGTNDYRPVQDLREINKRVQDIHPTVPNPYNLLSSLPPSHTWYSVLDLKDAFFCLKLHPNSQPLFAFEWRDPEKGNTGQLTWTRLPQGFKNSPTLFNEALHRDLAPFRALNPQVVLLQYVDDLLVAAPTYRDCKEGTQKLLQELSKLGYRVSAKKAQLCQKEVTYLGYLLKEGKRWLTPARKATVMKIPPPTTPRQVREFLGTAGFCRLWIPGFASLAAPLYPLTKPSIPFIWTEEHQKAFDRIKEALLSAPALALPDLTKPFTLYVDERAGVARGVLTQTLGPWRRPVAYLSKKLDPVASGWPTCLKAVAAVALLLKDADKLTLGQNVTVIASHSLESIVRQPPDRWMTNARMTHYQSLLLNERVSFAPPAVLNPATLLPVESEATPVHRCSEILAEETGTRRDLKDQPLPGVPAWYTDGSSFIAEGKRRAGAAIVDGKRTVWASSLPEGTSAQKAELVALTQALRLAEGKDINIYTDSRYAFATAHIHGAIYKQRGWLTSAGKDIKNKEEILALLEAIHLPKRVAIIHCPGHQKGNDPVATGNRRADEAAKQAALSTRVLAETTKPAGKRTADGSEFEKRTADGSEFESPKKKAKVE

SEQ ID NO: 845 - protein, 2092 aa, synthetic construct
MPAAKRVKLDGGDKKYSIGLDIGTNSVGWAVITDEYKVPSKKFKVLGNTDRHSIKKNLIGALLFDSGETAEATRLKRTARRRYTRRKNRICYLQEIFSNEMAKVDDSFFHRLEESFLVEEDKKHERHPIFGNIVDEVAYHEKYPTIYHLRKKLVDSTDKADLRLIYLALAHMIKFRGHFLIEGDLNPDNSDVDKLFIQLVQTYNQLFEENPINASGVDAKAILSARLSKSRRLENLIAQLPGEKKNGLFGNLIALSLGLTPNFKSNFDLAEDAKLQLSKDTYDDDLDNLLAQIGDQYADLFLAAKNLSDAILLSDILRVNTEITKAPLSASMIKRYDEHHQDLTLLKALVRQQLPEKYKEIFFDQSKNGYAGYIDGGASQEEFYKFIKPILEKMDGTEELLVKLNREDLLRKQRTFDNGSIPHQIHLGELHAILRRQEDFYPFLKDNREKIEKILTFRIPYYVGPLARGNSRFAWMTRKSEETITPWNFEEVVDKGASAQSFIERMTNFDKNLPNEKVLPKHSLLYEYFTVYNELTKVKYVTEGMRKPAFLSGEQKKAIVDLLFKTNRKVTVKQLKEDYFKKIECFDSVEISGVEDRFNASLGTYHDLLKIIKDKDFLDNEENEDILEDIVLTLTLFEDREMIEERLKTYAHLFDDKVMKQLKRRRYTGWGRLSRKLINGIRDKQSGKTILDFLKSDGFANRNFMQLIHDDSLTFKEDIQKAQVSGQGDSLHEHIANLAGSPAIKKGILQTVKVVDELVKVMGRHKPENIVIEMARENQTTQKGQKNSRERMKRIEEGIKELGSQILKEHPVENTQLQNEKLYLYYLQNGRDMYVDQELDINRLSDYDVDHIVPQSFLKDDSIDNKVLTRSDKARGKSDNVPSEEVVKKMKNYWRQLLNAKLITQRKFDNLTKAERGGLSELDKAGFIKRQLVETRQITKHVAQILDSRMNTKYDENDKLIREVKVITLKSKLVSDFRKDFQFYKVREINNYHHAHDAYLNAVVGTALIKKYPKLESEFVYGDYKVYDVRKMIAKSEQEIGKATAKYFFYSNIMNFFKTEITLANGEIRKRPLIETNGETGEIVWDKGRDFATVRKVLSMPQVNIVKKTEVQTGGFSKESILPKRNSDKLIARKKDWDPKKYGGFDSPTVAYSVLVVAKVEKGKSKKLKSVKELLGITIMERSSFEKNPIDFLEAKGYKEVKKDLIIKLPKYSLFELENGRKRMLASAGELQKGNELALPSKYVNFLYLASHYEKLKGSPEDNEQKQLFVEQHKHYLDEIIEQISEFSKRVILADANLDKVLSAYNKHRDKPIREQAENIIHLFTLTNLGAPAAFKYFDTTIDRKRYTSTKEVLDATLIHQSITGLYETRIDLSQLGGDGGGSSPAPGGGGGVLNLEEEYRLHEKPVPSSIDPSWLQLFPTVWAERAGMGLANQVPPVVVELRSGASPVAVRQYPMSKEAREGIRPHIQRFLDLGVLVPCQSPWNTPLLPVKKPGTNDYRPVQDLREINKRVQDIHPTVPNPYNLLSSLPPSHTWYSVLDLKDAFFCLKLHPNSQPLFAFEWRDPEKGNTGQLTWTRLPQGFKNSPTLFNEALHRDLAPFRALNPQVVLLQYVDDLLVAAPTYRDCKEGTQKLLQELSKLGYRVSAKKAQLCQKEVTYLGYLLKEGKRWLTPARKATVMKIPPPTTPRQVREFLGTAGFCRLWIPGFASLAAPLYPLTKPSIPFIWTEEHQKAFDRIKEALLSAPALALPDLTKPFTLYVDERAGVARGVLTQTLGPWRRPVAYLSKKLDPVASGWPTCLKAVAAVALLLKDADKLTLGQNVTVIASHSLESIVRQPPDRWMTNARMTHYQSLLLNERVSFAPPAVLNPATLLPVESEATPVHRCSEILAEETGTRRDLKDQPLPGVPAWYTDGSSFIAEGKRRAGAAIVDGKRTVWASSLPEGTSAQKAELVALTQALRLAEGKDINIYTDSRYAFATAHIHGAIYKQRGWLTSAGKDIKNKEEILALLEAIHLPKRVAIIHCPGHQKGNDPVATGNRRADEAAKQAALSTRVLAETTKPAGKRTADGSEFEKRTADGSEFESPKKKAKVE

SEQ ID NO: 846 - protein, 2095 aa, synthetic construct
MPAAKRVKLDGGDKKYSIGLDIGTNSVGWAVITDEYKVPSKKFKVLGNTDRHSIKKNLIGALLFDSGETAEATRLKRTARRRYTRRKNRICYLQEIFSNEMAKVDDSFFHRLEESFLVEEDKKHERHPIFGNIVDEVAYHEKYPTIYHLRKKLVDSTDKADLRLIYLALAHMIKFRGHFLIEGDLNPDNSDVDKLFIQLVQTYNQLFEENPINASGVDAKAILSARLSKSRRLENLIAQLPGEKKNGLFGNLIALSLGLTPNFKSNFDLAEDAKLQLSKDTYDDDLDNLLAQIGDQYADLFLAAKNLSDAILLSDILRVNTEITKAPLSASMIKRYDEHHQDLTLLKALVRQQLPEKYKEIFFDQSKNGYAGYIDGGASQEEFYKFIKPILEKMDGTEELLVKLNREDLLRKQRTFDNGSIPHQIHLGELHAILRRQEDFYPFLKDNREKIEKILTFRIPYYVGPLARGNSRFAWMTRKSEETITPWNFEEVVDKGASAQSFIERMTNFDKNLPNEKVLPKHSLLYEYFTVYNELTKVKYVTEGMRKPAFLSGEQKKAIVDLLFKTNRKVTVKQLKEDYFKKIECFDSVEISGVEDRFNASLGTYHDLLKIIKDKDFLDNEENEDILEDIVLTLTLFEDREMIEERLKTYAHLFDDKVMKQLKRRRYTGWGRLSRKLINGIRDKQSGKTILDFLKSDGFANRNFMQLIHDDSLTFKEDIQKAQVSGQGDSLHEHIANLAGSPAIKKGILQTVKVVDELVKVMGRHKPENIVIEMARENQTTQKGQKNSRERMKRIEEGIKELGSQILKEHPVENTQLQNEKLYLYYLQNGRDMYVDQELDINRLSDYDVDHIVPQSFLKDDSIDNKVLTRSDKARGKSDNVPSEEVVKKMKNYWRQLLNAKLITQRKFDNLTKAERGGLSELDKAGFIKRQLVETRQITKHVAQILDSRMNTKYDENDKLIREVKVITLKSKLVSDFRKDFQFYKVREINNYHHAHDAYLNAVVGTALIKKYPKLESEFVYGDYKVYDVRKMIAKSEQEIGKATAKYFFYSNIMNFFKTEITLANGEIRKRPLIETNGETGEIVWDKGRDFATVRKVLSMPQVNIVKKTEVQTGGFSKESILPKRNSDKLIARKKDWDPKKYGGFDSPTVAYSVLVVAKVEKGKSKKLKSVKELLGITIMERSSFEKNPIDFLEAKGYKEVKKDLIIKLPKYSLFELENGRKRMLASAGELQKGNELALPSKYVNFLYLASHYEKLKGSPEDNEQKQLFVEQHKHYLDEIIEQISEFSKRVILADANLDKVLSAYNKHRDKPIREQAENIIHLFTLTNLGAPAAFKYFDTTIDRKRYTSTKEVLDATLIHQSITGLYETRIDLSQLGGDGGGSSGSSGSSGSSGGVLNLEEEYRLHEKPVPSSIDPSWLQLFPTVWAERAGMGLANQVPPVVVELRSGASPVAVRQYPMSKEAREGIRPHIQRFLDLGVLVPCQSPWNTPLLPVKKPGTNDYRPVQDLREINKRVQDIHPTVPNPYNLLSSLPPSHTWYSVLDLKDAFFCLKLHPNSQPLFAFEWRDPEKGNTGQLTWTRLPQGFKNSPTLFNEALHRDLAPFRALNPQVVLLQYVDDLLVAAPTYRDCKEGTQKLLQELSKLGYRVSAKKAQLCQKEVTYLGYLLKEGKRWLTPARKATVMKIPPPTTPRQVREFLGTAGFCRLWIPGFASLAAPLYPLTKPSIPFIWTEEHQKAFDRIKEALLSAPALALPDLTKPFTLYVDERAGVARGVLTQTLGPWRRPVAYLSKKLDPVASGWPTCLKAVAAVALLLKDADKLTLGQNVTVIASHSLESIVRQPPDRWMTNARMTHYQSLLLNERVSFAPPAVLNPATLLPVESEATPVHRCSEILAEETGTRRDLKDQPLPGVPAWYTDGSSFIAEGKRRAGAAIVDGKRTVWASSLPEGTSAQKAELVALTQALRLAEGKDINIYTDSRYAFATAHIHGAIYKQRGWLTSAGKDIKNKEEILALLEAIHLPKRVAIIHCPGHQKGNDPVATGNRRADEAAKQAALSTRVLAETTKPAGKRTADGSEFEKRTADGSEFESPKKKAKVE

SEQ ID NO: 847 - protein, 2094 aa, synthetic construct
MPAAKRVKLDGGDKKYSIGLDIGTNSVGWAVITDEYKVPSKKFKVLGNTDRHSIKKNLIGALLFDSGETAEATRLKRTARRRYTRRKNRICYLQEIFSNEMAKVDDSFFHRLEESFLVEEDKKHERHPIFGNIVDEVAYHEKYPTIYHLRKKLVDSTDKADLRLIYLALAHMIKFRGHFLIEGDLNPDNSDVDKLFIQLVQTYNQLFEENPINASGVDAKAILSARLSKSRRLENLIAQLPGEKKNGLFGNLIALSLGLTPNFKSNFDLAEDAKLQLSKDTYDDDLDNLLAQIGDQYADLFLAAKNLSDAILLSDILRVNTEITKAPLSASMIKRYDEHHQDLTLLKALVRQQLPEKYKEIFFDQSKNGYAGYIDGGASQEEFYKFIKPILEKMDGTEELLVKLNREDLLRKQRTFDNGSIPHQIHLGELHAILRRQEDFYPFLKDNREKIEKILTFRIPYYVGPLARGNSRFAWMTRKSEETITPWNFEEVVDKGASAQSFIERMTNFDKNLPNEKVLPKHSLLYEYFTVYNELTKVKYVTEGMRKPAFLSGEQKKAIVDLLFKTNRKVTVKQLKEDYFKKIECFDSVEISGVEDRFNASLGTYHDLLKIIKDKDFLDNEENEDILEDIVLTLTLFEDREMIEERLKTYAHLFDDKVMKQLKRRRYTGWGRLSRKLINGIRDKQSGKTILDFLKSDGFANRNFMQLIHDDSLTFKEDIQKAQVSGQGDSLHEHIANLAGSPAIKKGILQTVKVVDELVKVMGRHKPENIVIEMARENQTTQKGQKNSRERMKRIEEGIKELGSQILKEHPVENTQLQNEKLYLYYLQNGRDMYVDQELDINRLSDYDVDHIVPQSFLKDDSIDNKVLTRSDKARGKSDNVPSEEVVKKMKNYWRQLLNAKLITQRKFDNLTKAERGGLSELDKAGFIKRQLVETRQITKHVAQILDSRMNTKYDENDKLIREVKVITLKSKLVSDFRKDFQFYKVREINNYHHAHDAYLNAVVGTALIKKYPKLESEFVYGDYKVYDVRKMIAKSEQEIGKATAKYFFYSNIMNFFKTEITLANGEIRKRPLIETNGETGEIVWDKGRDFATVRKVLSMPQVNIVKKTEVQTGGFSKESILPKRNSDKLIARKKDWDPKKYGGFDSPTVAYSVLVVAKVEKGKSKKLKSVKELLGITIMERSSFEKNPIDFLEAKGYKEVKKDLIIKLPKYSLFELENGRKRMLASAGELQKGNELALPSKYVNFLYLASHYEKLKGSPEDNEQKQLFVEQHKHYLDEIIEQISEFSKRVILADANLDKVLSAYNKHRDKPIREQAENIIHLFTLTNLGAPAAFKYFDTTIDRKRYTSTKEVLDATLIHQSITGLYETRIDLSQLGGDGGPAPGGSEAAAKGGVLNLEEEYRLHEKPVPSSIDPSWLQLFPTVWAERAGMGLANQVPPVVVELRSGASPVAVRQYPMSKEAREGIRPHIQRFLDLGVLVPCQSPWNTPLLPVKKPGTNDYRPVQDLREINKRVQDIHPTVPNPYNLLSSLPPSHTWYSVLDLKDAFFCLKLHPNSQPLFAFEWRDPEKGNTGQLTWTRLPQGFKNSPTLFNEALHRDLAPFRALNPQVVLLQYVDDLLVAAPTYRDCKEGTQKLLQELSKLGYRVSAKKAQLCQKEVTYLGYLLKEGKRWLTPARKATVMKIPPPTTPRQVREFLGTAGFCRLWIPGFASLAAPLYPLTKPSIPFIWTEEHQKAFDRIKEALLSAPALALPDLTKPFTLYVDERAGVARGVLTQTLGPWRRPVAYLSKKLDPVASGWPTCLKAVAAVALLLKDADKLTLGQNVTVIASHSLESIVRQPPDRWMTNARMTHYQSLLLNERVSFAPPAVLNPATLLPVESEATPVHRCSEILAEETGTRRDLKDQPLPGVPAWYTDGSSFIAEGKRRAGAAIVDGKRTVWASSLPEGTSAQKAELVALTQALRLAEGKDINIYTDSRYAFATAHIHGAIYKQRGWLTSAGKDIKNKEEILALLEAIHLPKRVAIIHCPGHQKGNDPVATGNRRADEAAKQAALSTRVLAETTKPAGKRTADGSEFEKRTADGSEFESPKKKAKVE

SEQ ID NO: 848 - protein, 2088 aa, synthetic construct
MPAAKRVKLDGGDKKYSIGLDIGTNSVGWAVITDEYKVPSKKFKVLGNTDRHSIKKNLIGALLFDSGETAEATRLKRTARRRYTRRKNRICYLQEIFSNEMAKVDDSFFHRLEESFLVEEDKKHERHPIFGNIVDEVAYHEKYPTIYHLRKKLVDSTDKADLRLIYLALAHMIKFRGHFLIEGDLNPDNSDVDKLFIQLVQTYNQLFEENPINASGVDAKAILSARLSKSRRLENLIAQLPGEKKNGLFGNLIALSLGLTPNFKSNFDLAEDAKLQLSKDTYDDDLDNLLAQIGDQYADLFLAAKNLSDAILLSDILRVNTEITKAPLSASMIKRYDEHHQDLTLLKALVRQQLPEKYKEIFFDQSKNGYAGYIDGGASQEEFYKFIKPILEKMDGTEELLVKLNREDLLRKQRTFDNGSIPHQIHLGELHAILRRQEDFYPFLKDNREKIEKILTFRIPYYVGPLARGNSRFAWMTRKSEETITPWNFEEVVDKGASAQSFIERMTNFDKNLPNEKVLPKHSLLYEYFTVYNELTKVKYVTEGMRKPAFLSGEQKKAIVDLLFKTNRKVTVKQLKEDYFKKIECFDSVEISGVEDRFNASLGTYHDLLKIIKDKDFLDNEENEDILEDIVLTLTLFEDREMIEERLKTYAHLFDDKVMKQLKRRRYTGWGRLSRKLINGIRDKQSGKTILDFLKSDGFANRNFMQLIHDDSLTFKEDIQKAQVSGQGDSLHEHIANLAGSPAIKKGILQTVKVVDELVKVMGRHKPENIVIEMARENQTTQKGQKNSRERMKRIEEGIKELGSQILKEHPVENTQLQNEKLYLYYLQNGRDMYVDQELDINRLSDYDVDHIVPQSFLKDDSIDNKVLTRSDKARGKSDNVPSEEVVKKMKNYWRQLLNAKLITQRKFDNLTKAERGGLSELDKAGFIKRQLVETRQITKHVAQILDSRMNTKYDENDKLIREVKVITLKSKLVSDFRKDFQFYKVREINNYHHAHDAYLNAVVGTALIKKYPKLESEFVYGDYKVYDVRKMIAKSEQEIGKATAKYFFYSNIMNFFKTEITLANGEIRKRPLIETNGETGEIVWDKGRDFATVRKVLSMPQVNIVKKTEVQTGGFSKESILPKRNSDKLIARKKDWDPKKYGGFDSPTVAYSVLVVAKVEKGKSKKLKSVKELLGITIMERSSFEKNPIDFLEAKGYKEVKKDLIIKLPKYSLFELENGRKRMLASAGELQKGNELALPSKYVNFLYLASHYEKLKGSPEDNEQKQLFVEQHKHYLDEIIEQISEFSKRVILADANLDKVLSAYNKHRDKPIREQAENIIHLFTLTNLGAPAAFKYFDTTIDRKRYTSTKEVLDATLIHQSITGLYETRIDLSQLGGDGGPAPAPGGVLNLEEEYRLHEKPVPSSIDPSWLQLFPTVWAERAGMGLANQVPPVVVELRSGASPVAVRQYPMSKEAREGIRPHIQRFLDLGVLVPCQSPWNTPLLPVKKPGTNDYRPVQDLREINKRVQDIHPTVPNPYNLLSSLPPSHTWYSVLDLKDAFFCLKLHPNSQPLFAFEWRDPEKGNTGQLTWTRLPQGFKNSPTLFNEALHRDLAPFRALNPQVVLLQYVDDLLVAAPTYRDCKEGTQKLLQELSKLGYRVSAKKAQLCQKEVTYLGYLLKEGKRWLTPARKATVMKIPPPTTPRQVREFLGTAGFCRLWIPGFASLAAPLYPLTKPSIPFIWTEEHQKAFDRIKEALLSAPALALPDLTKPFTLYVDERAGVARGVLTQTLGPWRRPVAYLSKKLDPVASGWPTCLKAVAAVALLLKDADKLTLGQNVTVIASHSLESIVRQPPDRWMTNARMTHYQSLLLNERVSFAPPAVLNPATLLPVESEATPVHRCSEILAEETGTRRDLKDQPLPGVPAWYTDGSSFIAEGKRRAGAAIVDGKRTVWASSLPEGTSAQKAELVALTQALRLAEGKDINIYTDSRYAFATAHIHGAIYKQRGWLTSAGKDIKNKEEILALLEAIHLPKRVAIIHCPGHQKGNDPVATGNRRADEAAKQAALSTRVLAETTKPAGKRTADGSEFEKRTADGSEFESPKKKAKVE

SEQ ID NO: 849 - protein, 2092 aa, synthetic construct
MPAAKRVKLDGGDKKYSIGLDIGTNSVGWAVITDEYKVPSKKFKVLGNTDRHSIKKNLIGALLFDSGETAEATRLKRTARRRYTRRKNRICYLQEIFSNEMAKVDDSFFHRLEESFLVEEDKKHERHPIFGNIVDEVAYHEKYPTIYHLRKKLVDSTDKADLRLIYLALAHMIKFRGHFLIEGDLNPDNSDVDKLFIQLVQTYNQLFEENPINASGVDAKAILSARLSKSRRLENLIAQLPGEKKNGLFGNLIALSLGLTPNFKSNFDLAEDAKLQLSKDTYDDDLDNLLAQIGDQYADLFLAAKNLSDAILLSDILRVNTEITKAPLSASMIKRYDEHHQDLTLLKALVRQQLPEKYKEIFFDQSKNGYAGYIDGGASQEEFYKFIKPILEKMDGTEELLVKLNREDLLRKQRTFDNGSIPHQIHLGELHAILRRQEDFYPFLKDNREKIEKILTFRIPYYVGPLARGNSRFAWMTRKSEETITPWNFEEVVDKGASAQSFIERMTNFDKNLPNEKVLPKHSLLYEYFTVYNELTKVKYVTEGMRKPAFLSGEQKKAIVDLLFKTNRKVTVKQLKEDYFKKIECFDSVEISGVEDRFNASLGTYHDLLKIIKDKDFLDNEENEDILEDIVLTLTLFEDREMIEERLKTYAHLFDDKVMKQLKRRRYTGWGRLSRKLINGIRDKQSGKTILDFLKSDGFANRNFMQLIHDDSLTFKEDIQKAQVSGQGDSLHEHIANLAGSPAIKKGILQTVKVVDELVKVMGRHKPENIVIEMARENQTTQKGQKNSRERMKRIEEGIKELGSQILKEHPVENTQLQNEKLYLYYLQNGRDMYVDQELDINRLSDYDVDHIVPQSFLKDDSIDNKVLTRSDKARGKSDNVPSEEVVKKMKNYWRQLLNAKLITQRKFDNLTKAERGGLSELDKAGFIKRQLVETRQITKHVAQILDSRMNTKYDENDKLIREVKVITLKSKLVSDFRKDFQFYKVREINNYHHAHDAYLNAVVGTALIKKYPKLESEFVYGDYKVYDVRKMIAKSEQEIGKATAKYFFYSNIMNFFKTEITLANGEIRKRPLIETNGETGEIVWDKGRDFATVRKVLSMPQVNIVKKTEVQTGGFSKESILPKRNSDKLIARKKDWDPKKYGGFDSPTVAYSVLVVAKVEKGKSKKLKSVKELLGITIMERSSFEKNPIDFLEAKGYKEVKKDLIIKLPKYSLFELENGRKRMLASAGELQKGNELALPSKYVNFLYLASHYEKLKGSPEDNEQKQLFVEQHKHYLDEIIEQISEFSKRVILADANLDKVLSAYNKHRDKPIREQAENIIHLFTLTNLGAPAAFKYFDTTIDRKRYTSTKEVLDATLIHQSITGLYETRIDLSQLGGDGGGSSGGGGGSGGVLNLEEEYRLHEKPVPSSIDPSWLQLFPTVWAERAGMGLANQVPPVVVELRSGASPVAVRQYPMSKEAREGIRPHIQRFLDLGVLVPCQSPWNTPLLPVKKPGTNDYRPVQDLREINKRVQDIHPTVPNPYNLLSSLPPSHTWYSVLDLKDAFFCLKLHPNSQPLFAFEWRDPEKGNTGQLTWTRLPQGFKNSPTLFNEALHRDLAPFRALNPQVVLLQYVDDLLVAAPTYRDCKEGTQKLLQELSKLGYRVSAKKAQLCQKEVTYLGYLLKEGKRWLTPARKATVMKIPPPTTPRQVREFLGTAGFCRLWIPGFASLAAPLYPLTKPSIPFIWTEEHQKAFDRIKEALLSAPALALPDLTKPFTLYVDERAGVARGVLTQTLGPWRRPVAYLSKKLDPVASGWPTCLKAVAAVALLLKDADKLTLGQNVTVIASHSLESIVRQPPDRWMTNARMTHYQSLLLNERVSFAPPAVLNPATLLPVESEATPVHRCSEILAEETGTRRDLKDQPLPGVPAWYTDGSSFIAEGKRRAGAAIVDGKRTVWASSLPEGTSAQKAELVALTQALRLAEGKDINIYTDSRYAFATAHIHGAIYKQRGWLTSAGKDIKNKEEILALLEAIHLPKRVAIIHCPGHQKGNDPVATGNRRADEAAKQAALSTRVLAETTKPAGKRTADGSEFEKRTADGSEFESPKKKAKVE

SEQ ID NO: 850 - protein, 2092 aa, synthetic construct
MPAAKRVKLDGGDKKYSIGLDIGTNSVGWAVITDEYKVPSKKFKVLGNTDRHSIKKNLIGALLFDSGETAEATRLKRTARRRYTRRKNRICYLQEIFSNEMAKVDDSFFHRLEESFLVEEDKKHERHPIFGNIVDEVAYHEKYPTIYHLRKKLVDSTDKADLRLIYLALAHMIKFRGHFLIEGDLNPDNSDVDKLFIQLVQTYNQLFEENPINASGVDAKAILSARLSKSRRLENLIAQLPGEKKNGLFGNLIALSLGLTPNFKSNFDLAEDAKLQLSKDTYDDDLDNLLAQIGDQYADLFLAAKNLSDAILLSDILRVNTEITKAPLSASMIKRYDEHHQDLTLLKALVRQQLPEKYKEIFFDQSKNGYAGYIDGGASQEEFYKFIKPILEKMDGTEELLVKLNREDLLRKQRTFDNGSIPHQIHLGELHAILRRQEDFYPFLKDNREKIEKILTFRIPYYVGPLARGNSRFAWMTRKSEETITPWNFEEVVDKGASAQSFIERMTNFDKNLPNEKVLPKHSLLYEYFTVYNELTKVKYVTEGMRKPAFLSGEQKKAIVDLLFKTNRKVTVKQLKEDYFKKIECFDSVEISGVEDRFNASLGTYHDLLKIIKDKDFLDNEENEDILEDIVLTLTLFEDREMIEERLKTYAHLFDDKVMKQLKRRRYTGWGRLSRKLINGIRDKQSGKTILDFLKSDGFANRNFMQLIHDDSLTFKEDIQKAQVSGQGDSLHEHIANLAGSPAIKKGILQTVKVVDELVKVMGRHKPENIVIEMARENQTTQKGQKNSRERMKRIEEGIKELGSQILKEHPVENTQLQNEKLYLYYLQNGRDMYVDQELDINRLSDYDVDHIVPQSFLKDDSIDNKVLTRSDKARGKSDNVPSEEVVKKMKNYWRQLLNAKLITQRKFDNLTKAERGGLSELDKAGFIKRQLVETRQITKHVAQILDSRMNTKYDENDKLIREVKVITLKSKLVSDFRKDFQFYKVREINNYHHAHDAYLNAVVGTALIKKYPKLESEFVYGDYKVYDVRKMIAKSEQEIGKATAKYFFYSNIMNFFKTEITLANGEIRKRPLIETNGETGEIVWDKGRDFATVRKVLSMPQVNIVKKTEVQTGGFSKESILPKRNSDKLIARKKDWDPKKYGGFDSPTVAYSVLVVAKVEKGKSKKLKSVKELLGITIMERSSFEKNPIDFLEAKGYKEVKKDLIIKLPKYSLFELENGRKRMLASAGELQKGNELALPSKYVNFLYLASHYEKLKGSPEDNEQKQLFVEQHKHYLDEIIEQISEFSKRVILADANLDKVLSAYNKHRDKPIREQAENIIHLFTLTNLGAPAAFKYFDTTIDRKRYTSTKEVLDATLIHQSITGLYETRIDLSQLGGDGGGGSGGSGGSGGVLNLEEEYRLHEKPVPSSIDPSWLQLFPTVWAERAGMGLANQVPPVVVELRSGASPVAVRQYPMSKEAREGIRPHIQRFLDLGVLVPCQSPWNTPLLPVKKPGTNDYRPVQDLREINKRVQDIHPTVPNPYNLLSSLPPSHTWYSVLDLKDAFFCLKLHPNSQPLFAFEWRDPEKGNTGQLTWTRLPQGFKNSPTLFNEALHRDLAPFRALNPQVVLLQYVDDLLVAAPTYRDCKEGTQKLLQELSKLGYRVSAKKAQLCQKEVTYLGYLLKEGKRWLTPARKATVMKIPPPTTPRQVREFLGTAGFCRLWIPGFASLAAPLYPLTKPSIPFIWTEEHQKAFDRIKEALLSAPALALPDLTKPFTLYVDERAGVARGVLTQTLGPWRRPVAYLSKKLDPVASGWPTCLKAVAAVALLLKDADKLTLGQNVTVIASHSLESIVRQPPDRWMTNARMTHYQSLLLNERVSFAPPAVLNPATLLPVESEATPVHRCSEILAEETGTRRDLKDQPLPGVPAWYTDGSSFIAEGKRRAGAAIVDGKRTVWASSLPEGTSAQKAELVALTQALRLAEGKDINIYTDSRYAFATAHIHGAIYKQRGWLTSAGKDIKNKEEILALLEAIHLPKRVAIIHCPGHQKGNDPVATGNRRADEAAKQAALSTRVLAETTKPAGKRTADGSEFEKRTADGSEFESPKKKAKVE

SEQ ID NO: 851 - protein, 2086 aa, synthetic construct
MPAAKRVKLDGGDKKYSIGLDIGTNSVGWAVITDEYKVPSKKFKVLGNTDRHSIKKNLIGALLFDSGETAEATRLKRTARRRYTRRKNRICYLQEIFSNEMAKVDDSFFHRLEESFLVEEDKKHERHPIFGNIVDEVAYHEKYPTIYHLRKKLVDSTDKADLRLIYLALAHMIKFRGHFLIEGDLNPDNSDVDKLFIQLVQTYNQLFEENPINASGVDAKAILSARLSKSRRLENLIAQLPGEKKNGLFGNLIALSLGLTPNFKSNFDLAEDAKLQLSKDTYDDDLDNLLAQIGDQYADLFLAAKNLSDAILLSDILRVNTEITKAPLSASMIKRYDEHHQDLTLLKALVRQQLPEKYKEIFFDQSKNGYAGYIDGGASQEEFYKFIKPILEKMDGTEELLVKLNREDLLRKQRTFDNGSIPHQIHLGELHAILRRQEDFYPFLKDNREKIEKILTFRIPYYVGPLARGNSRFAWMTRKSEETITPWNFEEVVDKGASAQSFIERMTNFDKNLPNEKVLPKHSLLYEYFTVYNELTKVKYVTEGMRKPAFLSGEQKKAIVDLLFKTNRKVTVKQLKEDYFKKIECFDSVEISGVEDRFNASLGTYHDLLKIIKDKDFLDNEENEDILEDIVLTLTLFEDREMIEERLKTYAHLFDDKVMKQLKRRRYTGWGRLSRKLINGIRDKQSGKTILDFLKSDGFANRNFMQLIHDDSLTFKEDIQKAQVSGQGDSLHEHIANLAGSPAIKKGILQTVKVVDELVKVMGRHKPENIVIEMARENQTTQKGQKNSRERMKRIEEGIKELGSQILKEHPVENTQLQNEKLYLYYLQNGRDMYVDQELDINRLSDYDVDHIVPQSFLKDDSIDNKVLTRSDKARGKSDNVPSEEVVKKMKNYWRQLLNAKLITQRKFDNLTKAERGGLSELDKAGFIKRQLVETRQITKHVAQILDSRMNTKYDENDKLIREVKVITLKSKLVSDFRKDFQFYKVREINNYHHAHDAYLNAVVGTALIKKYPKLESEFVYGDYKVYDVRKMIAKSEQEIGKATAKYFFYSNIMNFFKTEITLANGEIRKRPLIETNGETGEIVWDKGRDFATVRKVLSMPQVNIVKKTEVQTGGFSKESILPKRNSDKLIARKKDWDPKKYGGFDSPTVAYSVLVVAKVEKGKSKKLKSVKELLGITIMERSSFEKNPIDFLEAKGYKEVKKDLIIKLPKYSLFELENGRKRMLASAGELQKGNELALPSKYVNFLYLASHYEKLKGSPEDNEQKQLFVEQHKHYLDEIIEQISEFSKRVILADANLDKVLSAYNKHRDKPIREQAENIIHLFTLTNLGAPAAFKYFDTTIDRKRYTSTKEVLDATLIHQSITGLYETRIDLSQLGGDGGGGSGGVLNLEEEYRLHEKPVPSSIDPSWLQLFPTVWAERAGMGLANQVPPVVVELRSGASPVAVRQYPMSKEAREGIRPHIQRFLDLGVLVPCQSPWNTPLLPVKKPGTNDYRPVQDLREINKRVQDIHPTVPNPYNLLSSLPPSHTWYSVLDLKDAFFCLKLHPNSQPLFAFEWRDPEKGNTGQLTWTRLPQGFKNSPTLFNEALHRDLAPFRALNPQVVLLQYVDDLLVAAPTYRDCKEGTQKLLQELSKLGYRVSAKKAQLCQKEVTYLGYLLKEGKRWLTPARKATVMKIPPPTTPRQVREFLGTAGFCRLWIPGFASLAAPLYPLTKPSIPFIWTEEHQKAFDRIKEALLSAPALALPDLTKPFTLYVDERAGVARGVLTQTLGPWRRPVAYLSKKLDPVASGWPTCLKAVAAVALLLKDADKLTLGQNVTVIASHSLESIVRQPPDRWMTNARMTHYQSLLLNERVSFAPPAVLNPATLLPVESEATPVHRCSEILAEETGTRRDLKDQPLPGVPAWYTDGSSFIAEGKRRAGAAIVDGKRTVWASSLPEGTSAQKAELVALTQALRLAEGKDINIYTDSRYAFATAHIHGAIYKQRGWLTSAGKDIKNKEEILALLEAIHLPKRVAIIHCPGHQKGNDPVATGNRRADEAAKQAALSTRVLAETTKPAGKRTADGSEFEKRTADGSEFESPKKKAKVE

SEQ ID NO: 852 - protein, 2091 aa, synthetic construct
MPAAKRVKLDGGDKKYSIGLDIGTNSVGWAVITDEYKVPSKKFKVLGNTDRHSIKKNLIGALLFDSGETAEATRLKRTARRRYTRRKNRICYLQEIFSNEMAKVDDSFFHRLEESFLVEEDKKHERHPIFGNIVDEVAYHEKYPTIYHLRKKLVDSTDKADLRLIYLALAHMIKFRGHFLIEGDLNPDNSDVDKLFIQLVQTYNQLFEENPINASGVDAKAILSARLSKSRRLENLIAQLPGEKKNGLFGNLIALSLGLTPNFKSNFDLAEDAKLQLSKDTYDDDLDNLLAQIGDQYADLFLAAKNLSDAILLSDILRVNTEITKAPLSASMIKRYDEHHQDLTLLKALVRQQLPEKYKEIFFDQSKNGYAGYIDGGASQEEFYKFIKPILEKMDGTEELLVKLNREDLLRKQRTFDNGSIPHQIHLGELHAILRRQEDFYPFLKDNREKIEKILTFRIPYYVGPLARGNSRFAWMTRKSEETITPWNFEEVVDKGASAQSFIERMTNFDKNLPNEKVLPKHSLLYEYFTVYNELTKVKYVTEGMRKPAFLSGEQKKAIVDLLFKTNRKVTVKQLKEDYFKKIECFDSVEISGVEDRFNASLGTYHDLLKIIKDKDFLDNEENEDILEDIVLTLTLFEDREMIEERLKTYAHLFDDKVMKQLKRRRYTGWGRLSRKLINGIRDKQSGKTILDFLKSDGFANRNFMQLIHDDSLTFKEDIQKAQVSGQGDSLHEHIANLAGSPAIKKGILQTVKVVDELVKVMGRHKPENIVIEMARENQTTQKGQKNSRERMKRIEEGIKELGSQILKEHPVENTQLQNEKLYLYYLQNGRDMYVDQELDINRLSDYDVDHIVPQSFLKDDSIDNKVLTRSDKARGKSDNVPSEEVVKKMKNYWRQLLNAKLITQRKFDNLTKAERGGLSELDKAGFIKRQLVETRQITKHVAQILDSRMNTKYDENDKLIREVKVITLKSKLVSDFRKDFQFYKVREINNYHHAHDAYLNAVVGTALIKKYPKLESEFVYGDYKVYDVRKMIAKSEQEIGKATAKYFFYSNIMNFFKTEITLANGEIRKRPLIETNGETGEIVWDKGRDFATVRKVLSMPQVNIVKKTEVQTGGFSKESILPKRNSDKLIARKKDWDPKKYGGFDSPTVAYSVLVVAKVEKGKSKKLKSVKELLGITIMERSSFEKNPIDFLEAKGYKEVKKDLIIKLPKYSLFELENGRKRMLASAGELQKGNELALPSKYVNFLYLASHYEKLKGSPEDNEQKQLFVEQHKHYLDEIIEQISEFSKRVILADANLDKVLSAYNKHRDKPIREQAENIIHLFTLTNLGAPAAFKYFDTTIDRKRYTSTKEVLDATLIHQSITGLYETRIDLSQLGGDGGGGSEAAAKGGVLNLEEEYRLHEKPVPSSIDPSWLQLFPTVWAERAGMGLANQVPPVVVELRSGASPVAVRQYPMSKEAREGIRPHIQRFLDLGVLVPCQSPWNTPLLPVKKPGTNDYRPVQDLREINKRVQDIHPTVPNPYNLLSSLPPSHTWYSVLDLKDAFFCLKLHPNSQPLFAFEWRDPEKGNTGQLTWTRLPQGFKNSPTLFNEALHRDLAPFRALNPQVVLLQYVDDLLVAAPTYRDCKEGTQKLLQELSKLGYRVSAKKAQLCQKEVTYLGYLLKEGKRWLTPARKATVMKIPPPTTPRQVREFLGTAGFCRLWIPGFASLAAPLYPLTKPSIPFIWTEEHQKAFDRIKEALLSAPALALPDLTKPFTLYVDERAGVARGVLTQTLGPWRRPVAYLSKKLDPVASGWPTCLKAVAAVALLLKDADKLTLGQNVTVIASHSLESIVRQPPDRWMTNARMTHYQSLLLNERVSFAPPAVLNPATLLPVESEATPVHRCSEILAEETGTRRDLKDQPLPGVPAWYTDGSSFIAEGKRRAGAAIVDGKRTVWASSLPEGTSAQKAELVALTQALRLAEGKDINIYTDSRYAFATAHIHGAIYKQRGWLTSAGKDIKNKEEILALLEAIHLPKRVAIIHCPGHQKGNDPVATGNRRADEAAKQAALSTRVLAETTKPAGKRTADGSEFEKRTADGSEFESPKKKAKVE

SEQ ID NO: 853 - protein, 2094 aa, synthetic construct
MPAAKRVKLDGGDKKYSIGLDIGTNSVGWAVITDEYKVPSKKFKVLGNTDRHSIKKNLIGALLFDSGETAEATRLKRTARRRYTRRKNRICYLQEIFSNEMAKVDDSFFHRLEESFLVEEDKKHERHPIFGNIVDEVAYHEKYPTIYHLRKKLVDSTDKADLRLIYLALAHMIKFRGHFLIEGDLNPDNSDVDKLFIQLVQTYNQLFEENPINASGVDAKAILSARLSKSRRLENLIAQLPGEKKNGLFGNLIALSLGLTPNFKSNFDLAEDAKLQLSKDTYDDDLDNLLAQIGDQYADLFLAAKNLSDAILLSDILRVNTEITKAPLSASMIKRYDEHHQDLTLLKALVRQQLPEKYKEIFFDQSKNGYAGYIDGGASQEEFYKFIKPILEKMDGTEELLVKLNREDLLRKQRTFDNGSIPHQIHLGELHAILRRQEDFYPFLKDNREKIEKILTFRIPYYVGPLARGNSRFAWMTRKSEETITPWNFEEVVDKGASAQSFIERMTNFDKNLPNEKVLPKHSLLYEYFTVYNELTKVKYVTEGMRKPAFLSGEQKKAIVDLLFKTNRKVTVKQLKEDYFKKIECFDSVEISGVEDRFNASLGTYHDLLKIIKDKDFLDNEENEDILEDIVLTLTLFEDREMIEERLKTYAHLFDDKVMKQLKRRRYTGWGRLSRKLINGIRDKQSGKTILDFLKSDGFANRNFMQLIHDDSLTFKEDIQKAQVSGQGDSLHEHIANLAGSPAIKKGILQTVKVVDELVKVMGRHKPENIVIEMARENQTTQKGQKNSRERMKRIEEGIKELGSQILKEHPVENTQLQNEKLYLYYLQNGRDMYVDQELDINRLSDYDVDHIVPQSFLKDDSIDNKVLTRSDKARGKSDNVPSEEVVKKMKNYWRQLLNAKLITQRKFDNLTKAERGGLSELDKAGFIKRQLVETRQITKHVAQILDSRMNTKYDENDKLIREVKVITLKSKLVSDFRKDFQFYKVREINNYHHAHDAYLNAVVGTALIKKYPKLESEFVYGDYKVYDVRKMIAKSEQEIGKATAKYFFYSNIMNFFKTEITLANGEIRKRPLIETNGETGEIVWDKGRDFATVRKVLSMPQVNIVKKTEVQTGGFSKESILPKRNSDKLIARKKDWDPKKYGGFDSPTVAYSVLVVAKVEKGKSKKLKSVKELLGITIMERSSFEKNPIDFLEAKGYKEVKKDLIIKLPKYSLFELENGRKRMLASAGELQKGNELALPSKYVNFLYLASHYEKLKGSPEDNEQKQLFVEQHKHYLDEIIEQISEFSKRVILADANLDKVLSAYNKHRDKPIREQAENIIHLFTLTNLGAPAAFKYFDTTIDRKRYTSTKEVLDATLIHQSITGLYETRIDLSQLGGDGGGSSEAAAKGGGGGVLNLEEEYRLHEKPVPSSIDPSWLQLFPTVWAERAGMGLANQVPPVVVELRSGASPVAVRQYPMSKEAREGIRPHIQRFLDLGVLVPCQSPWNTPLLPVKKPGTNDYRPVQDLREINKRVQDIHPTVPNPYNLLSSLPPSHTWYSVLDLKDAFFCLKLHPNSQPLFAFEWRDPEKGNTGQLTWTRLPQGFKNSPTLFNEALHRDLAPFRALNPQVVLLQYVDDLLVAAPTYRDCKEGTQKLLQELSKLGYRVSAKKAQLCQKEVTYLGYLLKEGKRWLTPARKATVMKIPPPTTPRQVREFLGTAGFCRLWIPGFASLAAPLYPLTKPSIPFIWTEEHQKAFDRIKEALLSAPALALPDLTKPFTLYVDERAGVARGVLTQTLGPWRRPVAYLSKKLDPVASGWPTCLKAVAAVALLLKDADKLTLGQNVTVIASHSLESIVRQPPDRWMTNARMTHYQSLLLNERVSFAPPAVLNPATLLPVESEATPVHRCSEILAEETGTRRDLKDQPLPGVPAWYTDGSSFIAEGKRRAGAAIVDGKRTVWASSLPEGTSAQKAELVALTQALRLAEGKDINIYTDSRYAFATAHIHGAIYKQRGWLTSAGKDIKNKEEILALLEAIHLPKRVAIIHCPGHQKGNDPVATGNRRADEAAKQAALSTRVLAETTKPAGKRTADGSEFEKRTADGSEFESPKKKAKVE

SEQ ID NO: 854 - protein, 2094 aa, synthetic construct
MPAAKRVKLDGGDKKYSIGLDIGTNSVGWAVITDEYKVPSKKFKVLGNTDRHSIKKNLIGALLFDSGETAEATRLKRTARRRYTRRKNRICYLQEIFSNEMAKVDDSFFHRLEESFLVEEDKKHERHPIFGNIVDEVAYHEKYPTIYHLRKKLVDSTDKADLRLIYLALAHMIKFRGHFLIEGDLNPDNSDVDKLFIQLVQTYNQLFEENPINASGVDAKAILSARLSKSRRLENLIAQLPGEKKNGLFGNLIALSLGLTPNFKSNFDLAEDAKLQLSKDTYDDDLDNLLAQIGDQYADLFLAAKNLSDAILLSDILRVNTEITKAPLSASMIKRYDEHHQDLTLLKALVRQQLPEKYKEIFFDQSKNGYAGYIDGGASQEEFYKFIKPILEKMDGTEELLVKLNREDLLRKQRTFDNGSIPHQIHLGELHAILRRQEDFYPFLKDNREKIEKILTFRIPYYVGPLARGNSRFAWMTRKSEETITPWNFEEVVDKGASAQSFIERMTNFDKNLPNEKVLPKHSLLYEYFTVYNELTKVKYVTEGMRKPAFLSGEQKKAIVDLLFKTNRKVTVKQLKEDYFKKIECFDSVEISGVEDRFNASLGTYHDLLKIIKDKDFLDNEENEDILEDIVLTLTLFEDREMIEERLKTYAHLFDDKVMKQLKRRRYTGWGRLSRKLINGIRDKQSGKTILDFLKSDGFANRNFMQLIHDDSLTFKEDIQKAQVSGQGDSLHEHIANLAGSPAIKKGILQTVKVVDELVKVMGRHKPENIVIEMARENQTTQKGQKNSRERMKRIEEGIKELGSQILKEHPVENTQLQNEKLYLYYLQNGRDMYVDQELDINRLSDYDVDHIVPQSFLKDDSIDNKVLTRSDKARGKSDNVPSEEVVKKMKNYWRQLLNAKLITQRKFDNLTKAERGGLSELDKAGFIKRQLVETRQITKHVAQILDSRMNTKYDENDKLIREVKVITLKSKLVSDFRKDFQFYKVREINNYHHAHDAYLNAVVGTALIKKYPKLESEFVYGDYKVYDVRKMIAKSEQEIGKATAKYFFYSNIMNFFKTEITLANGEIRKRPLIETNGETGEIVWDKGRDFATVRKVLSMPQVNIVKKTEVQTGGFSKESILPKRNSDKLIARKKDWDPKKYGGFDSPTVAYSVLVVAKVEKGKSKKLKSVKELLGITIMERSSFEKNPIDFLEAKGYKEVKKDLIIKLPKYSLFELENGRKRMLASAGELQKGNELALPSKYVNFLYLASHYEKLKGSPEDNEQKQLFVEQHKHYLDEIIEQISEFSKRVILADANLDKVLSAYNKHRDKPIREQAENIIHLFTLTNLGAPAAFKYFDTTIDRKRYTSTKEVLDATLIHQSITGLYETRIDLSQLGGDGGGGSEAAAKGGGGGVLNLEEEYRLHEKPVPSSIDPSWLQLFPTVWAERAGMGLANQVPPVVVELRSGASPVAVRQYPMSKEAREGIRPHIQRFLDLGVLVPCQSPWNTPLLPVKKPGTNDYRPVQDLREINKRVQDIHPTVPNPYNLLSSLPPSHTWYSVLDLKDAFFCLKLHPNSQPLFAFEWRDPEKGNTGQLTWTRLPQGFKNSPTLFNEALHRDLAPFRALNPQVVLLQYVDDLLVAAPTYRDCKEGTQKLLQELSKLGYRVSAKKAQLCQKEVTYLGYLLKEGKRWLTPARKATVMKIPPPTTPRQVREFLGTAGFCRLWIPGFASLAAPLYPLTKPSIPFIWTEEHQKAFDRIKEALLSAPALALPDLTKPFTLYVDERAGVARGVLTQTLGPWRRPVAYLSKKLDPVASGWPTCLKAVAAVALLLKDADKLTLGQNVTVIASHSLESIVRQPPDRWMTNARMTHYQSLLLNERVSFAPPAVLNPATLLPVESEATPVHRCSEILAEETGTRRDLKDQPLPGVPAWYTDGSSFIAEGKRRAGAAIVDGKRTVWASSLPEGTSAQKAELVALTQALRLAEGKDINIYTDSRYAFATAHIHGAIYKQRGWLTSAGKDIKNKEEILALLEAIHLPKRVAIIHCPGHQKGNDPVATGNRRADEAAKQAALSTRVLAETTKPAGKRTADGSEFEKRTADGSEFESPKKKAKVE

SEQ ID NO: 855 - protein, 2089 aa, synthetic construct
MPAAKRVKLDGGDKKYSIGLDIGTNSVGWAVITDEYKVPSKKFKVLGNTDRHSIKKNLIGALLFDSGETAEATRLKRTARRRYTRRKNRICYLQEIFSNEMAKVDDSFFHRLEESFLVEEDKKHERHPIFGNIVDEVAYHEKYPTIYHLRKKLVDSTDKADLRLIYLALAHMIKFRGHFLIEGDLNPDNSDVDKLFIQLVQTYNQLFEENPINASGVDAKAILSARLSKSRRLENLIAQLPGEKKNGLFGNLIALSLGLTPNFKSNFDLAEDAKLQLSKDTYDDDLDNLLAQIGDQYADLFLAAKNLSDAILLSDILRVNTEITKAPLSASMIKRYDEHHQDLTLLKALVRQQLPEKYKEIFFDQSKNGYAGYIDGGASQEEFYKFIKPILEKMDGTEELLVKLNREDLLRKQRTFDNGSIPHQIHLGELHAILRRQEDFYPFLKDNREKIEKILTFRIPYYVGPLARGNSRFAWMTRKSEETITPWNFEEVVDKGASAQSFIERMTNFDKNLPNEKVLPKHSLLYEYFTVYNELTKVKYVTEGMRKPAFLSGEQKKAIVDLLFKTNRKVTVKQLKEDYFKKIECFDSVEISGVEDRFNASLGTYHDLLKIIKDKDFLDNEENEDILEDIVLTLTLFEDREMIEERLKTYAHLFDDKVMKQLKRRRYTGWGRLSRKLINGIRDKQSGKTILDFLKSDGFANRNFMQLIHDDSLTFKEDIQKAQVSGQGDSLHEHIANLAGSPAIKKGILQTVKVVDELVKVMGRHKPENIVIEMARENQTTQKGQKNSRERMKRIEEGIKELGSQILKEHPVENTQLQNEKLYLYYLQNGRDMYVDQELDINRLSDYDVDHIVPQSFLKDDSIDNKVLTRSDKARGKSDNVPSEEVVKKMKNYWRQLLNAKLITQRKFDNLTKAERGGLSELDKAGFIKRQLVETRQITKHVAQILDSRMNTKYDENDKLIREVKVITLKSKLVSDFRKDFQFYKVREINNYHHAHDAYLNAVVGTALIKKYPKLESEFVYGDYKVYDVRKMIAKSEQEIGKATAKYFFYSNIMNFFKTEITLANGEIRKRPLIETNGETGEIVWDKGRDFATVRKVLSMPQVNIVKKTEVQTGGFSKESILPKRNSDKLIARKKDWDPKKYGGFDSPTVAYSVLVVAKVEKGKSKKLKSVKELLGITIMERSSFEKNPIDFLEAKGYKEVKKDLIIKLPKYSLFELENGRKRMLASAGELQKGNELALPSKYVNFLYLASHYEKLKGSPEDNEQKQLFVEQHKHYLDEIIEQISEFSKRVILADANLDKVLSAYNKHRDKPIREQAENIIHLFTLTNLGAPAAFKYFDTTIDRKRYTSTKEVLDATLIHQSITGLYETRIDLSQLGGDGGGGSGGGGGVLNLEEEYRLHEKPVPSSIDPSWLQLFPTVWAERAGMGLANQVPPVVVELRSGASPVAVRQYPMSKEAREGIRPHIQRFLDLGVLVPCQSPWNTPLLPVKKPGTNDYRPVQDLREINKRVQDIHPTVPNPYNLLSSLPPSHTWYSVLDLKDAFFCLKLHPNSQPLFAFEWRDPEKGNTGQLTWTRLPQGFKNSPTLFNEALHRDLAPFRALNPQVVLLQYVDDLLVAAPTYRDCKEGTQKLLQELSKLGYRVSAKKAQLCQKEVTYLGYLLKEGKRWLTPARKATVMKIPPPTTPRQVREFLGTAGFCRLWIPGFASLAAPLYPLTKPSIPFIWTEEHQKAFDRIKEALLSAPALALPDLTKPFTLYVDERAGVARGVLTQTLGPWRRPVAYLSKKLDPVASGWPTCLKAVAAVALLLKDADKLTLGQNVTVIASHSLESIVRQPPDRWMTNARMTHYQSLLLNERVSFAPPAVLNPATLLPVESEATPVHRCSEILAEETGTRRDLKDQPLPGVPAWYTDGSSFIAEGKRRAGAAIVDGKRTVWASSLPEGTSAQKAELVALTQALRLAEGKDINIYTDSRYAFATAHIHGAIYKQRGWLTSAGKDIKNKEEILALLEAIHLPKRVAIIHCPGHQKGNDPVATGNRRADEAAKQAALSTRVLAETTKPAGKRTADGSEFEKRTADGSEFESPKKKAKVE

SEQ ID NO: 856 - protein, 2094 aa, synthetic construct
MPAAKRVKLDGGDKKYSIGLDIGTNSVGWAVITDEYKVPSKKFKVLGNTDRHSIKKNLIGALLFDSGETAEATRLKRTARRRYTRRKNRICYLQEIFSNEMAKVDDSFFHRLEESFLVEEDKKHERHPIFGNIVDEVAYHEKYPTIYHLRKKLVDSTDKADLRLIYLALAHMIKFRGHFLIEGDLNPDNSDVDKLFIQLVQTYNQLFEENPINASGVDAKAILSARLSKSRRLENLIAQLPGEKKNGLFGNLIALSLGLTPNFKSNFDLAEDAKLQLSKDTYDDDLDNLLAQIGDQYADLFLAAKNLSDAILLSDILRVNTEITKAPLSASMIKRYDEHHQDLTLLKALVRQQLPEKYKEIFFDQSKNGYAGYIDGGASQEEFYKFIKPILEKMDGTEELLVKLNREDLLRKQRTFDNGSIPHQIHLGELHAILRRQEDFYPFLKDNREKIEKILTFRIPYYVGPLARGNSRFAWMTRKSEETITPWNFEEVVDKGASAQSFIERMTNFDKNLPNEKVLPKHSLLYEYFTVYNELTKVKYVTEGMRKPAFLSGEQKKAIVDLLFKTNRKVTVKQLKEDYFKKIECFDSVEISGVEDRFNASLGTYHDLLKIIKDKDFLDNEENEDILEDIVLTLTLFEDREMIEERLKTYAHLFDDKVMKQLKRRRYTGWGRLSRKLINGIRDKQSGKTILDFLKSDGFANRNFMQLIHDDSLTFKEDIQKAQVSGQGDSLHEHIANLAGSPAIKKGILQTVKVVDELVKVMGRHKPENIVIEMARENQTTQKGQKNSRERMKRIEEGIKELGSQILKEHPVENTQLQNEKLYLYYLQNGRDMYVDQELDINRLSDYDVDHIVPQSFLKDDSIDNKVLTRSDKARGKSDNVPSEEVVKKMKNYWRQLLNAKLITQRKFDNLTKAERGGLSELDKAGFIKRQLVETRQITKHVAQILDSRMNTKYDENDKLIREVKVITLKSKLVSDFRKDFQFYKVREINNYHHAHDAYLNAVVGTALIKKYPKLESEFVYGDYKVYDVRKMIAKSEQEIGKATAKYFFYSNIMNFFKTEITLANGEIRKRPLIETNGETGEIVWDKGRDFATVRKVLSMPQVNIVKKTEVQTGGFSKESILPKRNSDKLIARKKDWDPKKYGGFDSPTVAYSVLVVAKVEKGKSKKLKSVKELLGITIMERSSFEKNPIDFLEAKGYKEVKKDLIIKLPKYSLFELENGRKRMLASAGELQKGNELALPSKYVNFLYLASHYEKLKGSPEDNEQKQLFVEQHKHYLDEIIEQISEFSKRVILADANLDKVLSAYNKHRDKPIREQAENIIHLFTLTNLGAPAAFKYFDTTIDRKRYTSTKEVLDATLIHQSITGLYETRIDLSQLGGDGGEAAAKPAPGGGGGVLNLEEEYRLHEKPVPSSIDPSWLQLFPTVWAERAGMGLANQVPPVVVELRSGASPVAVRQYPMSKEAREGIRPHIQRFLDLGVLVPCQSPWNTPLLPVKKPGTNDYRPVQDLREINKRVQDIHPTVPNPYNLLSSLPPSHTWYSVLDLKDAFFCLKLHPNSQPLFAFEWRDPEKGNTGQLTWTRLPQGFKNSPTLFNEALHRDLAPFRALNPQVVLLQYVDDLLVAAPTYRDCKEGTQKLLQELSKLGYRVSAKKAQLCQKEVTYLGYLLKEGKRWLTPARKATVMKIPPPTTPRQVREFLGTAGFCRLWIPGFASLAAPLYPLTKPSIPFIWTEEHQKAFDRIKEALLSAPALALPDLTKPFTLYVDERAGVARGVLTQTLGPWRRPVAYLSKKLDPVASGWPTCLKAVAAVALLLKDADKLTLGQNVTVIASHSLESIVRQPPDRWMTNARMTHYQSLLLNERVSFAPPAVLNPATLLPVESEATPVHRCSEILAEETGTRRDLKDQPLPGVPAWYTDGSSFIAEGKRRAGAAIVDGKRTVWASSLPEGTSAQKAELVALTQALRLAEGKDINIYTDSRYAFATAHIHGAIYKQRGWLTSAGKDIKNKEEILALLEAIHLPKRVAIIHCPGHQKGNDPVATGNRRADEAAKQAALSTRVLAETTKPAGKRTADGSEFEKRTADGSEFESPKKKAKVE

SEQ ID NO: 857 - protein, 2094 aa, synthetic construct
MPAAKRVKLDGGDKKYSIGLDIGTNSVGWAVITDEYKVPSKKFKVLGNTDRHSIKKNLIGALLFDSGETAEATRLKRTARRRYTRRKNRICYLQEIFSNEMAKVDDSFFHRLEESFLVEEDKKHERHPIFGNIVDEVAYHEKYPTIYHLRKKLVDSTDKADLRLIYLALAHMIKFRGHFLIEGDLNPDNSDVDKLFIQLVQTYNQLFEENPINASGVDAKAILSARLSKSRRLENLIAQLPGEKKNGLFGNLIALSLGLTPNFKSNFDLAEDAKLQLSKDTYDDDLDNLLAQIGDQYADLFLAAKNLSDAILLSDILRVNTEITKAPLSASMIKRYDEHHQDLTLLKALVRQQLPEKYKEIFFDQSKNGYAGYIDGGASQEEFYKFIKPILEKMDGTEELLVKLNREDLLRKQRTFDNGSIPHQIHLGELHAILRRQEDFYPFLKDNREKIEKILTFRIPYYVGPLARGNSRFAWMTRKSEETITPWNFEEVVDKGASAQSFIERMTNFDKNLPNEKVLPKHSLLYEYFTVYNELTKVKYVTEGMRKPAFLSGEQKKAIVDLLFKTNRKVTVKQLKEDYFKKIECFDSVEISGVEDRFNASLGTYHDLLKIIKDKDFLDNEENEDILEDIVLTLTLFEDREMIEERLKTYAHLFDDKVMKQLKRRRYTGWGRLSRKLINGIRDKQSGKTILDFLKSDGFANRNFMQLIHDDSLTFKEDIQKAQVSGQGDSLHEHIANLAGSPAIKKGILQTVKVVDELVKVMGRHKPENIVIEMARENQTTQKGQKNSRERMKRIEEGIKELGSQILKEHPVENTQLQNEKLYLYYLQNGRDMYVDQELDINRLSDYDVDHIVPQSFLKDDSIDNKVLTRSDKARGKSDNVPSEEVVKKMKNYWRQLLNAKLITQRKFDNLTKAERGGLSELDKAGFIKRQLVETRQITKHVAQILDSRMNTKYDENDKLIREVKVITLKSKLVSDFRKDFQFYKVREINNYHHAHDAYLNAVVGTALIKKYPKLESEFVYGDYKVYDVRKMIAKSEQEIGKATAKYFFYSNIMNFFKTEITLANGEIRKRPLIETNGETGEIVWDKGRDFATVRKVLSMPQVNIVKKTEVQTGGFSKESILPKRNSDKLIARKKDWDPKKYGGFDSPTVAYSVLVVAKVEKGKSKKLKSVKELLGITIMERSSFEKNPIDFLEAKGYKEVKKDLIIKLPKYSLFELENGRKRMLASAGELQKGNELALPSKYVNFLYLASHYEKLKGSPEDNEQKQLFVEQHKHYLDEIIEQISEFSKRVILADANLDKVLSAYNKHRDKPIREQAENIIHLFTLTNLGAPAAFKYFDTTIDRKRYTSTKEVLDATLIHQSITGLYETRIDLSQLGGDGGGSSEAAAKGGSGGVLNLEEEYRLHEKPVPSSIDPSWLQLFPTVWAERAGMGLANQVPPVVVELRSGASPVAVRQYPMSKEAREGIRPHIQRFLDLGVLVPCQSPWNTPLLPVKKPGTNDYRPVQDLREINKRVQDIHPTVPNPYNLLSSLPPSHTWYSVLDLKDAFFCLKLHPNSQPLFAFEWRDPEKGNTGQLTWTRLPQGFKNSPTLFNEALHRDLAPFRALNPQVVLLQYVDDLLVAAPTYRDCKEGTQKLLQELSKLGYRVSAKKAQLCQKEVTYLGYLLKEGKRWLTPARKATVMKIPPPTTPRQVREFLGTAGFCRLWIPGFASLAAPLYPLTKPSIPFIWTEEHQKAFDRIKEALLSAPALALPDLTKPFTLYVDERAGVARGVLTQTLGPWRRPVAYLSKKLDPVASGWPTCLKAVAAVALLLKDADKLTLGQNVTVIASHSLESIVRQPPDRWMTNARMTHYQSLLLNERVSFAPPAVLNPATLLPVESEATPVHRCSEILAEETGTRRDLKDQPLPGVPAWYTDGSSFIAEGKRRAGAAIVDGKRTVWASSLPEGTSAQKAELVALTQALRLAEGKDINIYTDSRYAFATAHIHGAIYKQRGWLTSAGKDIKNKEEILALLEAIHLPKRVAIIHCPGHQKGNDPVATGNRRADEAAKQAALSTRVLAETTKPAGKRTADGSEFEKRTADGSEFESPKKKAKVE

SEQ ID NO: 858 - protein, 2092 aa, synthetic construct
MPAAKRVKLDGGDKKYSIGLDIGTNSVGWAVITDEYKVPSKKFKVLGNTDRHSIKKNLIGALLFDSGETAEATRLKRTARRRYTRRKNRICYLQEIFSNEMAKVDDSFFHRLEESFLVEEDKKHERHPIFGNIVDEVAYHEKYPTIYHLRKKLVDSTDKADLRLIYLALAHMIKFRGHFLIEGDLNPDNSDVDKLFIQLVQTYNQLFEENPINASGVDAKAILSARLSKSRRLENLIAQLPGEKKNGLFGNLIALSLGLTPNFKSNFDLAEDAKLQLSKDTYDDDLDNLLAQIGDQYADLFLAAKNLSDAILLSDILRVNTEITKAPLSASMIKRYDEHHQDLTLLKALVRQQLPEKYKEIFFDQSKNGYAGYIDGGASQEEFYKFIKPILEKMDGTEELLVKLNREDLLRKQRTFDNGSIPHQIHLGELHAILRRQEDFYPFLKDNREKIEKILTFRIPYYVGPLARGNSRFAWMTRKSEETITPWNFEEVVDKGASAQSFIERMTNFDKNLPNEKVLPKHSLLYEYFTVYNELTKVKYVTEGMRKPAFLSGEQKKAIVDLLFKTNRKVTVKQLKEDYFKKIECFDSVEISGVEDRFNASLGTYHDLLKIIKDKDFLDNEENEDILEDIVLTLTLFEDREMIEERLKTYAHLFDDKVMKQLKRRRYTGWGRLSRKLINGIRDKQSGKTILDFLKSDGFANRNFMQLIHDDSLTFKEDIQKAQVSGQGDSLHEHIANLAGSPAIKKGILQTVKVVDELVKVMGRHKPENIVIEMARENQTTQKGQKNSRERMKRIEEGIKELGSQILKEHPVENTQLQNEKLYLYYLQNGRDMYVDQELDINRLSDYDVDHIVPQSFLKDDSIDNKVLTRSDKARGKSDNVPSEEVVKKMKNYWRQLLNAKLITQRKFDNLTKAERGGLSELDKAGFIKRQLVETRQITKHVAQILDSRMNTKYDENDKLIREVKVITLKSKLVSDFRKDFQFYKVREINNYHHAHDAYLNAVVGTALIKKYPKLESEFVYGDYKVYDVRKMIAKSEQEIGKATAKYFFYSNIMNFFKTEITLANGEIRKRPLIETNGETGEIVWDKGRDFATVRKVLSMPQVNIVKKTEVQTGGFSKESILPKRNSDKLIARKKDWDPKKYGGFDSPTVAYSVLVVAKVEKGKSKKLKSVKELLGITIMERSSFEKNPIDFLEAKGYKEVKKDLIIKLPKYSLFELENGRKRMLASAGELQKGNELALPSKYVNFLYLASHYEKLKGSPEDNEQKQLFVEQHKHYLDEIIEQISEFSKRVILADANLDKVLSAYNKHRDKPIREQAENIIHLFTLTNLGAPAAFKYFDTTIDRKRYTSTKEVLDATLIHQSITGLYETRIDLSQLGGDGGPAPGGSGGGGGVLNLEEEYRLHEKPVPSSIDPSWLQLFPTVWAERAGMGLANQVPPVVVELRSGASPVAVRQYPMSKEAREGIRPHIQRFLDLGVLVPCQSPWNTPLLPVKKPGTNDYRPVQDLREINKRVQDIHPTVPNPYNLLSSLPPSHTWYSVLDLKDAFFCLKLHPNSQPLFAFEWRDPEKGNTGQLTWTRLPQGFKNSPTLFNEALHRDLAPFRALNPQVVLLQYVDDLLVAAPTYRDCKEGTQKLLQELSKLGYRVSAKKAQLCQKEVTYLGYLLKEGKRWLTPARKATVMKIPPPTTPRQVREFLGTAGFCRLWIPGFASLAAPLYPLTKPSIPFIWTEEHQKAFDRIKEALLSAPALALPDLTKPFTLYVDERAGVARGVLTQTLGPWRRPVAYLSKKLDPVASGWPTCLKAVAAVALLLKDADKLTLGQNVTVIASHSLESIVRQPPDRWMTNARMTHYQSLLLNERVSFAPPAVLNPATLLPVESEATPVHRCSEILAEETGTRRDLKDQPLPGVPAWYTDGSSFIAEGKRRAGAAIVDGKRTVWASSLPEGTSAQKAELVALTQALRLAEGKDINIYTDSRYAFATAHIHGAIYKQRGWLTSAGKDIKNKEEILALLEAIHLPKRVAIIHCPGHQKGNDPVATGNRRADEAAKQAALSTRVLAETTKPAGKRTADGSEFEKRTADGSEFESPKKKAKVE

SEQ ID NO: 859 - protein, 2089 aa, synthetic construct
MPAAKRVKLDGGDKKYSIGLDIGTNSVGWAVITDEYKVPSKKFKVLGNTDRHSIKKNLIGALLFDSGETAEATRLKRTARRRYTRRKNRICYLQEIFSNEMAKVDDSFFHRLEESFLVEEDKKHERHPIFGNIVDEVAYHEKYPTIYHLRKKLVDSTDKADLRLIYLALAHMIKFRGHFLIEGDLNPDNSDVDKLFIQLVQTYNQLFEENPINASGVDAKAILSARLSKSRRLENLIAQLPGEKKNGLFGNLIALSLGLTPNFKSNFDLAEDAKLQLSKDTYDDDLDNLLAQIGDQYADLFLAAKNLSDAILLSDILRVNTEITKAPLSASMIKRYDEHHQDLTLLKALVRQQLPEKYKEIFFDQSKNGYAGYIDGGASQEEFYKFIKPILEKMDGTEELLVKLNREDLLRKQRTFDNGSIPHQIHLGELHAILRRQEDFYPFLKDNREKIEKILTFRIPYYVGPLARGNSRFAWMTRKSEETITPWNFEEVVDKGASAQSFIERMTNFDKNLPNEKVLPKHSLLYEYFTVYNELTKVKYVTEGMRKPAFLSGEQKKAIVDLLFKTNRKVTVKQLKEDYFKKIECFDSVEISGVEDRFNASLGTYHDLLKIIKDKDFLDNEENEDILEDIVLTLTLFEDREMIEERLKTYAHLFDDKVMKQLKRRRYTGWGRLSRKLINGIRDKQSGKTILDFLKSDGFANRNFMQLIHDDSLTFKEDIQKAQVSGQGDSLHEHIANLAGSPAIKKGILQTVKVVDELVKVMGRHKPENIVIEMARENQTTQKGQKNSRERMKRIEEGIKELGSQILKEHPVENTQLQNEKLYLYYLQNGRDMYVDQELDINRLSDYDVDHIVPQSFLKDDSIDNKVLTRSDKARGKSDNVPSEEVVKKMKNYWRQLLNAKLITQRKFDNLTKAERGGLSELDKAGFIKRQLVETRQITKHVAQILDSRMNTKYDENDKLIREVKVITLKSKLVSDFRKDFQFYKVREINNYHHAHDAYLNAVVGTALIKKYPKLESEFVYGDYKVYDVRKMIAKSEQEIGKATAKYFFYSNIMNFFKTEITLANGEIRKRPLIETNGETGEIVWDKGRDFATVRKVLSMPQVNIVKKTEVQTGGFSKESILPKRNSDKLIARKKDWDPKKYGGFDSPTVAYSVLVVAKVEKGKSKKLKSVKELLGITIMERSSFEKNPIDFLEAKGYKEVKKDLIIKLPKYSLFELENGRKRMLASAGELQKGNELALPSKYVNFLYLASHYEKLKGSPEDNEQKQLFVEQHKHYLDEIIEQISEFSKRVILADANLDKVLSAYNKHRDKPIREQAENIIHLFTLTNLGAPAAFKYFDTTIDRKRYTSTKEVLDATLIHQSITGLYETRIDLSQLGGDGGPAPGSSGGVLNLEEEYRLHEKPVPSSIDPSWLQLFPTVWAERAGMGLANQVPPVVVELRSGASPVAVRQYPMSKEAREGIRPHIQRFLDLGVLVPCQSPWNTPLLPVKKPGTNDYRPVQDLREINKRVQDIHPTVPNPYNLLSSLPPSHTWYSVLDLKDAFFCLKLHPNSQPLFAFEWRDPEKGNTGQLTWTRLPQGFKNSPTLFNEALHRDLAPFRALNPQVVLLQYVDDLLVAAPTYRDCKEGTQKLLQELSKLGYRVSAKKAQLCQKEVTYLGYLLKEGKRWLTPARKATVMKIPPPTTPRQVREFLGTAGFCRLWIPGFASLAAPLYPLTKPSIPFIWTEEHQKAFDRIKEALLSAPALALPDLTKPFTLYVDERAGVARGVLTQTLGPWRRPVAYLSKKLDPVASGWPTCLKAVAAVALLLKDADKLTLGQNVTVIASHSLESIVRQPPDRWMTNARMTHYQSLLLNERVSFAPPAVLNPATLLPVESEATPVHRCSEILAEETGTRRDLKDQPLPGVPAWYTDGSSFIAEGKRRAGAAIVDGKRTVWASSLPEGTSAQKAELVALTQALRLAEGKDINIYTDSRYAFATAHIHGAIYKQRGWLTSAGKDIKNKEEILALLEAIHLPKRVAIIHCPGHQKGNDPVATGNRRADEAAKQAALSTRVLAETTKPAGKRTADGSEFEKRTADGSEFESPKKKAKVE

SEQ ID NO: 860 - protein, 2090 aa, synthetic construct
MPAAKRVKLDGGDKKYSIGLDIGTNSVGWAVITDEYKVPSKKFKVLGNTDRHSIKKNLIGALLFDSGETAEATRLKRTARRRYTRRKNRICYLQEIFSNEMAKVDDSFFHRLEESFLVEEDKKHERHPIFGNIVDEVAYHEKYPTIYHLRKKLVDSTDKADLRLIYLALAHMIKFRGHFLIEGDLNPDNSDVDKLFIQLVQTYNQLFEENPINASGVDAKAILSARLSKSRRLENLIAQLPGEKKNGLFGNLIALSLGLTPNFKSNFDLAEDAKLQLSKDTYDDDLDNLLAQIGDQYADLFLAAKNLSDAILLSDILRVNTEITKAPLSASMIKRYDEHHQDLTLLKALVRQQLPEKYKEIFFDQSKNGYAGYIDGGASQEEFYKFIKPILEKMDGTEELLVKLNREDLLRKQRTFDNGSIPHQIHLGELHAILRRQEDFYPFLKDNREKIEKILTFRIPYYVGPLARGNSRFAWMTRKSEETITPWNFEEVVDKGASAQSFIERMTNFDKNLPNEKVLPKHSLLYEYFTVYNELTKVKYVTEGMRKPAFLSGEQKKAIVDLLFKTNRKVTVKQLKEDYFKKIECFDSVEISGVEDRFNASLGTYHDLLKIIKDKDFLDNEENEDILEDIVLTLTLFEDREMIEERLKTYAHLFDDKVMKQLKRRRYTGWGRLSRKLINGIRDKQSGKTILDFLKSDGFANRNFMQLIHDDSLTFKEDIQKAQVSGQGDSLHEHIANLAGSPAIKKGILQTVKVVDELVKVMGRHKPENIVIEMARENQTTQKGQKNSRERMKRIEEGIKELGSQILKEHPVENTQLQNEKLYLYYLQNGRDMYVDQELDINRLSDYDVDHIVPQSFLKDDSIDNKVLTRSDKARGKSDNVPSEEVVKKMKNYWRQLLNAKLITQRKFDNLTKAERGGLSELDKAGFIKRQLVETRQITKHVAQILDSRMNTKYDENDKLIREVKVITLKSKLVSDFRKDFQFYKVREINNYHHAHDAYLNAVVGTALIKKYPKLESEFVYGDYKVYDVRKMIAKSEQEIGKATAKYFFYSNIMNFFKTEITLANGEIRKRPLIETNGETGEIVWDKGRDFATVRKVLSMPQVNIVKKTEVQTGGFSKESILPKRNSDKLIARKKDWDPKKYGGFDSPTVAYSVLVVAKVEKGKSKKLKSVKELLGITIMERSSFEKNPIDFLEAKGYKEVKKDLIIKLPKYSLFELENGRKRMLASAGELQKGNELALPSKYVNFLYLASHYEKLKGSPEDNEQKQLFVEQHKHYLDEIIEQISEFSKRVILADANLDKVLSAYNKHRDKPIREQAENIIHLFTLTNLGAPAAFKYFDTTIDRKRYTSTKEVLDATLIHQSITGLYETRIDLSQLGGDGGPAPAPAPGGVLNLEEEYRLHEKPVPSSIDPSWLQLFPTVWAERAGMGLANQVPPVVVELRSGASPVAVRQYPMSKEAREGIRPHIQRFLDLGVLVPCQSPWNTPLLPVKKPGTNDYRPVQDLREINKRVQDIHPTVPNPYNLLSSLPPSHTWYSVLDLKDAFFCLKLHPNSQPLFAFEWRDPEKGNTGQLTWTRLPQGFKNSPTLFNEALHRDLAPFRALNPQVVLLQYVDDLLVAAPTYRDCKEGTQKLLQELSKLGYRVSAKKAQLCQKEVTYLGYLLKEGKRWLTPARKATVMKIPPPTTPRQVREFLGTAGFCRLWIPGFASLAAPLYPLTKPSIPFIWTEEHQKAFDRIKEALLSAPALALPDLTKPFTLYVDERAGVARGVLTQTLGPWRRPVAYLSKKLDPVASGWPTCLKAVAAVALLLKDADKLTLGQNVTVIASHSLESIVRQPPDRWMTNARMTHYQSLLLNERVSFAPPAVLNPATLLPVESEATPVHRCSEILAEETGTRRDLKDQPLPGVPAWYTDGSSFIAEGKRRAGAAIVDGKRTVWASSLPEGTSAQKAELVALTQALRLAEGKDINIYTDSRYAFATAHIHGAIYKQRGWLTSAGKDIKNKEEILALLEAIHLPKRVAIIHCPGHQKGNDPVATGNRRADEAAKQAALSTRVLAETTKPAGKRTADGSEFEKRTADGSEFESPKKKAKVE

SEQ ID NO: 861 - protein, 2094 aa, synthetic construct
MPAAKRVKLDGGDKKYSIGLDIGTNSVGWAVITDEYKVPSKKFKVLGNTDRHSIKKNLIGALLFDSGETAEATRLKRTARRRYTRRKNRICYLQEIFSNEMAKVDDSFFHRLEESFLVEEDKKHERHPIFGNIVDEVAYHEKYPTIYHLRKKLVDSTDKADLRLIYLALAHMIKFRGHFLIEGDLNPDNSDVDKLFIQLVQTYNQLFEENPINASGVDAKAILSARLSKSRRLENLIAQLPGEKKNGLFGNLIALSLGLTPNFKSNFDLAEDAKLQLSKDTYDDDLDNLLAQIGDQYADLFLAAKNLSDAILLSDILRVNTEITKAPLSASMIKRYDEHHQDLTLLKALVRQQLPEKYKEIFFDQSKNGYAGYIDGGASQEEFYKFIKPILEKMDGTEELLVKLNREDLLRKQRTFDNGSIPHQIHLGELHAILRRQEDFYPFLKDNREKIEKILTFRIPYYVGPLARGNSRFAWMTRKSEETITPWNFEEVVDKGASAQSFIERMTNFDKNLPNEKVLPKHSLLYEYFTVYNELTKVKYVTEGMRKPAFLSGEQKKAIVDLLFKTNRKVTVKQLKEDYFKKIECFDSVEISGVEDRFNASLGTYHDLLKIIKDKDFLDNEENEDILEDIVLTLTLFEDREMIEERLKTYAHLFDDKVMKQLKRRRYTGWGRLSRKLINGIRDKQSGKTILDFLKSDGFANRNFMQLIHDDSLTFKEDIQKAQVSGQGDSLHEHIANLAGSPAIKKGILQTVKVVDELVKVMGRHKPENIVIEMARENQTTQKGQKNSRERMKRIEEGIKELGSQILKEHPVENTQLQNEKLYLYYLQNGRDMYVDQELDINRLSDYDVDHIVPQSFLKDDSIDNKVLTRSDKARGKSDNVPSEEVVKKMKNYWRQLLNAKLITQRKFDNLTKAERGGLSELDKAGFIKRQLVETRQITKHVAQILDSRMNTKYDENDKLIREVKVITLKSKLVSDFRKDFQFYKVREINNYHHAHDAYLNAVVGTALIKKYPKLESEFVYGDYKVYDVRKMIAKSEQEIGKATAKYFFYSNIMNFFKTEITLANGEIRKRPLIETNGETGEIVWDKGRDFATVRKVLSMPQVNIVKKTEVQTGGFSKESILPKRNSDKLIARKKDWDPKKYGGFDSPTVAYSVLVVAKVEKGKSKKLKSVKELLGITIMERSSFEKNPIDFLEAKGYKEVKKDLIIKLPKYSLFELENGRKRMLASAGELQKGNELALPSKYVNFLYLASHYEKLKGSPEDNEQKQLFVEQHKHYLDEIIEQISEFSKRVILADANLDKVLSAYNKHRDKPIREQAENIIHLFTLTNLGAPAAFKYFDTTIDRKRYTSTKEVLDATLIHQSITGLYETRIDLSQLGGDGGGGSGGGEAAAKGGVLNLEEEYRLHEKPVPSSIDPSWLQLFPTVWAERAGMGLANQVPPVVVELRSGASPVAVRQYPMSKEAREGIRPHIQRFLDLGVLVPCQSPWNTPLLPVKKPGTNDYRPVQDLREINKRVQDIHPTVPNPYNLLSSLPPSHTWYSVLDLKDAFFCLKLHPNSQPLFAFEWRDPEKGNTGQLTWTRLPQGFKNSPTLFNEALHRDLAPFRALNPQVVLLQYVDDLLVAAPTYRDCKEGTQKLLQELSKLGYRVSAKKAQLCQKEVTYLGYLLKEGKRWLTPARKATVMKIPPPTTPRQVREFLGTAGFCRLWIPGFASLAAPLYPLTKPSIPFIWTEEHQKAFDRIKEALLSAPALALPDLTKPFTLYVDERAGVARGVLTQTLGPWRRPVAYLSKKLDPVASGWPTCLKAVAAVALLLKDADKLTLGQNVTVIASHSLESIVRQPPDRWMTNARMTHYQSLLLNERVSFAPPAVLNPATLLPVESEATPVHRCSEILAEETGTRRDLKDQPLPGVPAWYTDGSSFIAEGKRRAGAAIVDGKRTVWASSLPEGTSAQKAELVALTQALRLAEGKDINIYTDSRYAFATAHIHGAIYKQRGWLTSAGKDIKNKEEILALLEAIHLPKRVAIIHCPGHQKGNDPVATGNRRADEAAKQAALSTRVLAETTKPAGKRTADGSEFEKRTADGSEFESPKKKAKVE

SEQ ID NO: 862 - protein, 2095 aa, synthetic construct
MPAAKRVKLDGGDKKYSIGLDIGTNSVGWAVITDEYKVPSKKFKVLGNTDRHSIKKNLIGALLFDSGETAEATRLKRTARRRYTRRKNRICYLQEIFSNEMAKVDDSFFHRLEESFLVEEDKKHERHPIFGNIVDEVAYHEKYPTIYHLRKKLVDSTDKADLRLIYLALAHMIKFRGHFLIEGDLNPDNSDVDKLFIQLVQTYNQLFEENPINASGVDAKAILSARLSKSRRLENLIAQLPGEKKNGLFGNLIALSLGLTPNFKSNFDLAEDAKLQLSKDTYDDDLDNLLAQIGDQYADLFLAAKNLSDAILLSDILRVNTEITKAPLSASMIKRYDEHHQDLTLLKALVRQQLPEKYKEIFFDQSKNGYAGYIDGGASQEEFYKFIKPILEKMDGTEELLVKLNREDLLRKQRTFDNGSIPHQIHLGELHAILRRQEDFYPFLKDNREKIEKILTFRIPYYVGPLARGNSRFAWMTRKSEETITPWNFEEVVDKGASAQSFIERMTNFDKNLPNEKVLPKHSLLYEYFTVYNELTKVKYVTEGMRKPAFLSGEQKKAIVDLLFKTNRKVTVKQLKEDYFKKIECFDSVEISGVEDRFNASLGTYHDLLKIIKDKDFLDNEENEDILEDIVLTLTLFEDREMIEERLKTYAHLFDDKVMKQLKRRRYTGWGRLSRKLINGIRDKQSGKTILDFLKSDGFANRNFMQLIHDDSLTFKEDIQKAQVSGQGDSLHEHIANLAGSPAIKKGILQTVKVVDELVKVMGRHKPENIVIEMARENQTTQKGQKNSRERMKRIEEGIKELGSQILKEHPVENTQLQNEKLYLYYLQNGRDMYVDQELDINRLSDYDVDHIVPQSFLKDDSIDNKVLTRSDKARGKSDNVPSEEVVKKMKNYWRQLLNAKLITQRKFDNLTKAERGGLSELDKAGFIKRQLVETRQITKHVAQILDSRMNTKYDENDKLIREVKVITLKSKLVSDFRKDFQFYKVREINNYHHAHDAYLNAVVGTALIKKYPKLESEFVYGDYKVYDVRKMIAKSEQEIGKATAKYFFYSNIMNFFKTEITLANGEIRKRPLIETNGETGEIVWDKGRDFATVRKVLSMPQVNIVKKTEVQTGGFSKESILPKRNSDKLIARKKDWDPKKYGGFDSPTVAYSVLVVAKVEKGKSKKLKSVKELLGITIMERSSFEKNPIDFLEAKGYKEVKKDLIIKLPKYSLFELENGRKRMLASAGELQKGNELALPSKYVNFLYLASHYEKLKGSPEDNEQKQLFVEQHKHYLDEIIEQISEFSKRVILADANLDKVLSAYNKHRDKPIREQAENIIHLFTLTNLGAPAAFKYFDTTIDRKRYTSTKEVLDATLIHQSITGLYETRIDLSQLGGDGGGSAGSAAGSGEFGGVLNLEEEYRLHEKPVPSSIDPSWLQLFPTVWAERAGMGLANQVPPVVVELRSGASPVAVRQYPMSKEAREGIRPHIQRFLDLGVLVPCQSPWNTPLLPVKKPGTNDYRPVQDLREINKRVQDIHPTVPNPYNLLSSLPPSHTWYSVLDLKDAFFCLKLHPNSQPLFAFEWRDPEKGNTGQLTWTRLPQGFKNSPTLFNEALHRDLAPFRALNPQVVLLQYVDDLLVAAPTYRDCKEGTQKLLQELSKLGYRVSAKKAQLCQKEVTYLGYLLKEGKRWLTPARKATVMKIPPPTTPRQVREFLGTAGFCRLWIPGFASLAAPLYPLTKPSIPFIWTEEHQKAFDRIKEALLSAPALALPDLTKPFTLYVDERAGVARGVLTQTLGPWRRPVAYLSKKLDPVASGWPTCLKAVAAVALLLKDADKLTLGQNVTVIASHSLESIVRQPPDRWMTNARMTHYQSLLLNERVSFAPPAVLNPATLLPVESEATPVHRCSEILAEETGTRRDLKDQPLPGVPAWYTDGSSFIAEGKRRAGAAIVDGKRTVWASSLPEGTSAQKAELVALTQALRLAEGKDINIYTDSRYAFATAHIHGAIYKQRGWLTSAGKDIKNKEEILALLEAIHLPKRVAIIHCPGHQKGNDPVATGNRRADEAAKQAALSTRVLAETTKPAGKRTADGSEFEKRTADGSEFESPKKKAKVE

SEQ ID NO: 863 - protein, 2094 aa, synthetic construct
MPAAKRVKLDGGDKKYSIGLDIGTNSVGWAVITDEYKVPSKKFKVLGNTDRHSIKKNLIGALLFDSGETAEATRLKRTARRRYTRRKNRICYLQEIFSNEMAKVDDSFFHRLEESFLVEEDKKHERHPIFGNIVDEVAYHEKYPTIYHLRKKLVDSTDKADLRLIYLALAHMIKFRGHFLIEGDLNPDNSDVDKLFIQLVQTYNQLFEENPINASGVDAKAILSARLSKSRRLENLIAQLPGEKKNGLFGNLIALSLGLTPNFKSNFDLAEDAKLQLSKDTYDDDLDNLLAQIGDQYADLFLAAKNLSDAILLSDILRVNTEITKAPLSASMIKRYDEHHQDLTLLKALVRQQLPEKYKEIFFDQSKNGYAGYIDGGASQEEFYKFIKPILEKMDGTEELLVKLNREDLLRKQRTFDNGSIPHQIHLGELHAILRRQEDFYPFLKDNREKIEKILTFRIPYYVGPLARGNSRFAWMTRKSEETITPWNFEEVVDKGASAQSFIERMTNFDKNLPNEKVLPKHSLLYEYFTVYNELTKVKYVTEGMRKPAFLSGEQKKAIVDLLFKTNRKVTVKQLKEDYFKKIECFDSVEISGVEDRFNASLGTYHDLLKIIKDKDFLDNEENEDILEDIVLTLTLFEDREMIEERLKTYAHLFDDKVMKQLKRRRYTGWGRLSRKLINGIRDKQSGKTILDFLKSDGFANRNFMQLIHDDSLTFKEDIQKAQVSGQGDSLHEHIANLAGSPAIKKGILQTVKVVDELVKVMGRHKPENIVIEMARENQTTQKGQKNSRERMKRIEEGIKELGSQILKEHPVENTQLQNEKLYLYYLQNGRDMYVDQELDINRLSDYDVDHIVPQSFLKDDSIDNKVLTRSDKARGKSDNVPSEEVVKKMKNYWRQLLNAKLITQRKFDNLTKAERGGLSELDKAGFIKRQLVETRQITKHVAQILDSRMNTKYDENDKLIREVKVITLKSKLVSDFRKDFQFYKVREINNYHHAHDAYLNAVVGTALIKKYPKLESEFVYGDYKVYDVRKMIAKSEQEIGKATAKYFFYSNIMNFFKTEITLANGEIRKRPLIETNGETGEIVWDKGRDFATVRKVLSMPQVNIVKKTEVQTGGFSKESILPKRNSDKLIARKKDWDPKKYGGFDSPTVAYSVLVVAKVEKGKSKKLKSVKELLGITIMERSSFEKNPIDFLEAKGYKEVKKDLIIKLPKYSLFELENGRKRMLASAGELQKGNELALPSKYVNFLYLASHYEKLKGSPEDNEQKQLFVEQHKHYLDEIIEQISEFSKRVILADANLDKVLSAYNKHRDKPIREQAENIIHLFTLTNLGAPAAFKYFDTTIDRKRYTSTKEVLDATLIHQSITGLYETRIDLSQLGGDGGPAPEAAAKGGSGGVLNLEEEYRLHEKPVPSSIDPSWLQLFPTVWAERAGMGLANQVPPVVVELRSGASPVAVRQYPMSKEAREGIRPHIQRFLDLGVLVPCQSPWNTPLLPVKKPGTNDYRPVQDLREINKRVQDIHPTVPNPYNLLSSLPPSHTWYSVLDLKDAFFCLKLHPNSQPLFAFEWRDPEKGNTGQLTWTRLPQGFKNSPTLFNEALHRDLAPFRALNPQVVLLQYVDDLLVAAPTYRDCKEGTQKLLQELSKLGYRVSAKKAQLCQKEVTYLGYLLKEGKRWLTPARKATVMKIPPPTTPRQVREFLGTAGFCRLWIPGFASLAAPLYPLTKPSIPFIWTEEHQKAFDRIKEALLSAPALALPDLTKPFTLYVDERAGVARGVLTQTLGPWRRPVAYLSKKLDPVASGWPTCLKAVAAVALLLKDADKLTLGQNVTVIASHSLESIVRQPPDRWMTNARMTHYQSLLLNERVSFAPPAVLNPATLLPVESEATPVHRCSEILAEETGTRRDLKDQPLPGVPAWYTDGSSFIAEGKRRAGAAIVDGKRTVWASSLPEGTSAQKAELVALTQALRLAEGKDINIYTDSRYAFATAHIHGAIYKQRGWLTSAGKDIKNKEEILALLEAIHLPKRVAIIHCPGHQKGNDPVATGNRRADEAAKQAALSTRVLAETTKPAGKRTADGSEFEKRTADGSEFESPKKKAKVE

SEQ ID NO: 864 - protein, 2092 aa, synthetic construct
MPAAKRVKLDGGDKKYSIGLDIGTNSVGWAVITDEYKVPSKKFKVLGNTDRHSIKKNLIGALLFDSGETAEATRLKRTARRRYTRRKNRICYLQEIFSNEMAKVDDSFFHRLEESFLVEEDKKHERHPIFGNIVDEVAYHEKYPTIYHLRKKLVDSTDKADLRLIYLALAHMIKFRGHFLIEGDLNPDNSDVDKLFIQLVQTYNQLFEENPINASGVDAKAILSARLSKSRRLENLIAQLPGEKKNGLFGNLIALSLGLTPNFKSNFDLAEDAKLQLSKDTYDDDLDNLLAQIGDQYADLFLAAKNLSDAILLSDILRVNTEITKAPLSASMIKRYDEHHQDLTLLKALVRQQLPEKYKEIFFDQSKNGYAGYIDGGASQEEFYKFIKPILEKMDGTEELLVKLNREDLLRKQRTFDNGSIPHQIHLGELHAILRRQEDFYPFLKDNREKIEKILTFRIPYYVGPLARGNSRFAWMTRKSEETITPWNFEEVVDKGASAQSFIERMTNFDKNLPNEKVLPKHSLLYEYFTVYNELTKVKYVTEGMRKPAFLSGEQKKAIVDLLFKTNRKVTVKQLKEDYFKKIECFDSVEISGVEDRFNASLGTYHDLLKIIKDKDFLDNEENEDILEDIVLTLTLFEDREMIEERLKTYAHLFDDKVMKQLKRRRYTGWGRLSRKLINGIRDKQSGKTILDFLKSDGFANRNFMQLIHDDSLTFKEDIQKAQVSGQGDSLHEHIANLAGSPAIKKGILQTVKVVDELVKVMGRHKPENIVIEMARENQTTQKGQKNSRERMKRIEEGIKELGSQILKEHPVENTQLQNEKLYLYYLQNGRDMYVDQELDINRLSDYDVDHIVPQSFLKDDSIDNKVLTRSDKARGKSDNVPSEEVVKKMKNYWRQLLNAKLITQRKFDNLTKAERGGLSELDKAGFIKRQLVETRQITKHVAQILDSRMNTKYDENDKLIREVKVITLKSKLVSDFRKDFQFYKVREINNYHHAHDAYLNAVVGTALIKKYPKLESEFVYGDYKVYDVRKMIAKSEQEIGKATAKYFFYSNIMNFFKTEITLANGEIRKRPLIETNGETGEIVWDKGRDFATVRKVLSMPQVNIVKKTEVQTGGFSKESILPKRNSDKLIARKKDWDPKKYGGFDSPTVAYSVLVVAKVEKGKSKKLKSVKELLGITIMERSSFEKNPIDFLEAKGYKEVKKDLIIKLPKYSLFELENGRKRMLASAGELQKGNELALPSKYVNFLYLASHYEKLKGSPEDNEQKQLFVEQHKHYLDEIIEQISEFSKRVILADANLDKVLSAYNKHRDKPIREQAENIIHLFTLTNLGAPAAFKYFDTTIDRKRYTSTKEVLDATLIHQSITGLYETRIDLSQLGGDGGPAPGSSGGGGGVLNLEEEYRLHEKPVPSSIDPSWLQLFPTVWAERAGMGLANQVPPVVVELRSGASPVAVRQYPMSKEAREGIRPHIQRFLDLGVLVPCQSPWNTPLLPVKKPGTNDYRPVQDLREINKRVQDIHPTVPNPYNLLSSLPPSHTWYSVLDLKDAFFCLKLHPNSQPLFAFEWRDPEKGNTGQLTWTRLPQGFKNSPTLFNEALHRDLAPFRALNPQVVLLQYVDDLLVAAPTYRDCKEGTQKLLQELSKLGYRVSAKKAQLCQKEVTYLGYLLKEGKRWLTPARKATVMKIPPPTTPRQVREFLGTAGFCRLWIPGFASLAAPLYPLTKPSIPFIWTEEHQKAFDRIKEALLSAPALALPDLTKPFTLYVDERAGVARGVLTQTLGPWRRPVAYLSKKLDPVASGWPTCLKAVAAVALLLKDADKLTLGQNVTVIASHSLESIVRQPPDRWMTNARMTHYQSLLLNERVSFAPPAVLNPATLLPVESEATPVHRCSEILAEETGTRRDLKDQPLPGVPAWYTDGSSFIAEGKRRAGAAIVDGKRTVWASSLPEGTSAQKAELVALTQALRLAEGKDINIYTDSRYAFATAHIHGAIYKQRGWLTSAGKDIKNKEEILALLEAIHLPKRVAIIHCPGHQKGNDPVATGNRRADEAAKQAALSTRVLAETTKPAGKRTADGSEFEKRTADGSEFESPKKKAKVE

SEQ ID NO: 865 - protein, 2092 aa, synthetic construct
MPAAKRVKLDGGDKKYSIGLDIGTNSVGWAVITDEYKVPSKKFKVLGNTDRHSIKKNLIGALLFDSGETAEATRLKRTARRRYTRRKNRICYLQEIFSNEMAKVDDSFFHRLEESFLVEEDKKHERHPIFGNIVDEVAYHEKYPTIYHLRKKLVDSTDKADLRLIYLALAHMIKFRGHFLIEGDLNPDNSDVDKLFIQLVQTYNQLFEENPINASGVDAKAILSARLSKSRRLENLIAQLPGEKKNGLFGNLIALSLGLTPNFKSNFDLAEDAKLQLSKDTYDDDLDNLLAQIGDQYADLFLAAKNLSDAILLSDILRVNTEITKAPLSASMIKRYDEHHQDLTLLKALVRQQLPEKYKEIFFDQSKNGYAGYIDGGASQEEFYKFIKPILEKMDGTEELLVKLNREDLLRKQRTFDNGSIPHQIHLGELHAILRRQEDFYPFLKDNREKIEKILTFRIPYYVGPLARGNSRFAWMTRKSEETITPWNFEEVVDKGASAQSFIERMTNFDKNLPNEKVLPKHSLLYEYFTVYNELTKVKYVTEGMRKPAFLSGEQKKAIVDLLFKTNRKVTVKQLKEDYFKKIECFDSVEISGVEDRFNASLGTYHDLLKIIKDKDFLDNEENEDILEDIVLTLTLFEDREMIEERLKTYAHLFDDKVMKQLKRRRYTGWGRLSRKLINGIRDKQSGKTILDFLKSDGFANRNFMQLIHDDSLTFKEDIQKAQVSGQGDSLHEHIANLAGSPAIKKGILQTVKVVDELVKVMGRHKPENIVIEMARENQTTQKGQKNSRERMKRIEEGIKELGSQILKEHPVENTQLQNEKLYLYYLQNGRDMYVDQELDINRLSDYDVDHIVPQSFLKDDSIDNKVLTRSDKARGKSDNVPSEEVVKKMKNYWRQLLNAKLITQRKFDNLTKAERGGLSELDKAGFIKRQLVETRQITKHVAQILDSRMNTKYDENDKLIREVKVITLKSKLVSDFRKDFQFYKVREINNYHHAHDAYLNAVVGTALIKKYPKLESEFVYGDYKVYDVRKMIAKSEQEIGKATAKYFFYSNIMNFFKTEITLANGEIRKRPLIETNGETGEIVWDKGRDFATVRKVLSMPQVNIVKKTEVQTGGFSKESILPKRNSDKLIARKKDWDPKKYGGFDSPTVAYSVLVVAKVEKGKSKKLKSVKELLGITIMERSSFEKNPIDFLEAKGYKEVKKDLIIKLPKYSLFELENGRKRMLASAGELQKGNELALPSKYVNFLYLASHYEKLKGSPEDNEQKQLFVEQHKHYLDEIIEQISEFSKRVILADANLDKVLSAYNKHRDKPIREQAENIIHLFTLTNLGAPAAFKYFDTTIDRKRYTSTKEVLDATLIHQSITGLYETRIDLSQLGGDGGGGSGSSGGGGGVLNLEEEYRLHEKPVPSSIDPSWLQLFPTVWAERAGMGLANQVPPVVVELRSGASPVAVRQYPMSKEAREGIRPHIQRFLDLGVLVPCQSPWNTPLLPVKKPGTNDYRPVQDLREINKRVQDIHPTVPNPYNLLSSLPPSHTWYSVLDLKDAFFCLKLHPNSQPLFAFEWRDPEKGNTGQLTWTRLPQGFKNSPTLFNEALHRDLAPFRALNPQVVLLQYVDDLLVAAPTYRDCKEGTQKLLQELSKLGYRVSAKKAQLCQKEVTYLGYLLKEGKRWLTPARKATVMKIPPPTTPRQVREFLGTAGFCRLWIPGFASLAAPLYPLTKPSIPFIWTEEHQKAFDRIKEALLSAPALALPDLTKPFTLYVDERAGVARGVLTQTLGPWRRPVAYLSKKLDPVASGWPTCLKAVAAVALLLKDADKLTLGQNVTVIASHSLESIVRQPPDRWMTNARMTHYQSLLLNERVSFAPPAVLNPATLLPVESEATPVHRCSEILAEETGTRRDLKDQPLPGVPAWYTDGSSFIAEGKRRAGAAIVDGKRTVWASSLPEGTSAQKAELVALTQALRLAEGKDINIYTDSRYAFATAHIHGAIYKQRGWLTSAGKDIKNKEEILALLEAIHLPKRVAIIHCPGHQKGNDPVATGNRRADEAAKQAALSTRVLAETTKPAGKRTADGSEFEKRTADGSEFESPKKKAKVE

SEQ ID NO: 866 - protein, 2094 aa, synthetic construct
MPAAKRVKLDGGDKKYSIGLDIGTNSVGWAVITDEYKVPSKKFKVLGNTDRHSIKKNLIGALLFDSGETAEATRLKRTARRRYTRRKNRICYLQEIFSNEMAKVDDSFFHRLEESFLVEEDKKHERHPIFGNIVDEVAYHEKYPTIYHLRKKLVDSTDKADLRLIYLALAHMIKFRGHFLIEGDLNPDNSDVDKLFIQLVQTYNQLFEENPINASGVDAKAILSARLSKSRRLENLIAQLPGEKKNGLFGNLIALSLGLTPNFKSNFDLAEDAKLQLSKDTYDDDLDNLLAQIGDQYADLFLAAKNLSDAILLSDILRVNTEITKAPLSASMIKRYDEHHQDLTLLKALVRQQLPEKYKEIFFDQSKNGYAGYIDGGASQEEFYKFIKPILEKMDGTEELLVKLNREDLLRKQRTFDNGSIPHQIHLGELHAILRRQEDFYPFLKDNREKIEKILTFRIPYYVGPLARGNSRFAWMTRKSEETITPWNFEEVVDKGASAQSFIERMTNFDKNLPNEKVLPKHSLLYEYFTVYNELTKVKYVTEGMRKPAFLSGEQKKAIVDLLFKTNRKVTVKQLKEDYFKKIECFDSVEISGVEDRFNASLGTYHDLLKIIKDKDFLDNEENEDILEDIVLTLTLFEDREMIEERLKTYAHLFDDKVMKQLKRRRYTGWGRLSRKLINGIRDKQSGKTILDFLKSDGFANRNFMQLIHDDSLTFKEDIQKAQVSGQGDSLHEHIANLAGSPAIKKGILQTVKVVDELVKVMGRHKPENIVIEMARENQTTQKGQKNSRERMKRIEEGIKELGSQILKEHPVENTQLQNEKLYLYYLQNGRDMYVDQELDINRLSDYDVDHIVPQSFLKDDSIDNKVLTRSDKARGKSDNVPSEEVVKKMKNYWRQLLNAKLITQRKFDNLTKAERGGLSELDKAGFIKRQLVETRQITKHVAQILDSRMNTKYDENDKLIREVKVITLKSKLVSDFRKDFQFYKVREINNYHHAHDAYLNAVVGTALIKKYPKLESEFVYGDYKVYDVRKMIAKSEQEIGKATAKYFFYSNIMNFFKTEITLANGEIRKRPLIETNGETGEIVWDKGRDFATVRKVLSMPQVNIVKKTEVQTGGFSKESILPKRNSDKLIARKKDWDPKKYGGFDSPTVAYSVLVVAKVEKGKSKKLKSVKELLGITIMERSSFEKNPIDFLEAKGYKEVKKDLIIKLPKYSLFELENGRKRMLASAGELQKGNELALPSKYVNFLYLASHYEKLKGSPEDNEQKQLFVEQHKHYLDEIIEQISEFSKRVILADANLDKVLSAYNKHRDKPIREQAENIIHLFTLTNLGAPAAFKYFDTTIDRKRYTSTKEVLDATLIHQSITGLYETRIDLSQLGGDGGPAPEAAAKGGGGGVLNLEEEYRLHEKPVPSSIDPSWLQLFPTVWAERAGMGLANQVPPVVVELRSGASPVAVRQYPMSKEAREGIRPHIQRFLDLGVLVPCQSPWNTPLLPVKKPGTNDYRPVQDLREINKRVQDIHPTVPNPYNLLSSLPPSHTWYSVLDLKDAFFCLKLHPNSQPLFAFEWRDPEKGNTGQLTWTRLPQGFKNSPTLFNEALHRDLAPFRALNPQVVLLQYVDDLLVAAPTYRDCKEGTQKLLQELSKLGYRVSAKKAQLCQKEVTYLGYLLKEGKRWLTPARKATVMKIPPPTTPRQVREFLGTAGFCRLWIPGFASLAAPLYPLTKPSIPFIWTEEHQKAFDRIKEALLSAPALALPDLTKPFTLYVDERAGVARGVLTQTLGPWRRPVAYLSKKLDPVASGWPTCLKAVAAVALLLKDADKLTLGQNVTVIASHSLESIVRQPPDRWMTNARMTHYQSLLLNERVSFAPPAVLNPATLLPVESEATPVHRCSEILAEETGTRRDLKDQPLPGVPAWYTDGSSFIAEGKRRAGAAIVDGKRTVWASSLPEGTSAQKAELVALTQALRLAEGKDINIYTDSRYAFATAHIHGAIYKQRGWLTSAGKDIKNKEEILALLEAIHLPKRVAIIHCPGHQKGNDPVATGNRRADEAAKQAALSTRVLAETTKPAGKRTADGSEFEKRTADGSEFESPKKKAKVE

SEQ ID NO: 867 - protein, 2089 aa, synthetic construct
MPAAKRVKLDGGDKKYSIGLDIGTNSVGWAVITDEYKVPSKKFKVLGNTDRHSIKKNLIGALLFDSGETAEATRLKRTARRRYTRRKNRICYLQEIFSNEMAKVDDSFFHRLEESFLVEEDKKHERHPIFGNIVDEVAYHEKYPTIYHLRKKLVDSTDKADLRLIYLALAHMIKFRGHFLIEGDLNPDNSDVDKLFIQLVQTYNQLFEENPINASGVDAKAILSARLSKSRRLENLIAQLPGEKKNGLFGNLIALSLGLTPNFKSNFDLAEDAKLQLSKDTYDDDLDNLLAQIGDQYADLFLAAKNLSDAILLSDILRVNTEITKAPLSASMIKRYDEHHQDLTLLKALVRQQLPEKYKEIFFDQSKNGYAGYIDGGASQEEFYKFIKPILEKMDGTEELLVKLNREDLLRKQRTFDNGSIPHQIHLGELHAILRRQEDFYPFLKDNREKIEKILTFRIPYYVGPLARGNSRFAWMTRKSEETITPWNFEEVVDKGASAQSFIERMTNFDKNLPNEKVLPKHSLLYEYFTVYNELTKVKYVTEGMRKPAFLSGEQKKAIVDLLFKTNRKVTVKQLKEDYFKKIECFDSVEISGVEDRFNASLGTYHDLLKIIKDKDFLDNEENEDILEDIVLTLTLFEDREMIEERLKTYAHLFDDKVMKQLKRRRYTGWGRLSRKLINGIRDKQSGKTILDFLKSDGFANRNFMQLIHDDSLTFKEDIQKAQVSGQGDSLHEHIANLAGSPAIKKGILQTVKVVDELVKVMGRHKPENIVIEMARENQTTQKGQKNSRERMKRIEEGIKELGSQILKEHPVENTQLQNEKLYLYYLQNGRDMYVDQELDINRLSDYDVDHIVPQSFLKDDSIDNKVLTRSDKARGKSDNVPSEEVVKKMKNYWRQLLNAKLITQRKFDNLTKAERGGLSELDKAGFIKRQLVETRQITKHVAQILDSRMNTKYDENDKLIREVKVITLKSKLVSDFRKDFQFYKVREINNYHHAHDAYLNAVVGTALIKKYPKLESEFVYGDYKVYDVRKMIAKSEQEIGKATAKYFFYSNIMNFFKTEITLANGEIRKRPLIETNGETGEIVWDKGRDFATVRKVLSMPQVNIVKKTEVQTGGFSKESILPKRNSDKLIARKKDWDPKKYGGFDSPTVAYSVLVVAKVEKGKSKKLKSVKELLGITIMERSSFEKNPIDFLEAKGYKEVKKDLIIKLPKYSLFELENGRKRMLASAGELQKGNELALPSKYVNFLYLASHYEKLKGSPEDNEQKQLFVEQHKHYLDEIIEQISEFSKRVILADANLDKVLSAYNKHRDKPIREQAENIIHLFTLTNLGAPAAFKYFDTTIDRKRYTSTKEVLDATLIHQSITGLYETRIDLSQLGGDGGGSSPAPGGVLNLEEEYRLHEKPVPSSIDPSWLQLFPTVWAERAGMGLANQVPPVVVELRSGASPVAVRQYPMSKEAREGIRPHIQRFLDLGVLVPCQSPWNTPLLPVKKPGTNDYRPVQDLREINKRVQDIHPTVPNPYNLLSSLPPSHTWYSVLDLKDAFFCLKLHPNSQPLFAFEWRDPEKGNTGQLTWTRLPQGFKNSPTLFNEALHRDLAPFRALNPQVVLLQYVDDLLVAAPTYRDCKEGTQKLLQELSKLGYRVSAKKAQLCQKEVTYLGYLLKEGKRWLTPARKATVMKIPPPTTPRQVREFLGTAGFCRLWIPGFASLAAPLYPLTKPSIPFIWTEEHQKAFDRIKEALLSAPALALPDLTKPFTLYVDERAGVARGVLTQTLGPWRRPVAYLSKKLDPVASGWPTCLKAVAAVALLLKDADKLTLGQNVTVIASHSLESIVRQPPDRWMTNARMTHYQSLLLNERVSFAPPAVLNPATLLPVESEATPVHRCSEILAEETGTRRDLKDQPLPGVPAWYTDGSSFIAEGKRRAGAAIVDGKRTVWASSLPEGTSAQKAELVALTQALRLAEGKDINIYTDSRYAFATAHIHGAIYKQRGWLTSAGKDIKNKEEILALLEAIHLPKRVAIIHCPGHQKGNDPVATGNRRADEAAKQAALSTRVLAETTKPAGKRTADGSEFEKRTADGSEFESPKKKAKVE

SEQ ID NO: 868 - protein, 2092 aa, synthetic construct
MPAAKRVKLDGGDKKYSIGLDIGTNSVGWAVITDEYKVPSKKFKVLGNTDRHSIKKNLIGALLFDSGETAEATRLKRTARRRYTRRKNRICYLQEIFSNEMAKVDDSFFHRLEESFLVEEDKKHERHPIFGNIVDEVAYHEKYPTIYHLRKKLVDSTDKADLRLIYLALAHMIKFRGHFLIEGDLNPDNSDVDKLFIQLVQTYNQLFEENPINASGVDAKAILSARLSKSRRLENLIAQLPGEKKNGLFGNLIALSLGLTPNFKSNFDLAEDAKLQLSKDTYDDDLDNLLAQIGDQYADLFLAAKNLSDAILLSDILRVNTEITKAPLSASMIKRYDEHHQDLTLLKALVRQQLPEKYKEIFFDQSKNGYAGYIDGGASQEEFYKFIKPILEKMDGTEELLVKLNREDLLRKQRTFDNGSIPHQIHLGELHAILRRQEDFYPFLKDNREKIEKILTFRIPYYVGPLARGNSRFAWMTRKSEETITPWNFEEVVDKGASAQSFIERMTNFDKNLPNEKVLPKHSLLYEYFTVYNELTKVKYVTEGMRKPAFLSGEQKKAIVDLLFKTNRKVTVKQLKEDYFKKIECFDSVEISGVEDRFNASLGTYHDLLKIIKDKDFLDNEENEDILEDIVLTLTLFEDREMIEERLKTYAHLFDDKVMKQLKRRRYTGWGRLSRKLINGIRDKQSGKTILDFLKSDGFANRNFMQLIHDDSLTFKEDIQKAQVSGQGDSLHEHIANLAGSPAIKKGILQTVKVVDELVKVMGRHKPENIVIEMARENQTTQKGQKNSRERMKRIEEGIKELGSQILKEHPVENTQLQNEKLYLYYLQNGRDMYVDQELDINRLSDYDVDHIVPQSFLKDDSIDNKVLTRSDKARGKSDNVPSEEVVKKMKNYWRQLLNAKLITQRKFDNLTKAERGGLSELDKAGFIKRQLVETRQITKHVAQILDSRMNTKYDENDKLIREVKVITLKSKLVSDFRKDFQFYKVREINNYHHAHDAYLNAVVGTALIKKYPKLESEFVYGDYKVYDVRKMIAKSEQEIGKATAKYFFYSNIMNFFKTEITLANGEIRKRPLIETNGETGEIVWDKGRDFATVRKVLSMPQVNIVKKTEVQTGGFSKESILPKRNSDKLIARKKDWDPKKYGGFDSPTVAYSVLVVAKVEKGKSKKLKSVKELLGITIMERSSFEKNPIDFLEAKGYKEVKKDLIIKLPKYSLFELENGRKRMLASAGELQKGNELALPSKYVNFLYLASHYEKLKGSPEDNEQKQLFVEQHKHYLDEIIEQISEFSKRVILADANLDKVLSAYNKHRDKPIREQAENIIHLFTLTNLGAPAAFKYFDTTIDRKRYTSTKEVLDATLIHQSITGLYETRIDLSQLGGDGGGSSGGGPAPGGVLNLEEEYRLHEKPVPSSIDPSWLQLFPTVWAERAGMGLANQVPPVVVELRSGASPVAVRQYPMSKEAREGIRPHIQRFLDLGVLVPCQSPWNTPLLPVKKPGTNDYRPVQDLREINKRVQDIHPTVPNPYNLLSSLPPSHTWYSVLDLKDAFFCLKLHPNSQPLFAFEWRDPEKGNTGQLTWTRLPQGFKNSPTLFNEALHRDLAPFRALNPQVVLLQYVDDLLVAAPTYRDCKEGTQKLLQELSKLGYRVSAKKAQLCQKEVTYLGYLLKEGKRWLTPARKATVMKIPPPTTPRQVREFLGTAGFCRLWIPGFASLAAPLYPLTKPSIPFIWTEEHQKAFDRIKEALLSAPALALPDLTKPFTLYVDERAGVARGVLTQTLGPWRRPVAYLSKKLDPVASGWPTCLKAVAAVALLLKDADKLTLGQNVTVIASHSLESIVRQPPDRWMTNARMTHYQSLLLNERVSFAPPAVLNPATLLPVESEATPVHRCSEILAEETGTRRDLKDQPLPGVPAWYTDGSSFIAEGKRRAGAAIVDGKRTVWASSLPEGTSAQKAELVALTQALRLAEGKDINIYTDSRYAFATAHIHGAIYKQRGWLTSAGKDIKNKEEILALLEAIHLPKRVAIIHCPGHQKGNDPVATGNRRADEAAKQAALSTRVLAETTKPAGKRTADGSEFEKRTADGSEFESPKKKAKVE

SEQ ID NO: 869 - protein, 2089 aa, synthetic construct
MPAAKRVKLDGGDKKYSIGLDIGTNSVGWAVITDEYKVPSKKFKVLGNTDRHSIKKNLIGALLFDSGETAEATRLKRTARRRYTRRKNRICYLQEIFSNEMAKVDDSFFHRLEESFLVEEDKKHERHPIFGNIVDEVAYHEKYPTIYHLRKKLVDSTDKADLRLIYLALAHMIKFRGHFLIEGDLNPDNSDVDKLFIQLVQTYNQLFEENPINASGVDAKAILSARLSKSRRLENLIAQLPGEKKNGLFGNLIALSLGLTPNFKSNFDLAEDAKLQLSKDTYDDDLDNLLAQIGDQYADLFLAAKNLSDAILLSDILRVNTEITKAPLSASMIKRYDEHHQDLTLLKALVRQQLPEKYKEIFFDQSKNGYAGYIDGGASQEEFYKFIKPILEKMDGTEELLVKLNREDLLRKQRTFDNGSIPHQIHLGELHAILRRQEDFYPFLKDNREKIEKILTFRIPYYVGPLARGNSRFAWMTRKSEETITPWNFEEVVDKGASAQSFIERMTNFDKNLPNEKVLPKHSLLYEYFTVYNELTKVKYVTEGMRKPAFLSGEQKKAIVDLLFKTNRKVTVKQLKEDYFKKIECFDSVEISGVEDRFNASLGTYHDLLKIIKDKDFLDNEENEDILEDIVLTLTLFEDREMIEERLKTYAHLFDDKVMKQLKRRRYTGWGRLSRKLINGIRDKQSGKTILDFLKSDGFANRNFMQLIHDDSLTFKEDIQKAQVSGQGDSLHEHIANLAGSPAIKKGILQTVKVVDELVKVMGRHKPENIVIEMARENQTTQKGQKNSRERMKRIEEGIKELGSQILKEHPVENTQLQNEKLYLYYLQNGRDMYVDQELDINRLSDYDVDHIVPQSFLKDDSIDNKVLTRSDKARGKSDNVPSEEVVKKMKNYWRQLLNAKLITQRKFDNLTKAERGGLSELDKAGFIKRQLVETRQITKHVAQILDSRMNTKYDENDKLIREVKVITLKSKLVSDFRKDFQFYKVREINNYHHAHDAYLNAVVGTALIKKYPKLESEFVYGDYKVYDVRKMIAKSEQEIGKATAKYFFYSNIMNFFKTEITLANGEIRKRPLIETNGETGEIVWDKGRDFATVRKVLSMPQVNIVKKTEVQTGGFSKESILPKRNSDKLIARKKDWDPKKYGGFDSPTVAYSVLVVAKVEKGKSKKLKSVKELLGITIMERSSFEKNPIDFLEAKGYKEVKKDLIIKLPKYSLFELENGRKRMLASAGELQKGNELALPSKYVNFLYLASHYEKLKGSPEDNEQKQLFVEQHKHYLDEIIEQISEFSKRVILADANLDKVLSAYNKHRDKPIREQAENIIHLFTLTNLGAPAAFKYFDTTIDRKRYTSTKEVLDATLIHQSITGLYETRIDLSQLGGDGGGGSGGSGGVLNLEEEYRLHEKPVPSSIDPSWLQLFPTVWAERAGMGLANQVPPVVVELRSGASPVAVRQYPMSKEAREGIRPHIQRFLDLGVLVPCQSPWNTPLLPVKKPGTNDYRPVQDLREINKRVQDIHPTVPNPYNLLSSLPPSHTWYSVLDLKDAFFCLKLHPNSQPLFAFEWRDPEKGNTGQLTWTRLPQGFKNSPTLFNEALHRDLAPFRALNPQVVLLQYVDDLLVAAPTYRDCKEGTQKLLQELSKLGYRVSAKKAQLCQKEVTYLGYLLKEGKRWLTPARKATVMKIPPPTTPRQVREFLGTAGFCRLWIPGFASLAAPLYPLTKPSIPFIWTEEHQKAFDRIKEALLSAPALALPDLTKPFTLYVDERAGVARGVLTQTLGPWRRPVAYLSKKLDPVASGWPTCLKAVAAVALLLKDADKLTLGQNVTVIASHSLESIVRQPPDRWMTNARMTHYQSLLLNERVSFAPPAVLNPATLLPVESEATPVHRCSEILAEETGTRRDLKDQPLPGVPAWYTDGSSFIAEGKRRAGAAIVDGKRTVWASSLPEGTSAQKAELVALTQALRLAEGKDINIYTDSRYAFATAHIHGAIYKQRGWLTSAGKDIKNKEEILALLEAIHLPKRVAIIHCPGHQKGNDPVATGNRRADEAAKQAALSTRVLAETTKPAGKRTADGSEFEKRTADGSEFESPKKKAKVE

SEQ ID NO: 870 - protein, 2094 aa, synthetic construct
MPAAKRVKLDGGDKKYSIGLDIGTNSVGWAVITDEYKVPSKKFKVLGNTDRHSIKKNLIGALLFDSGETAEATRLKRTARRRYTRRKNRICYLQEIFSNEMAKVDDSFFHRLEESFLVEEDKKHERHPIFGNIVDEVAYHEKYPTIYHLRKKLVDSTDKADLRLIYLALAHMIKFRGHFLIEGDLNPDNSDVDKLFIQLVQTYNQLFEENPINASGVDAKAILSARLSKSRRLENLIAQLPGEKKNGLFGNLIALSLGLTPNFKSNFDLAEDAKLQLSKDTYDDDLDNLLAQIGDQYADLFLAAKNLSDAILLSDILRVNTEITKAPLSASMIKRYDEHHQDLTLLKALVRQQLPEKYKEIFFDQSKNGYAGYIDGGASQEEFYKFIKPILEKMDGTEELLVKLNREDLLRKQRTFDNGSIPHQIHLGELHAILRRQEDFYPFLKDNREKIEKILTFRIPYYVGPLARGNSRFAWMTRKSEETITPWNFEEVVDKGASAQSFIERMTNFDKNLPNEKVLPKHSLLYEYFTVYNELTKVKYVTEGMRKPAFLSGEQKKAIVDLLFKTNRKVTVKQLKEDYFKKIECFDSVEISGVEDRFNASLGTYHDLLKIIKDKDFLDNEENEDILEDIVLTLTLFEDREMIEERLKTYAHLFDDKVMKQLKRRRYTGWGRLSRKLINGIRDKQSGKTILDFLKSDGFANRNFMQLIHDDSLTFKEDIQKAQVSGQGDSLHEHIANLAGSPAIKKGILQTVKVVDELVKVMGRHKPENIVIEMARENQTTQKGQKNSRERMKRIEEGIKELGSQILKEHPVENTQLQNEKLYLYYLQNGRDMYVDQELDINRLSDYDVDHIVPQSFLKDDSIDNKVLTRSDKARGKSDNVPSEEVVKKMKNYWRQLLNAKLITQRKFDNLTKAERGGLSELDKAGFIKRQLVETRQITKHVAQILDSRMNTKYDENDKLIREVKVITLKSKLVSDFRKDFQFYKVREINNYHHAHDAYLNAVVGTALIKKYPKLESEFVYGDYKVYDVRKMIAKSEQEIGKATAKYFFYSNIMNFFKTEITLANGEIRKRPLIETNGETGEIVWDKGRDFATVRKVLSMPQVNIVKKTEVQTGGFSKESILPKRNSDKLIARKKDWDPKKYGGFDSPTVAYSVLVVAKVEKGKSKKLKSVKELLGITIMERSSFEKNPIDFLEAKGYKEVKKDLIIKLPKYSLFELENGRKRMLASAGELQKGNELALPSKYVNFLYLASHYEKLKGSPEDNEQKQLFVEQHKHYLDEIIEQISEFSKRVILADANLDKVLSAYNKHRDKPIREQAENIIHLFTLTNLGAPAAFKYFDTTIDRKRYTSTKEVLDATLIHQSITGLYETRIDLSQLGGDGGGGGPAPEAAAKGGVLNLEEEYRLHEKPVPSSIDPSWLQLFPTVWAERAGMGLANQVPPVVVELRSGASPVAVRQYPMSKEAREGIRPHIQRFLDLGVLVPCQSPWNTPLLPVKKPGTNDYRPVQDLREINKRVQDIHPTVPNPYNLLSSLPPSHTWYSVLDLKDAFFCLKLHPNSQPLFAFEWRDPEKGNTGQLTWTRLPQGFKNSPTLFNEALHRDLAPFRALNPQVVLLQYVDDLLVAAPTYRDCKEGTQKLLQELSKLGYRVSAKKAQLCQKEVTYLGYLLKEGKRWLTPARKATVMKIPPPTTPRQVREFLGTAGFCRLWIPGFASLAAPLYPLTKPSIPFIWTEEHQKAFDRIKEALLSAPALALPDLTKPFTLYVDERAGVARGVLTQTLGPWRRPVAYLSKKLDPVASGWPTCLKAVAAVALLLKDADKLTLGQNVTVIASHSLESIVRQPPDRWMTNARMTHYQSLLLNERVSFAPPAVLNPATLLPVESEATPVHRCSEILAEETGTRRDLKDQPLPGVPAWYTDGSSFIAEGKRRAGAAIVDGKRTVWASSLPEGTSAQKAELVALTQALRLAEGKDINIYTDSRYAFATAHIHGAIYKQRGWLTSAGKDIKNKEEILALLEAIHLPKRVAIIHCPGHQKGNDPVATGNRRADEAAKQAALSTRVLAETTKPAGKRTADGSEFEKRTADGSEFESPKKKAKVE

SEQ ID NO: 871 - protein, 2129 aa, synthetic construct
MPAAKRVKLDGGDKKYSIGLDIGTNSVGWAVITDEYKVPSKKFKVLGNTDRHSIKKNLIGALLFDSGETAEATRLKRTARRRYTRRKNRICYLQEIFSNEMAKVDDSFFHRLEESFLVEEDKKHERHPIFGNIVDEVAYHEKYPTIYHLRKKLVDSTDKADLRLIYLALAHMIKFRGHFLIEGDLNPDNSDVDKLFIQLVQTYNQLFEENPINASGVDAKAILSARLSKSRRLENLIAQLPGEKKNGLFGNLIALSLGLTPNFKSNFDLAEDAKLQLSKDTYDDDLDNLLAQIGDQYADLFLAAKNLSDAILLSDILRVNTEITKAPLSASMIKRYDEHHQDLTLLKALVRQQLPEKYKEIFFDQSKNGYAGYIDGGASQEEFYKFIKPILEKMDGTEELLVKLNREDLLRKQRTFDNGSIPHQIHLGELHAILRRQEDFYPFLKDNREKIEKILTFRIPYYVGPLARGNSRFAWMTRKSEETITPWNFEEVVDKGASAQSFIERMTNFDKNLPNEKVLPKHSLLYEYFTVYNELTKVKYVTEGMRKPAFLSGEQKKAIVDLLFKTNRKVTVKQLKEDYFKKIECFDSVEISGVEDRFNASLGTYHDLLKIIKDKDFLDNEENEDILEDIVLTLTLFEDREMIEERLKTYAHLFDDKVMKQLKRRRYTGWGRLSRKLINGIRDKQSGKTILDFLKSDGFANRNFMQLIHDDSLTFKEDIQKAQVSGQGDSLHEHIANLAGSPAIKKGILQTVKVVDELVKVMGRHKPENIVIEMARENQTTQKGQKNSRERMKRIEEGIKELGSQILKEHPVENTQLQNEKLYLYYLQNGRDMYVDQELDINRLSDYDVDHIVPQSFLKDDSIDNKVLTRSDKARGKSDNVPSEEVVKKMKNYWRQLLNAKLITQRKFDNLTKAERGGLSELDKAGFIKRQLVETRQITKHVAQILDSRMNTKYDENDKLIREVKVITLKSKLVSDFRKDFQFYKVREINNYHHAHDAYLNAVVGTALIKKYPKLESEFVYGDYKVYDVRKMIAKSEQEIGKATAKYFFYSNIMNFFKTEITLANGEIRKRPLIETNGETGEIVWDKGRDFATVRKVLSMPQVNIVKKTEVQTGGFSKESILPKRNSDKLIARKKDWDPKKYGGFDSPTVAYSVLVVAKVEKGKSKKLKSVKELLGITIMERSSFEKNPIDFLEAKGYKEVKKDLIIKLPKYSLFELENGRKRMLASAGELQKGNELALPSKYVNFLYLASHYEKLKGSPEDNEQKQLFVEQHKHYLDEIIEQISEFSKRVILADANLDKVLSAYNKHRDKPIREQAENIIHLFTLTNLGAPAAFKYFDTTIDRKRYTSTKEVLDATLIHQSITGLYETRIDLSQLGGDGGAEAAAKEAAAKEAAAKEAAAKALEAEAAAKEAAAKEAAAKEAAAKAGGVLNLEEEYRLHEKPVPSSIDPSWLQLFPTVWAERAGMGLANQVPPVVVELRSGASPVAVRQYPMSKEAREGIRPHIQRFLDLGVLVPCQSPWNTPLLPVKKPGTNDYRPVQDLREINKRVQDIHPTVPNPYNLLSSLPPSHTWYSVLDLKDAFFCLKLHPNSQPLFAFEWRDPEKGNTGQLTWTRLPQGFKNSPTLFNEALHRDLAPFRALNPQVVLLQYVDDLLVAAPTYRDCKEGTQKLLQELSKLGYRVSAKKAQLCQKEVTYLGYLLKEGKRWLTPARKATVMKIPPPTTPRQVREFLGKAGFCRLFIPGFASLAAPLYPLTKPSIPFIWTEEHQKAFDRIKEALLSAPALALPDLTKPFTLYVDERAGVARGVLTQTLGPWRRPVAYLSKKLDPVASGWPTCLKAVAAVALLLKDADKLTLGQNVTVIASHSLESIVRQPPDRWMTNARMTHYQSLLLNERVSFAPPAVLNPATLLPVESEATPVHRCSEILAEETGTRRDLKDQPLPGVPAWYTDGSSFIAEGKRRAGAAIVDGKRTVWASSLPEGTSAQKAELVALTQALRLAEGKDINIYTDSRYAFATAHIHGAIYKQRGWLTSAGKDIKNKEEILALLEAIHLPKRVAIIHCPGHQKGNDPVATGNRRADEAAKQAALSTRVLAETTKPAGKRTADGSEFEKRTADGSEFESPKKKAKVE

SEQ ID NO: 872 - protein, 2092 aa, synthetic construct
MPAAKRVKLDGGDKKYSIGLDIGTNSVGWAVITDEYKVPSKKFKVLGNTDRHSIKKNLIGALLFDSGETAEATRLKRTARRRYTRRKNRICYLQEIFSNEMAKVDDSFFHRLEESFLVEEDKKHERHPIFGNIVDEVAYHEKYPTIYHLRKKLVDSTDKADLRLIYLALAHMIKFRGHFLIEGDLNPDNSDVDKLFIQLVQTYNQLFEENPINASGVDAKAILSARLSKSRRLENLIAQLPGEKKNGLFGNLIALSLGLTPNFKSNFDLAEDAKLQLSKDTYDDDLDNLLAQIGDQYADLFLAAKNLSDAILLSDILRVNTEITKAPLSASMIKRYDEHHQDLTLLKALVRQQLPEKYKEIFFDQSKNGYAGYIDGGASQEEFYKFIKPILEKMDGTEELLVKLNREDLLRKQRTFDNGSIPHQIHLGELHAILRRQEDFYPFLKDNREKIEKILTFRIPYYVGPLARGNSRFAWMTRKSEETITPWNFEEVVDKGASAQSFIERMTNFDKNLPNEKVLPKHSLLYEYFTVYNELTKVKYVTEGMRKPAFLSGEQKKAIVDLLFKTNRKVTVKQLKEDYFKKIECFDSVEISGVEDRFNASLGTYHDLLKIIKDKDFLDNEENEDILEDIVLTLTLFEDREMIEERLKTYAHLFDDKVMKQLKRRRYTGWGRLSRKLINGIRDKQSGKTILDFLKSDGFANRNFMQLIHDDSLTFKEDIQKAQVSGQGDSLHEHIANLAGSPAIKKGILQTVKVVDELVKVMGRHKPENIVIEMARENQTTQKGQKNSRERMKRIEEGIKELGSQILKEHPVENTQLQNEKLYLYYLQNGRDMYVDQELDINRLSDYDVDHIVPQSFLKDDSIDNKVLTRSDKARGKSDNVPSEEVVKKMKNYWRQLLNAKLITQRKFDNLTKAERGGLSELDKAGFIKRQLVETRQITKHVAQILDSRMNTKYDENDKLIREVKVITLKSKLVSDFRKDFQFYKVREINNYHHAHDAYLNAVVGTALIKKYPKLESEFVYGDYKVYDVRKMIAKSEQEIGKATAKYFFYSNIMNFFKTEITLANGEIRKRPLIETNGETGEIVWDKGRDFATVRKVLSMPQVNIVKKTEVQTGGFSKESILPKRNSDKLIARKKDWDPKKYGGFDSPTVAYSVLVVAKVEKGKSKKLKSVKELLGITIMERSSFEKNPIDFLEAKGYKEVKKDLIIKLPKYSLFELENGRKRMLASAGELQKGNELALPSKYVNFLYLASHYEKLKGSPEDNEQKQLFVEQHKHYLDEIIEQISEFSKRVILADANLDKVLSAYNKHRDKPIREQAENIIHLFTLTNLGAPAAFKYFDTTIDRKRYTSTKEVLDATLIHQSITGLYETRIDLSQLGGDGGPAPGGGGSSGGVLNLEEEYRLHEKPVPSSIDPSWLQLFPTVWAERAGMGLANQVPPVVVELRSGASPVAVRQYPMSKEAREGIRPHIQRFLDLGVLVPCQSPWNTPLLPVKKPGTNDYRPVQDLREINKRVQDIHPTVPNPYNLLSSLPPSHTWYSVLDLKDAFFCLKLHPNSQPLFAFEWRDPEKGNTGQLTWTRLPQGFKNSPTLFNEALHRDLAPFRALNPQVVLLQYVDDLLVAAPTYRDCKEGTQKLLQELSKLGYRVSAKKAQLCQKEVTYLGYLLKEGKRWLTPARKATVMKIPPPTTPRQVREFLGKAGFCRLFIPGFASLAAPLYPLTKPSIPFIWTEEHQKAFDRIKEALLSAPALALPDLTKPFTLYVDERAGVARGVLTQTLGPWRRPVAYLSKKLDPVASGWPTCLKAVAAVALLLKDADKLTLGQNVTVIASHSLESIVRQPPDRWMTNARMTHYQSLLLNERVSFAPPAVLNPATLLPVESEATPVHRCSEILAEETGTRRDLKDQPLPGVPAWYTDGSSFIAEGKRRAGAAIVDGKRTVWASSLPEGTSAQKAELVALTQALRLAEGKDINIYTDSRYAFATAHIHGAIYKQRGWLTSAGKDIKNKEEILALLEAIHLPKRVAIIHCPGHQKGNDPVATGNRRADEAAKQAALSTRVLAETTKPAGKRTADGSEFEKRTADGSEFESPKKKAKVE

SEQ ID NO: 873 - protein, 2108 aa, synthetic construct
MPAAKRVKLDGGDKKYSIGLDIGTNSVGWAVITDEYKVPSKKFKVLGNTDRHSIKKNLIGALLFDSGETAEATRLKRTARRRYTRRKNRICYLQEIFSNEMAKVDDSFFHRLEESFLVEEDKKHERHPIFGNIVDEVAYHEKYPTIYHLRKKLVDSTDKADLRLIYLALAHMIKFRGHFLIEGDLNPDNSDVDKLFIQLVQTYNQLFEENPINASGVDAKAILSARLSKSRRLENLIAQLPGEKKNGLFGNLIALSLGLTPNFKSNFDLAEDAKLQLSKDTYDDDLDNLLAQIGDQYADLFLAAKNLSDAILLSDILRVNTEITKAPLSASMIKRYDEHHQDLTLLKALVRQQLPEKYKEIFFDQSKNGYAGYIDGGASQEEFYKFIKPILEKMDGTEELLVKLNREDLLRKQRTFDNGSIPHQIHLGELHAILRRQEDFYPFLKDNREKIEKILTFRIPYYVGPLARGNSRFAWMTRKSEETITPWNFEEVVDKGASAQSFIERMTNFDKNLPNEKVLPKHSLLYEYFTVYNELTKVKYVTEGMRKPAFLSGEQKKAIVDLLFKTNRKVTVKQLKEDYFKKIECFDSVEISGVEDRFNASLGTYHDLLKIIKDKDFLDNEENEDILEDIVLTLTLFEDREMIEERLKTYAHLFDDKVMKQLKRRRYTGWGRLSRKLINGIRDKQSGKTILDFLKSDGFANRNFMQLIHDDSLTFKEDIQKAQVSGQGDSLHEHIANLAGSPAIKKGILQTVKVVDELVKVMGRHKPENIVIEMARENQTTQKGQKNSRERMKRIEEGIKELGSQILKEHPVENTQLQNEKLYLYYLQNGRDMYVDQELDINRLSDYDVDHIVPQSFLKDDSIDNKVLTRSDKARGKSDNVPSEEVVKKMKNYWRQLLNAKLITQRKFDNLTKAERGGLSELDKAGFIKRQLVETRQITKHVAQILDSRMNTKYDENDKLIREVKVITLKSKLVSDFRKDFQFYKVREINNYHHAHDAYLNAVVGTALIKKYPKLESEFVYGDYKVYDVRKMIAKSEQEIGKATAKYFFYSNIMNFFKTEITLANGEIRKRPLIETNGETGEIVWDKGRDFATVRKVLSMPQVNIVKKTEVQTGGFSKESILPKRNSDKLIARKKDWDPKKYGGFDSPTVAYSVLVVAKVEKGKSKKLKSVKELLGITIMERSSFEKNPIDFLEAKGYKEVKKDLIIKLPKYSLFELENGRKRMLASAGELQKGNELALPSKYVNFLYLASHYEKLKGSPEDNEQKQLFVEQHKHYLDEIIEQISEFSKRVILADANLDKVLSAYNKHRDKPIREQAENIIHLFTLTNLGAPAAFKYFDTTIDRKRYTSTKEVLDATLIHQSITGLYETRIDLSQLGGDGGGGGGSGGGGSGGGGSGGGGSGGGGSGGVLNLEEEYRLHEKPVPSSIDPSWLQLFPTVWAERAGMGLANQVPPVVVELRSGASPVAVRQYPMSKEAREGIRPHIQRFLDLGVLVPCQSPWNTPLLPVKKPGTNDYRPVQDLREINKRVQDIHPTVPNPYNLLSSLPPSHTWYSVLDLKDAFFCLKLHPNSQPLFAFEWRDPEKGNTGQLTWTRLPQGFKNSPTLFNEALHRDLAPFRALNPQVVLLQYVDDLLVAAPTYRDCKEGTQKLLQELSKLGYRVSAKKAQLCQKEVTYLGYLLKEGKRWLTPARKATVMKIPPPTTPRQVREFLGKAGFCRLFIPGFASLAAPLYPLTKPSIPFIWTEEHQKAFDRIKEALLSAPALALPDLTKPFTLYVDERAGVARGVLTQTLGPWRRPVAYLSKKLDPVASGWPTCLKAVAAVALLLKDADKLTLGQNVTVIASHSLESIVRQPPDRWMTNARMTHYQSLLLNERVSFAPPAVLNPATLLPVESEATPVHRCSEILAEETGTRRDLKDQPLPGVPAWYTDGSSFIAEGKRRAGAAIVDGKRTVWASSLPEGTSAQKAELVALTQALRLAEGKDINIYTDSRYAFATAHIHGAIYKQRGWLTSAGKDIKNKEEILALLEAIHLPKRVAIIHCPGHQKGNDPVATGNRRADEAAKQAALSTRVLAETTKPAGKRTADGSEFEKRTADGSEFESPKKKAKVE

SEQ ID NO: 874 - protein, 2094 aa, synthetic construct
MPAAKRVKLDGGDKKYSIGLDIGTNSVGWAVITDEYKVPSKKFKVLGNTDRHSIKKNLIGALLFDSGETAEATRLKRTARRRYTRRKNRICYLQEIFSNEMAKVDDSFFHRLEESFLVEEDKKHERHPIFGNIVDEVAYHEKYPTIYHLRKKLVDSTDKADLRLIYLALAHMIKFRGHFLIEGDLNPDNSDVDKLFIQLVQTYNQLFEENPINASGVDAKAILSARLSKSRRLENLIAQLPGEKKNGLFGNLIALSLGLTPNFKSNFDLAEDAKLQLSKDTYDDDLDNLLAQIGDQYADLFLAAKNLSDAILLSDILRVNTEITKAPLSASMIKRYDEHHQDLTLLKALVRQQLPEKYKEIFFDQSKNGYAGYIDGGASQEEFYKFIKPILEKMDGTEELLVKLNREDLLRKQRTFDNGSIPHQIHLGELHAILRRQEDFYPFLKDNREKIEKILTFRIPYYVGPLARGNSRFAWMTRKSEETITPWNFEEVVDKGASAQSFIERMTNFDKNLPNEKVLPKHSLLYEYFTVYNELTKVKYVTEGMRKPAFLSGEQKKAIVDLLFKTNRKVTVKQLKEDYFKKIECFDSVEISGVEDRFNASLGTYHDLLKIIKDKDFLDNEENEDILEDIVLTLTLFEDREMIEERLKTYAHLFDDKVMKQLKRRRYTGWGRLSRKLINGIRDKQSGKTILDFLKSDGFANRNFMQLIHDDSLTFKEDIQKAQVSGQGDSLHEHIANLAGSPAIKKGILQTVKVVDELVKVMGRHKPENIVIEMARENQTTQKGQKNSRERMKRIEEGIKELGSQILKEHPVENTQLQNEKLYLYYLQNGRDMYVDQELDINRLSDYDVDHIVPQSFLKDDSIDNKVLTRSDKARGKSDNVPSEEVVKKMKNYWRQLLNAKLITQRKFDNLTKAERGGLSELDKAGFIKRQLVETRQITKHVAQILDSRMNTKYDENDKLIREVKVITLKSKLVSDFRKDFQFYKVREINNYHHAHDAYLNAVVGTALIKKYPKLESEFVYGDYKVYDVRKMIAKSEQEIGKATAKYFFYSNIMNFFKTEITLANGEIRKRPLIETNGETGEIVWDKGRDFATVRKVLSMPQVNIVKKTEVQTGGFSKESILPKRNSDKLIARKKDWDPKKYGGFDSPTVAYSVLVVAKVEKGKSKKLKSVKELLGITIMERSSFEKNPIDFLEAKGYKEVKKDLIIKLPKYSLFELENGRKRMLASAGELQKGNELALPSKYVNFLYLASHYEKLKGSPEDNEQKQLFVEQHKHYLDEIIEQISEFSKRVILADANLDKVLSAYNKHRDKPIREQAENIIHLFTLTNLGAPAAFKYFDTTIDRKRYTSTKEVLDATLIHQSITGLYETRIDLSQLGGDGGEAAAKPAPGSSGGVLNLEEEYRLHEKPVPSSIDPSWLQLFPTVWAERAGMGLANQVPPVVVELRSGASPVAVRQYPMSKEAREGIRPHIQRFLDLGVLVPCQSPWNTPLLPVKKPGTNDYRPVQDLREINKRVQDIHPTVPNPYNLLSSLPPSHTWYSVLDLKDAFFCLKLHPNSQPLFAFEWRDPEKGNTGQLTWTRLPQGFKNSPTLFNEALHRDLAPFRALNPQVVLLQYVDDLLVAAPTYRDCKEGTQKLLQELSKLGYRVSAKKAQLCQKEVTYLGYLLKEGKRWLTPARKATVMKIPPPTTPRQVREFLGKAGFCRLFIPGFASLAAPLYPLTKPSIPFIWTEEHQKAFDRIKEALLSAPALALPDLTKPFTLYVDERAGVARGVLTQTLGPWRRPVAYLSKKLDPVASGWPTCLKAVAAVALLLKDADKLTLGQNVTVIASHSLESIVRQPPDRWMTNARMTHYQSLLLNERVSFAPPAVLNPATLLPVESEATPVHRCSEILAEETGTRRDLKDQPLPGVPAWYTDGSSFIAEGKRRAGAAIVDGKRTVWASSLPEGTSAQKAELVALTQALRLAEGKDINIYTDSRYAFATAHIHGAIYKQRGWLTSAGKDIKNKEEILALLEAIHLPKRVAIIHCPGHQKGNDPVATGNRRADEAAKQAALSTRVLAETTKPAGKRTADGSEFEKRTADGSEFESPKKKAKVE

SEQ ID NO: 875 - protein, 2092 aa, synthetic construct
MPAAKRVKLDGGDKKYSIGLDIGTNSVGWAVITDEYKVPSKKFKVLGNTDRHSIKKNLIGALLFDSGETAEATRLKRTARRRYTRRKNRICYLQEIFSNEMAKVDDSFFHRLEESFLVEEDKKHERHPIFGNIVDEVAYHEKYPTIYHLRKKLVDSTDKADLRLIYLALAHMIKFRGHFLIEGDLNPDNSDVDKLFIQLVQTYNQLFEENPINASGVDAKAILSARLSKSRRLENLIAQLPGEKKNGLFGNLIALSLGLTPNFKSNFDLAEDAKLQLSKDTYDDDLDNLLAQIGDQYADLFLAAKNLSDAILLSDILRVNTEITKAPLSASMIKRYDEHHQDLTLLKALVRQQLPEKYKEIFFDQSKNGYAGYIDGGASQEEFYKFIKPILEKMDGTEELLVKLNREDLLRKQRTFDNGSIPHQIHLGELHAILRRQEDFYPFLKDNREKIEKILTFRIPYYVGPLARGNSRFAWMTRKSEETITPWNFEEVVDKGASAQSFIERMTNFDKNLPNEKVLPKHSLLYEYFTVYNELTKVKYVTEGMRKPAFLSGEQKKAIVDLLFKTNRKVTVKQLKEDYFKKIECFDSVEISGVEDRFNASLGTYHDLLKIIKDKDFLDNEENEDILEDIVLTLTLFEDREMIEERLKTYAHLFDDKVMKQLKRRRYTGWGRLSRKLINGIRDKQSGKTILDFLKSDGFANRNFMQLIHDDSLTFKEDIQKAQVSGQGDSLHEHIANLAGSPAIKKGILQTVKVVDELVKVMGRHKPENIVIEMARENQTTQKGQKNSRERMKRIEEGIKELGSQILKEHPVENTQLQNEKLYLYYLQNGRDMYVDQELDINRLSDYDVDHIVPQSFLKDDSIDNKVLTRSDKARGKSDNVPSEEVVKKMKNYWRQLLNAKLITQRKFDNLTKAERGGLSELDKAGFIKRQLVETRQITKHVAQILDSRMNTKYDENDKLIREVKVITLKSKLVSDFRKDFQFYKVREINNYHHAHDAYLNAVVGTALIKKYPKLESEFVYGDYKVYDVRKMIAKSEQEIGKATAKYFFYSNIMNFFKTEITLANGEIRKRPLIETNGETGEIVWDKGRDFATVRKVLSMPQVNIVKKTEVQTGGFSKESILPKRNSDKLIARKKDWDPKKYGGFDSPTVAYSVLVVAKVEKGKSKKLKSVKELLGITIMERSSFEKNPIDFLEAKGYKEVKKDLIIKLPKYSLFELENGRKRMLASAGELQKGNELALPSKYVNFLYLASHYEKLKGSPEDNEQKQLFVEQHKHYLDEIIEQISEFSKRVILADANLDKVLSAYNKHRDKPIREQAENIIHLFTLTNLGAPAAFKYFDTTIDRKRYTSTKEVLDATLIHQSITGLYETRIDLSQLGGDGGGGSPAPGSSGGVLNLEEEYRLHEKPVPSSIDPSWLQLFPTVWAERAGMGLANQVPPVVVELRSGASPVAVRQYPMSKEAREGIRPHIQRFLDLGVLVPCQSPWNTPLLPVKKPGTNDYRPVQDLREINKRVQDIHPTVPNPYNLLSSLPPSHTWYSVLDLKDAFFCLKLHPNSQPLFAFEWRDPEKGNTGQLTWTRLPQGFKNSPTLFNEALHRDLAPFRALNPQVVLLQYVDDLLVAAPTYRDCKEGTQKLLQELSKLGYRVSAKKAQLCQKEVTYLGYLLKEGKRWLTPARKATVMKIPPPTTPRQVREFLGKAGFCRLFIPGFASLAAPLYPLTKPSIPFIWTEEHQKAFDRIKEALLSAPALALPDLTKPFTLYVDERAGVARGVLTQTLGPWRRPVAYLSKKLDPVASGWPTCLKAVAAVALLLKDADKLTLGQNVTVIASHSLESIVRQPPDRWMTNARMTHYQSLLLNERVSFAPPAVLNPATLLPVESEATPVHRCSEILAEETGTRRDLKDQPLPGVPAWYTDGSSFIAEGKRRAGAAIVDGKRTVWASSLPEGTSAQKAELVALTQALRLAEGKDINIYTDSRYAFATAHIHGAIYKQRGWLTSAGKDIKNKEEILALLEAIHLPKRVAIIHCPGHQKGNDPVATGNRRADEAAKQAALSTRVLAETTKPAGKRTADGSEFEKRTADGSEFESPKKKAKVE

SEQ ID NO: 876 - protein, 2086 aa, synthetic construct
MPAAKRVKLDGGDKKYSIGLDIGTNSVGWAVITDEYKVPSKKFKVLGNTDRHSIKKNLIGALLFDSGETAEATRLKRTARRRYTRRKNRICYLQEIFSNEMAKVDDSFFHRLEESFLVEEDKKHERHPIFGNIVDEVAYHEKYPTIYHLRKKLVDSTDKADLRLIYLALAHMIKFRGHFLIEGDLNPDNSDVDKLFIQLVQTYNQLFEENPINASGVDAKAILSARLSKSRRLENLIAQLPGEKKNGLFGNLIALSLGLTPNFKSNFDLAEDAKLQLSKDTYDDDLDNLLAQIGDQYADLFLAAKNLSDAILLSDILRVNTEITKAPLSASMIKRYDEHHQDLTLLKALVRQQLPEKYKEIFFDQSKNGYAGYIDGGASQEEFYKFIKPILEKMDGTEELLVKLNREDLLRKQRTFDNGSIPHQIHLGELHAILRRQEDFYPFLKDNREKIEKILTFRIPYYVGPLARGNSRFAWMTRKSEETITPWNFEEVVDKGASAQSFIERMTNFDKNLPNEKVLPKHSLLYEYFTVYNELTKVKYVTEGMRKPAFLSGEQKKAIVDLLFKTNRKVTVKQLKEDYFKKIECFDSVEISGVEDRFNASLGTYHDLLKIIKDKDFLDNEENEDILEDIVLTLTLFEDREMIEERLKTYAHLFDDKVMKQLKRRRYTGWGRLSRKLINGIRDKQSGKTILDFLKSDGFANRNFMQLIHDDSLTFKEDIQKAQVSGQGDSLHEHIANLAGSPAIKKGILQTVKVVDELVKVMGRHKPENIVIEMARENQTTQKGQKNSRERMKRIEEGIKELGSQILKEHPVENTQLQNEKLYLYYLQNGRDMYVDQELDINRLSDYDVDHIVPQSFLKDDSIDNKVLTRSDKARGKSDNVPSEEVVKKMKNYWRQLLNAKLITQRKFDNLTKAERGGLSELDKAGFIKRQLVETRQITKHVAQILDSRMNTKYDENDKLIREVKVITLKSKLVSDFRKDFQFYKVREINNYHHAHDAYLNAVVGTALIKKYPKLESEFVYGDYKVYDVRKMIAKSEQEIGKATAKYFFYSNIMNFFKTEITLANGEIRKRPLIETNGETGEIVWDKGRDFATVRKVLSMPQVNIVKKTEVQTGGFSKESILPKRNSDKLIARKKDWDPKKYGGFDSPTVAYSVLVVAKVEKGKSKKLKSVKELLGITIMERSSFEKNPIDFLEAKGYKEVKKDLIIKLPKYSLFELENGRKRMLASAGELQKGNELALPSKYVNFLYLASHYEKLKGSPEDNEQKQLFVEQHKHYLDEIIEQISEFSKRVILADANLDKVLSAYNKHRDKPIREQAENIIHLFTLTNLGAPAAFKYFDTTIDRKRYTSTKEVLDATLIHQSITGLYETRIDLSQLGGDGGGSSGGVLNLEEEYRLHEKPVPSSIDPSWLQLFPTVWAERAGMGLANQVPPVVVELRSGASPVAVRQYPMSKEAREGIRPHIQRFLDLGVLVPCQSPWNTPLLPVKKPGTNDYRPVQDLREINKRVQDIHPTVPNPYNLLSSLPPSHTWYSVLDLKDAFFCLKLHPNSQPLFAFEWRDPEKGNTGQLTWTRLPQGFKNSPTLFNEALHRDLAPFRALNPQVVLLQYVDDLLVAAPTYRDCKEGTQKLLQELSKLGYRVSAKKAQLCQKEVTYLGYLLKEGKRWLTPARKATVMKIPPPTTPRQVREFLGKAGFCRLFIPGFASLAAPLYPLTKPSIPFIWTEEHQKAFDRIKEALLSAPALALPDLTKPFTLYVDERAGVARGVLTQTLGPWRRPVAYLSKKLDPVASGWPTCLKAVAAVALLLKDADKLTLGQNVTVIASHSLESIVRQPPDRWMTNARMTHYQSLLLNERVSFAPPAVLNPATLLPVESEATPVHRCSEILAEETGTRRDLKDQPLPGVPAWYTDGSSFIAEGKRRAGAAIVDGKRTVWASSLPEGTSAQKAELVALTQALRLAEGKDINIYTDSRYAFATAHIHGAIYKQRGWLTSAGKDIKNKEEILALLEAIHLPKRVAIIHCPGHQKGNDPVATGNRRADEAAKQAALSTRVLAETTKPAGKRTADGSEFEKRTADGSEFESPKKKAKVE

SEQ ID NO: 877 - protein, 2099 aa, synthetic construct
MPAAKRVKLDGGDKKYSIGLDIGTNSVGWAVITDEYKVPSKKFKVLGNTDRHSIKKNLIGALLFDSGETAEATRLKRTARRRYTRRKNRICYLQEIFSNEMAKVDDSFFHRLEESFLVEEDKKHERHPIFGNIVDEVAYHEKYPTIYHLRKKLVDSTDKADLRLIYLALAHMIKFRGHFLIEGDLNPDNSDVDKLFIQLVQTYNQLFEENPINASGVDAKAILSARLSKSRRLENLIAQLPGEKKNGLFGNLIALSLGLTPNFKSNFDLAEDAKLQLSKDTYDDDLDNLLAQIGDQYADLFLAAKNLSDAILLSDILRVNTEITKAPLSASMIKRYDEHHQDLTLLKALVRQQLPEKYKEIFFDQSKNGYAGYIDGGASQEEFYKFIKPILEKMDGTEELLVKLNREDLLRKQRTFDNGSIPHQIHLGELHAILRRQEDFYPFLKDNREKIEKILTFRIPYYVGPLARGNSRFAWMTRKSEETITPWNFEEVVDKGASAQSFIERMTNFDKNLPNEKVLPKHSLLYEYFTVYNELTKVKYVTEGMRKPAFLSGEQKKAIVDLLFKTNRKVTVKQLKEDYFKKIECFDSVEISGVEDRFNASLGTYHDLLKIIKDKDFLDNEENEDILEDIVLTLTLFEDREMIEERLKTYAHLFDDKVMKQLKRRRYTGWGRLSRKLINGIRDKQSGKTILDFLKSDGFANRNFMQLIHDDSLTFKEDIQKAQVSGQGDSLHEHIANLAGSPAIKKGILQTVKVVDELVKVMGRHKPENIVIEMARENQTTQKGQKNSRERMKRIEEGIKELGSQILKEHPVENTQLQNEKLYLYYLQNGRDMYVDQELDINRLSDYDVDHIVPQSFLKDDSIDNKVLTRSDKARGKSDNVPSEEVVKKMKNYWRQLLNAKLITQRKFDNLTKAERGGLSELDKAGFIKRQLVETRQITKHVAQILDSRMNTKYDENDKLIREVKVITLKSKLVSDFRKDFQFYKVREINNYHHAHDAYLNAVVGTALIKKYPKLESEFVYGDYKVYDVRKMIAKSEQEIGKATAKYFFYSNIMNFFKTEITLANGEIRKRPLIETNGETGEIVWDKGRDFATVRKVLSMPQVNIVKKTEVQTGGFSKESILPKRNSDKLIARKKDWDPKKYGGFDSPTVAYSVLVVAKVEKGKSKKLKSVKELLGITIMERSSFEKNPIDFLEAKGYKEVKKDLIIKLPKYSLFELENGRKRMLASAGELQKGNELALPSKYVNFLYLASHYEKLKGSPEDNEQKQLFVEQHKHYLDEIIEQISEFSKRVILADANLDKVLSAYNKHRDKPIREQAENIIHLFTLTNLGAPAAFKYFDTTIDRKRYTSTKEVLDATLIHQSITGLYETRIDLSQLGGDGGSGSETPGTSESATPESGGVLNLEEEYRLHEKPVPSSIDPSWLQLFPTVWAERAGMGLANQVPPVVVELRSGASPVAVRQYPMSKEAREGIRPHIQRFLDLGVLVPCQSPWNTPLLPVKKPGTNDYRPVQDLREINKRVQDIHPTVPNPYNLLSSLPPSHTWYSVLDLKDAFFCLKLHPNSQPLFAFEWRDPEKGNTGQLTWTRLPQGFKNSPTLFNEALHRDLAPFRALNPQVVLLQYVDDLLVAAPTYRDCKEGTQKLLQELSKLGYRVSAKKAQLCQKEVTYLGYLLKEGKRWLTPARKATVMKIPPPTTPRQVREFLGKAGFCRLFIPGFASLAAPLYPLTKPSIPFIWTEEHQKAFDRIKEALLSAPALALPDLTKPFTLYVDERAGVARGVLTQTLGPWRRPVAYLSKKLDPVASGWPTCLKAVAAVALLLKDADKLTLGQNVTVIASHSLESIVRQPPDRWMTNARMTHYQSLLLNERVSFAPPAVLNPATLLPVESEATPVHRCSEILAEETGTRRDLKDQPLPGVPAWYTDGSSFIAEGKRRAGAAIVDGKRTVWASSLPEGTSAQKAELVALTQALRLAEGKDINIYTDSRYAFATAHIHGAIYKQRGWLTSAGKDIKNKEEILALLEAIHLPKRVAIIHCPGHQKGNDPVATGNRRADEAAKQAALSTRVLAETTKPAGKRTADGSEFEKRTADGSEFESPKKKAKVE

SEQ ID NO: 878 - protein, 2092 aa, synthetic construct
MPAAKRVKLDGGDKKYSIGLDIGTNSVGWAVITDEYKVPSKKFKVLGNTDRHSIKKNLIGALLFDSGETAEATRLKRTARRRYTRRKNRICYLQEIFSNEMAKVDDSFFHRLEESFLVEEDKKHERHPIFGNIVDEVAYHEKYPTIYHLRKKLVDSTDKADLRLIYLALAHMIKFRGHFLIEGDLNPDNSDVDKLFIQLVQTYNQLFEENPINASGVDAKAILSARLSKSRRLENLIAQLPGEKKNGLFGNLIALSLGLTPNFKSNFDLAEDAKLQLSKDTYDDDLDNLLAQIGDQYADLFLAAKNLSDAILLSDILRVNTEITKAPLSASMIKRYDEHHQDLTLLKALVRQQLPEKYKEIFFDQSKNGYAGYIDGGASQEEFYKFIKPILEKMDGTEELLVKLNREDLLRKQRTFDNGSIPHQIHLGELHAILRRQEDFYPFLKDNREKIEKILTFRIPYYVGPLARGNSRFAWMTRKSEETITPWNFEEVVDKGASAQSFIERMTNFDKNLPNEKVLPKHSLLYEYFTVYNELTKVKYVTEGMRKPAFLSGEQKKAIVDLLFKTNRKVTVKQLKEDYFKKIECFDSVEISGVEDRFNASLGTYHDLLKIIKDKDFLDNEENEDILEDIVLTLTLFEDREMIEERLKTYAHLFDDKVMKQLKRRRYTGWGRLSRKLINGIRDKQSGKTILDFLKSDGFANRNFMQLIHDDSLTFKEDIQKAQVSGQGDSLHEHIANLAGSPAIKKGILQTVKVVDELVKVMGRHKPENIVIEMARENQTTQKGQKNSRERMKRIEEGIKELGSQILKEHPVENTQLQNEKLYLYYLQNGRDMYVDQELDINRLSDYDVDHIVPQSFLKDDSIDNKVLTRSDKARGKSDNVPSEEVVKKMKNYWRQLLNAKLITQRKFDNLTKAERGGLSELDKAGFIKRQLVETRQITKHVAQILDSRMNTKYDENDKLIREVKVITLKSKLVSDFRKDFQFYKVREINNYHHAHDAYLNAVVGTALIKKYPKLESEFVYGDYKVYDVRKMIAKSEQEIGKATAKYFFYSNIMNFFKTEITLANGEIRKRPLIETNGETGEIVWDKGRDFATVRKVLSMPQVNIVKKTEVQTGGFSKESILPKRNSDKLIARKKDWDPKKYGGFDSPTVAYSVLVVAKVEKGKSKKLKSVKELLGITIMERSSFEKNPIDFLEAKGYKEVKKDLIIKLPKYSLFELENGRKRMLASAGELQKGNELALPSKYVNFLYLASHYEKLKGSPEDNEQKQLFVEQHKHYLDEIIEQISEFSKRVILADANLDKVLSAYNKHRDKPIREQAENIIHLFTLTNLGAPAAFKYFDTTIDRKRYTSTKEVLDATLIHQSITGLYETRIDLSQLGGDGGGGGPAPGGSGGVLNLEEEYRLHEKPVPSSIDPSWLQLFPTVWAERAGMGLANQVPPVVVELRSGASPVAVRQYPMSKEAREGIRPHIQRFLDLGVLVPCQSPWNTPLLPVKKPGTNDYRPVQDLREINKRVQDIHPTVPNPYNLLSSLPPSHTWYSVLDLKDAFFCLKLHPNSQPLFAFEWRDPEKGNTGQLTWTRLPQGFKNSPTLFNEALHRDLAPFRALNPQVVLLQYVDDLLVAAPTYRDCKEGTQKLLQELSKLGYRVSAKKAQLCQKEVTYLGYLLKEGKRWLTPARKATVMKIPPPTTPRQVREFLGKAGFCRLFIPGFASLAAPLYPLTKPSIPFIWTEEHQKAFDRIKEALLSAPALALPDLTKPFTLYVDERAGVARGVLTQTLGPWRRPVAYLSKKLDPVASGWPTCLKAVAAVALLLKDADKLTLGQNVTVIASHSLESIVRQPPDRWMTNARMTHYQSLLLNERVSFAPPAVLNPATLLPVESEATPVHRCSEILAEETGTRRDLKDQPLPGVPAWYTDGSSFIAEGKRRAGAAIVDGKRTVWASSLPEGTSAQKAELVALTQALRLAEGKDINIYTDSRYAFATAHIHGAIYKQRGWLTSAGKDIKNKEEILALLEAIHLPKRVAIIHCPGHQKGNDPVATGNRRADEAAKQAALSTRVLAETTKPAGKRTADGSEFEKRTADGSEFESPKKKAKVE

SEQ ID NO: 879 - protein, 2108 aa, synthetic construct
MPAAKRVKLDGGDKKYSIGLDIGTNSVGWAVITDEYKVPSKKFKVLGNTDRHSIKKNLIGALLFDSGETAEATRLKRTARRRYTRRKNRICYLQEIFSNEMAKVDDSFFHRLEESFLVEEDKKHERHPIFGNIVDEVAYHEKYPTIYHLRKKLVDSTDKADLRLIYLALAHMIKFRGHFLIEGDLNPDNSDVDKLFIQLVQTYNQLFEENPINASGVDAKAILSARLSKSRRLENLIAQLPGEKKNGLFGNLIALSLGLTPNFKSNFDLAEDAKLQLSKDTYDDDLDNLLAQIGDQYADLFLAAKNLSDAILLSDILRVNTEITKAPLSASMIKRYDEHHQDLTLLKALVRQQLPEKYKEIFFDQSKNGYAGYIDGGASQEEFYKFIKPILEKMDGTEELLVKLNREDLLRKQRTFDNGSIPHQIHLGELHAILRRQEDFYPFLKDNREKIEKILTFRIPYYVGPLARGNSRFAWMTRKSEETITPWNFEEVVDKGASAQSFIERMTNFDKNLPNEKVLPKHSLLYEYFTVYNELTKVKYVTEGMRKPAFLSGEQKKAIVDLLFKTNRKVTVKQLKEDYFKKIECFDSVEISGVEDRFNASLGTYHDLLKIIKDKDFLDNEENEDILEDIVLTLTLFEDREMIEERLKTYAHLFDDKVMKQLKRRRYTGWGRLSRKLINGIRDKQSGKTILDFLKSDGFANRNFMQLIHDDSLTFKEDIQKAQVSGQGDSLHEHIANLAGSPAIKKGILQTVKVVDELVKVMGRHKPENIVIEMARENQTTQKGQKNSRERMKRIEEGIKELGSQILKEHPVENTQLQNEKLYLYYLQNGRDMYVDQELDINRLSDYDVDHIVPQSFLKDDSIDNKVLTRSDKARGKSDNVPSEEVVKKMKNYWRQLLNAKLITQRKFDNLTKAERGGLSELDKAGFIKRQLVETRQITKHVAQILDSRMNTKYDENDKLIREVKVITLKSKLVSDFRKDFQFYKVREINNYHHAHDAYLNAVVGTALIKKYPKLESEFVYGDYKVYDVRKMIAKSEQEIGKATAKYFFYSNIMNFFKTEITLANGEIRKRPLIETNGETGEIVWDKGRDFATVRKVLSMPQVNIVKKTEVQTGGFSKESILPKRNSDKLIARKKDWDPKKYGGFDSPTVAYSVLVVAKVEKGKSKKLKSVKELLGITIMERSSFEKNPIDFLEAKGYKEVKKDLIIKLPKYSLFELENGRKRMLASAGELQKGNELALPSKYVNFLYLASHYEKLKGSPEDNEQKQLFVEQHKHYLDEIIEQISEFSKRVILADANLDKVLSAYNKHRDKPIREQAENIIHLFTLTNLGAPAAFKYFDTTIDRKRYTSTKEVLDATLIHQSITGLYETRIDLSQLGGDGGEAAAKEAAAKEAAAKEAAAKEAAAKGGVLNLEEEYRLHEKPVPSSIDPSWLQLFPTVWAERAGMGLANQVPPVVVELRSGASPVAVRQYPMSKEAREGIRPHIQRFLDLGVLVPCQSPWNTPLLPVKKPGTNDYRPVQDLREINKRVQDIHPTVPNPYNLLSSLPPSHTWYSVLDLKDAFFCLKLHPNSQPLFAFEWRDPEKGNTGQLTWTRLPQGFKNSPTLFNEALHRDLAPFRALNPQVVLLQYVDDLLVAAPTYRDCKEGTQKLLQELSKLGYRVSAKKAQLCQKEVTYLGYLLKEGKRWLTPARKATVMKIPPPTTPRQVREFLGKAGFCRLFIPGFASLAAPLYPLTKPSIPFIWTEEHQKAFDRIKEALLSAPALALPDLTKPFTLYVDERAGVARGVLTQTLGPWRRPVAYLSKKLDPVASGWPTCLKAVAAVALLLKDADKLTLGQNVTVIASHSLESIVRQPPDRWMTNARMTHYQSLLLNERVSFAPPAVLNPATLLPVESEATPVHRCSEILAEETGTRRDLKDQPLPGVPAWYTDGSSFIAEGKRRAGAAIVDGKRTVWASSLPEGTSAQKAELVALTQALRLAEGKDINIYTDSRYAFATAHIHGAIYKQRGWLTSAGKDIKNKEEILALLEAIHLPKRVAIIHCPGHQKGNDPVATGNRRADEAAKQAALSTRVLAETTKPAGKRTADGSEFEKRTADGSEFESPKKKAKVE

SEQ ID NO: 880 - protein, 2092 aa, synthetic construct
MPAAKRVKLDGGDKKYSIGLDIGTNSVGWAVITDEYKVPSKKFKVLGNTDRHSIKKNLIGALLFDSGETAEATRLKRTARRRYTRRKNRICYLQEIFSNEMAKVDDSFFHRLEESFLVEEDKKHERHPIFGNIVDEVAYHEKYPTIYHLRKKLVDSTDKADLRLIYLALAHMIKFRGHFLIEGDLNPDNSDVDKLFIQLVQTYNQLFEENPINASGVDAKAILSARLSKSRRLENLIAQLPGEKKNGLFGNLIALSLGLTPNFKSNFDLAEDAKLQLSKDTYDDDLDNLLAQIGDQYADLFLAAKNLSDAILLSDILRVNTEITKAPLSASMIKRYDEHHQDLTLLKALVRQQLPEKYKEIFFDQSKNGYAGYIDGGASQEEFYKFIKPILEKMDGTEELLVKLNREDLLRKQRTFDNGSIPHQIHLGELHAILRRQEDFYPFLKDNREKIEKILTFRIPYYVGPLARGNSRFAWMTRKSEETITPWNFEEVVDKGASAQSFIERMTNFDKNLPNEKVLPKHSLLYEYFTVYNELTKVKYVTEGMRKPAFLSGEQKKAIVDLLFKTNRKVTVKQLKEDYFKKIECFDSVEISGVEDRFNASLGTYHDLLKIIKDKDFLDNEENEDILEDIVLTLTLFEDREMIEERLKTYAHLFDDKVMKQLKRRRYTGWGRLSRKLINGIRDKQSGKTILDFLKSDGFANRNFMQLIHDDSLTFKEDIQKAQVSGQGDSLHEHIANLAGSPAIKKGILQTVKVVDELVKVMGRHKPENIVIEMARENQTTQKGQKNSRERMKRIEEGIKELGSQILKEHPVENTQLQNEKLYLYYLQNGRDMYVDQELDINRLSDYDVDHIVPQSFLKDDSIDNKVLTRSDKARGKSDNVPSEEVVKKMKNYWRQLLNAKLITQRKFDNLTKAERGGLSELDKAGFIKRQLVETRQITKHVAQILDSRMNTKYDENDKLIREVKVITLKSKLVSDFRKDFQFYKVREINNYHHAHDAYLNAVVGTALIKKYPKLESEFVYGDYKVYDVRKMIAKSEQEIGKATAKYFFYSNIMNFFKTEITLANGEIRKRPLIETNGETGEIVWDKGRDFATVRKVLSMPQVNIVKKTEVQTGGFSKESILPKRNSDKLIARKKDWDPKKYGGFDSPTVAYSVLVVAKVEKGKSKKLKSVKELLGITIMERSSFEKNPIDFLEAKGYKEVKKDLIIKLPKYSLFELENGRKRMLASAGELQKGNELALPSKYVNFLYLASHYEKLKGSPEDNEQKQLFVEQHKHYLDEIIEQISEFSKRVILADANLDKVLSAYNKHRDKPIREQAENIIHLFTLTNLGAPAAFKYFDTTIDRKRYTSTKEVLDATLIHQSITGLYETRIDLSQLGGDGGPAPGGSGSSGGVLNLEEEYRLHEKPVPSSIDPSWLQLFPTVWAERAGMGLANQVPPVVVELRSGASPVAVRQYPMSKEAREGIRPHIQRFLDLGVLVPCQSPWNTPLLPVKKPGTNDYRPVQDLREINKRVQDIHPTVPNPYNLLSSLPPSHTWYSVLDLKDAFFCLKLHPNSQPLFAFEWRDPEKGNTGQLTWTRLPQGFKNSPTLFNEALHRDLAPFRALNPQVVLLQYVDDLLVAAPTYRDCKEGTQKLLQELSKLGYRVSAKKAQLCQKEVTYLGYLLKEGKRWLTPARKATVMKIPPPTTPRQVREFLGKAGFCRLFIPGFASLAAPLYPLTKPSIPFIWTEEHQKAFDRIKEALLSAPALALPDLTKPFTLYVDERAGVARGVLTQTLGPWRRPVAYLSKKLDPVASGWPTCLKAVAAVALLLKDADKLTLGQNVTVIASHSLESIVRQPPDRWMTNARMTHYQSLLLNERVSFAPPAVLNPATLLPVESEATPVHRCSEILAEETGTRRDLKDQPLPGVPAWYTDGSSFIAEGKRRAGAAIVDGKRTVWASSLPEGTSAQKAELVALTQALRLAEGKDINIYTDSRYAFATAHIHGAIYKQRGWLTSAGKDIKNKEEILALLEAIHLPKRVAIIHCPGHQKGNDPVATGNRRADEAAKQAALSTRVLAETTKPAGKRTADGSEFEKRTADGSEFESPKKKAKVE

SEQ ID NO: 881 - protein, 2089 aa, synthetic construct
MPAAKRVKLDGGDKKYSIGLDIGTNSVGWAVITDEYKVPSKKFKVLGNTDRHSIKKNLIGALLFDSGETAEATRLKRTARRRYTRRKNRICYLQEIFSNEMAKVDDSFFHRLEESFLVEEDKKHERHPIFGNIVDEVAYHEKYPTIYHLRKKLVDSTDKADLRLIYLALAHMIKFRGHFLIEGDLNPDNSDVDKLFIQLVQTYNQLFEENPINASGVDAKAILSARLSKSRRLENLIAQLPGEKKNGLFGNLIALSLGLTPNFKSNFDLAEDAKLQLSKDTYDDDLDNLLAQIGDQYADLFLAAKNLSDAILLSDILRVNTEITKAPLSASMIKRYDEHHQDLTLLKALVRQQLPEKYKEIFFDQSKNGYAGYIDGGASQEEFYKFIKPILEKMDGTEELLVKLNREDLLRKQRTFDNGSIPHQIHLGELHAILRRQEDFYPFLKDNREKIEKILTFRIPYYVGPLARGNSRFAWMTRKSEETITPWNFEEVVDKGASAQSFIERMTNFDKNLPNEKVLPKHSLLYEYFTVYNELTKVKYVTEGMRKPAFLSGEQKKAIVDLLFKTNRKVTVKQLKEDYFKKIECFDSVEISGVEDRFNASLGTYHDLLKIIKDKDFLDNEENEDILEDIVLTLTLFEDREMIEERLKTYAHLFDDKVMKQLKRRRYTGWGRLSRKLINGIRDKQSGKTILDFLKSDGFANRNFMQLIHDDSLTFKEDIQKAQVSGQGDSLHEHIANLAGSPAIKKGILQTVKVVDELVKVMGRHKPENIVIEMARENQTTQKGQKNSRERMKRIEEGIKELGSQILKEHPVENTQLQNEKLYLYYLQNGRDMYVDQELDINRLSDYDVDHIVPQSFLKDDSIDNKVLTRSDKARGKSDNVPSEEVVKKMKNYWRQLLNAKLITQRKFDNLTKAERGGLSELDKAGFIKRQLVETRQITKHVAQILDSRMNTKYDENDKLIREVKVITLKSKLVSDFRKDFQFYKVREINNYHHAHDAYLNAVVGTALIKKYPKLESEFVYGDYKVYDVRKMIAKSEQEIGKATAKYFFYSNIMNFFKTEITLANGEIRKRPLIETNGETGEIVWDKGRDFATVRKVLSMPQVNIVKKTEVQTGGFSKESILPKRNSDKLIARKKDWDPKKYGGFDSPTVAYSVLVVAKVEKGKSKKLKSVKELLGITIMERSSFEKNPIDFLEAKGYKEVKKDLIIKLPKYSLFELENGRKRMLASAGELQKGNELALPSKYVNFLYLASHYEKLKGSPEDNEQKQLFVEQHKHYLDEIIEQISEFSKRVILADANLDKVLSAYNKHRDKPIREQAENIIHLFTLTNLGAPAAFKYFDTTIDRKRYTSTKEVLDATLIHQSITGLYETRIDLSQLGGDGGGGSGSSGGVLNLEEEYRLHEKPVPSSIDPSWLQLFPTVWAERAGMGLANQVPPVVVELRSGASPVAVRQYPMSKEAREGIRPHIQRFLDLGVLVPCQSPWNTPLLPVKKPGTNDYRPVQDLREINKRVQDIHPTVPNPYNLLSSLPPSHTWYSVLDLKDAFFCLKLHPNSQPLFAFEWRDPEKGNTGQLTWTRLPQGFKNSPTLFNEALHRDLAPFRALNPQVVLLQYVDDLLVAAPTYRDCKEGTQKLLQELSKLGYRVSAKKAQLCQKEVTYLGYLLKEGKRWLTPARKATVMKIPPPTTPRQVREFLGKAGFCRLFIPGFASLAAPLYPLTKPSIPFIWTEEHQKAFDRIKEALLSAPALALPDLTKPFTLYVDERAGVARGVLTQTLGPWRRPVAYLSKKLDPVASGWPTCLKAVAAVALLLKDADKLTLGQNVTVIASHSLESIVRQPPDRWMTNARMTHYQSLLLNERVSFAPPAVLNPATLLPVESEATPVHRCSEILAEETGTRRDLKDQPLPGVPAWYTDGSSFIAEGKRRAGAAIVDGKRTVWASSLPEGTSAQKAELVALTQALRLAEGKDINIYTDSRYAFATAHIHGAIYKQRGWLTSAGKDIKNKEEILALLEAIHLPKRVAIIHCPGHQKGNDPVATGNRRADEAAKQAALSTRVLAETTKPAGKRTADGSEFEKRTADGSEFESPKKKAKVE

SEQ ID NO: 882 - protein, 2089 aa, synthetic construct
MPAAKRVKLDGGDKKYSIGLDIGTNSVGWAVITDEYKVPSKKFKVLGNTDRHSIKKNLIGALLFDSGETAEATRLKRTARRRYTRRKNRICYLQEIFSNEMAKVDDSFFHRLEESFLVEEDKKHERHPIFGNIVDEVAYHEKYPTIYHLRKKLVDSTDKADLRLIYLALAHMIKFRGHFLIEGDLNPDNSDVDKLFIQLVQTYNQLFEENPINASGVDAKAILSARLSKSRRLENLIAQLPGEKKNGLFGNLIALSLGLTPNFKSNFDLAEDAKLQLSKDTYDDDLDNLLAQIGDQYADLFLAAKNLSDAILLSDILRVNTEITKAPLSASMIKRYDEHHQDLTLLKALVRQQLPEKYKEIFFDQSKNGYAGYIDGGASQEEFYKFIKPILEKMDGTEELLVKLNREDLLRKQRTFDNGSIPHQIHLGELHAILRRQEDFYPFLKDNREKIEKILTFRIPYYVGPLARGNSRFAWMTRKSEETITPWNFEEVVDKGASAQSFIERMTNFDKNLPNEKVLPKHSLLYEYFTVYNELTKVKYVTEGMRKPAFLSGEQKKAIVDLLFKTNRKVTVKQLKEDYFKKIECFDSVEISGVEDRFNASLGTYHDLLKIIKDKDFLDNEENEDILEDIVLTLTLFEDREMIEERLKTYAHLFDDKVMKQLKRRRYTGWGRLSRKLINGIRDKQSGKTILDFLKSDGFANRNFMQLIHDDSLTFKEDIQKAQVSGQGDSLHEHIANLAGSPAIKKGILQTVKVVDELVKVMGRHKPENIVIEMARENQTTQKGQKNSRERMKRIEEGIKELGSQILKEHPVENTQLQNEKLYLYYLQNGRDMYVDQELDINRLSDYDVDHIVPQSFLKDDSIDNKVLTRSDKARGKSDNVPSEEVVKKMKNYWRQLLNAKLITQRKFDNLTKAERGGLSELDKAGFIKRQLVETRQITKHVAQILDSRMNTKYDENDKLIREVKVITLKSKLVSDFRKDFQFYKVREINNYHHAHDAYLNAVVGTALIKKYPKLESEFVYGDYKVYDVRKMIAKSEQEIGKATAKYFFYSNIMNFFKTEITLANGEIRKRPLIETNGETGEIVWDKGRDFATVRKVLSMPQVNIVKKTEVQTGGFSKESILPKRNSDKLIARKKDWDPKKYGGFDSPTVAYSVLVVAKVEKGKSKKLKSVKELLGITIMERSSFEKNPIDFLEAKGYKEVKKDLIIKLPKYSLFELENGRKRMLASAGELQKGNELALPSKYVNFLYLASHYEKLKGSPEDNEQKQLFVEQHKHYLDEIIEQISEFSKRVILADANLDKVLSAYNKHRDKPIREQAENIIHLFTLTNLGAPAAFKYFDTTIDRKRYTSTKEVLDATLIHQSITGLYETRIDLSQLGGDGGGGGGGGGGVLNLEEEYRLHEKPVPSSIDPSWLQLFPTVWAERAGMGLANQVPPVVVELRSGASPVAVRQYPMSKEAREGIRPHIQRFLDLGVLVPCQSPWNTPLLPVKKPGTNDYRPVQDLREINKRVQDIHPTVPNPYNLLSSLPPSHTWYSVLDLKDAFFCLKLHPNSQPLFAFEWRDPEKGNTGQLTWTRLPQGFKNSPTLFNEALHRDLAPFRALNPQVVLLQYVDDLLVAAPTYRDCKEGTQKLLQELSKLGYRVSAKKAQLCQKEVTYLGYLLKEGKRWLTPARKATVMKIPPPTTPRQVREFLGKAGFCRLFIPGFASLAAPLYPLTKPSIPFIWTEEHQKAFDRIKEALLSAPALALPDLTKPFTLYVDERAGVARGVLTQTLGPWRRPVAYLSKKLDPVASGWPTCLKAVAAVALLLKDADKLTLGQNVTVIASHSLESIVRQPPDRWMTNARMTHYQSLLLNERVSFAPPAVLNPATLLPVESEATPVHRCSEILAEETGTRRDLKDQPLPGVPAWYTDGSSFIAEGKRRAGAAIVDGKRTVWASSLPEGTSAQKAELVALTQALRLAEGKDINIYTDSRYAFATAHIHGAIYKQRGWLTSAGKDIKNKEEILALLEAIHLPKRVAIIHCPGHQKGNDPVATGNRRADEAAKQAALSTRVLAETTKPAGKRTADGSEFEKRTADGSEFESPKKKAKVE

SEQ ID NO: 883 - protein, 2091 aa, synthetic construct
MPAAKRVKLDGGDKKYSIGLDIGTNSVGWAVITDEYKVPSKKFKVLGNTDRHSIKKNLIGALLFDSGETAEATRLKRTARRRYTRRKNRICYLQEIFSNEMAKVDDSFFHRLEESFLVEEDKKHERHPIFGNIVDEVAYHEKYPTIYHLRKKLVDSTDKADLRLIYLALAHMIKFRGHFLIEGDLNPDNSDVDKLFIQLVQTYNQLFEENPINASGVDAKAILSARLSKSRRLENLIAQLPGEKKNGLFGNLIALSLGLTPNFKSNFDLAEDAKLQLSKDTYDDDLDNLLAQIGDQYADLFLAAKNLSDAILLSDILRVNTEITKAPLSASMIKRYDEHHQDLTLLKALVRQQLPEKYKEIFFDQSKNGYAGYIDGGASQEEFYKFIKPILEKMDGTEELLVKLNREDLLRKQRTFDNGSIPHQIHLGELHAILRRQEDFYPFLKDNREKIEKILTFRIPYYVGPLARGNSRFAWMTRKSEETITPWNFEEVVDKGASAQSFIERMTNFDKNLPNEKVLPKHSLLYEYFTVYNELTKVKYVTEGMRKPAFLSGEQKKAIVDLLFKTNRKVTVKQLKEDYFKKIECFDSVEISGVEDRFNASLGTYHDLLKIIKDKDFLDNEENEDILEDIVLTLTLFEDREMIEERLKTYAHLFDDKVMKQLKRRRYTGWGRLSRKLINGIRDKQSGKTILDFLKSDGFANRNFMQLIHDDSLTFKEDIQKAQVSGQGDSLHEHIANLAGSPAIKKGILQTVKVVDELVKVMGRHKPENIVIEMARENQTTQKGQKNSRERMKRIEEGIKELGSQILKEHPVENTQLQNEKLYLYYLQNGRDMYVDQELDINRLSDYDVDHIVPQSFLKDDSIDNKVLTRSDKARGKSDNVPSEEVVKKMKNYWRQLLNAKLITQRKFDNLTKAERGGLSELDKAGFIKRQLVETRQITKHVAQILDSRMNTKYDENDKLIREVKVITLKSKLVSDFRKDFQFYKVREINNYHHAHDAYLNAVVGTALIKKYPKLESEFVYGDYKVYDVRKMIAKSEQEIGKATAKYFFYSNIMNFFKTEITLANGEIRKRPLIETNGETGEIVWDKGRDFATVRKVLSMPQVNIVKKTEVQTGGFSKESILPKRNSDKLIARKKDWDPKKYGGFDSPTVAYSVLVVAKVEKGKSKKLKSVKELLGITIMERSSFEKNPIDFLEAKGYKEVKKDLIIKLPKYSLFELENGRKRMLASAGELQKGNELALPSKYVNFLYLASHYEKLKGSPEDNEQKQLFVEQHKHYLDEIIEQISEFSKRVILADANLDKVLSAYNKHRDKPIREQAENIIHLFTLTNLGAPAAFKYFDTTIDRKRYTSTKEVLDATLIHQSITGLYETRIDLSQLGGDGGGSSEAAAKGGVLNLEEEYRLHEKPVPSSIDPSWLQLFPTVWAERAGMGLANQVPPVVVELRSGASPVAVRQYPMSKEAREGIRPHIQRFLDLGVLVPCQSPWNTPLLPVKKPGTNDYRPVQDLREINKRVQDIHPTVPNPYNLLSSLPPSHTWYSVLDLKDAFFCLKLHPNSQPLFAFEWRDPEKGNTGQLTWTRLPQGFKNSPTLFNEALHRDLAPFRALNPQVVLLQYVDDLLVAAPTYRDCKEGTQKLLQELSKLGYRVSAKKAQLCQKEVTYLGYLLKEGKRWLTPARKATVMKIPPPTTPRQVREFLGKAGFCRLFIPGFASLAAPLYPLTKPSIPFIWTEEHQKAFDRIKEALLSAPALALPDLTKPFTLYVDERAGVARGVLTQTLGPWRRPVAYLSKKLDPVASGWPTCLKAVAAVALLLKDADKLTLGQNVTVIASHSLESIVRQPPDRWMTNARMTHYQSLLLNERVSFAPPAVLNPATLLPVESEATPVHRCSEILAEETGTRRDLKDQPLPGVPAWYTDGSSFIAEGKRRAGAAIVDGKRTVWASSLPEGTSAQKAELVALTQALRLAEGKDINIYTDSRYAFATAHIHGAIYKQRGWLTSAGKDIKNKEEILALLEAIHLPKRVAIIHCPGHQKGNDPVATGNRRADEAAKQAALSTRVLAETTKPAGKRTADGSEFEKRTADGSEFESPKKKAKVE

SEQ ID NO: 884 - protein, 2089 aa, synthetic construct
MPAAKRVKLDGGDKKYSIGLDIGTNSVGWAVITDEYKVPSKKFKVLGNTDRHSIKKNLIGALLFDSGETAEATRLKRTARRRYTRRKNRICYLQEIFSNEMAKVDDSFFHRLEESFLVEEDKKHERHPIFGNIVDEVAYHEKYPTIYHLRKKLVDSTDKADLRLIYLALAHMIKFRGHFLIEGDLNPDNSDVDKLFIQLVQTYNQLFEENPINASGVDAKAILSARLSKSRRLENLIAQLPGEKKNGLFGNLIALSLGLTPNFKSNFDLAEDAKLQLSKDTYDDDLDNLLAQIGDQYADLFLAAKNLSDAILLSDILRVNTEITKAPLSASMIKRYDEHHQDLTLLKALVRQQLPEKYKEIFFDQSKNGYAGYIDGGASQEEFYKFIKPILEKMDGTEELLVKLNREDLLRKQRTFDNGSIPHQIHLGELHAILRRQEDFYPFLKDNREKIEKILTFRIPYYVGPLARGNSRFAWMTRKSEETITPWNFEEVVDKGASAQSFIERMTNFDKNLPNEKVLPKHSLLYEYFTVYNELTKVKYVTEGMRKPAFLSGEQKKAIVDLLFKTNRKVTVKQLKEDYFKKIECFDSVEISGVEDRFNASLGTYHDLLKIIKDKDFLDNEENEDILEDIVLTLTLFEDREMIEERLKTYAHLFDDKVMKQLKRRRYTGWGRLSRKLINGIRDKQSGKTILDFLKSDGFANRNFMQLIHDDSLTFKEDIQKAQVSGQGDSLHEHIANLAGSPAIKKGILQTVKVVDELVKVMGRHKPENIVIEMARENQTTQKGQKNSRERMKRIEEGIKELGSQILKEHPVENTQLQNEKLYLYYLQNGRDMYVDQELDINRLSDYDVDHIVPQSFLKDDSIDNKVLTRSDKARGKSDNVPSEEVVKKMKNYWRQLLNAKLITQRKFDNLTKAERGGLSELDKAGFIKRQLVETRQITKHVAQILDSRMNTKYDENDKLIREVKVITLKSKLVSDFRKDFQFYKVREINNYHHAHDAYLNAVVGTALIKKYPKLESEFVYGDYKVYDVRKMIAKSEQEIGKATAKYFFYSNIMNFFKTEITLANGEIRKRPLIETNGETGEIVWDKGRDFATVRKVLSMPQVNIVKKTEVQTGGFSKESILPKRNSDKLIARKKDWDPKKYGGFDSPTVAYSVLVVAKVEKGKSKKLKSVKELLGITIMERSSFEKNPIDFLEAKGYKEVKKDLIIKLPKYSLFELENGRKRMLASAGELQKGNELALPSKYVNFLYLASHYEKLKGSPEDNEQKQLFVEQHKHYLDEIIEQISEFSKRVILADANLDKVLSAYNKHRDKPIREQAENIIHLFTLTNLGAPAAFKYFDTTIDRKRYTSTKEVLDATLIHQSITGLYETRIDLSQLGGDGGGSSPAPGGVLNLEEEYRLHEKPVPSSIDPSWLQLFPTVWAERAGMGLANQVPPVVVELRSGASPVAVRQYPMSKEAREGIRPHIQRFLDLGVLVPCQSPWNTPLLPVKKPGTNDYRPVQDLREINKRVQDIHPTVPNPYNLLSSLPPSHTWYSVLDLKDAFFCLKLHPNSQPLFAFEWRDPEKGNTGQLTWTRLPQGFKNSPTLFNEALHRDLAPFRALNPQVVLLQYVDDLLVAAPTYRDCKEGTQKLLQELSKLGYRVSAKKAQLCQKEVTYLGYLLKEGKRWLTPARKATVMKIPPPTTPRQVREFLGKAGFCRLFIPGFASLAAPLYPLTKPSIPFIWTEEHQKAFDRIKEALLSAPALALPDLTKPFTLYVDERAGVARGVLTQTLGPWRRPVAYLSKKLDPVASGWPTCLKAVAAVALLLKDADKLTLGQNVTVIASHSLESIVRQPPDRWMTNARMTHYQSLLLNERVSFAPPAVLNPATLLPVESEATPVHRCSEILAEETGTRRDLKDQPLPGVPAWYTDGSSFIAEGKRRAGAAIVDGKRTVWASSLPEGTSAQKAELVALTQALRLAEGKDINIYTDSRYAFATAHIHGAIYKQRGWLTSAGKDIKNKEEILALLEAIHLPKRVAIIHCPGHQKGNDPVATGNRRADEAAKQAALSTRVLAETTKPAGKRTADGSEFEKRTADGSEFESPKKKAKVE

SEQ ID NO: 885 - protein, 2092 aa, synthetic construct
MPAAKRVKLDGGDKKYSIGLDIGTNSVGWAVITDEYKVPSKKFKVLGNTDRHSIKKNLIGALLFDSGETAEATRLKRTARRRYTRRKNRICYLQEIFSNEMAKVDDSFFHRLEESFLVEEDKKHERHPIFGNIVDEVAYHEKYPTIYHLRKKLVDSTDKADLRLIYLALAHMIKFRGHFLIEGDLNPDNSDVDKLFIQLVQTYNQLFEENPINASGVDAKAILSARLSKSRRLENLIAQLPGEKKNGLFGNLIALSLGLTPNFKSNFDLAEDAKLQLSKDTYDDDLDNLLAQIGDQYADLFLAAKNLSDAILLSDILRVNTEITKAPLSASMIKRYDEHHQDLTLLKALVRQQLPEKYKEIFFDQSKNGYAGYIDGGASQEEFYKFIKPILEKMDGTEELLVKLNREDLLRKQRTFDNGSIPHQIHLGELHAILRRQEDFYPFLKDNREKIEKILTFRIPYYVGPLARGNSRFAWMTRKSEETITPWNFEEVVDKGASAQSFIERMTNFDKNLPNEKVLPKHSLLYEYFTVYNELTKVKYVTEGMRKPAFLSGEQKKAIVDLLFKTNRKVTVKQLKEDYFKKIECFDSVEISGVEDRFNASLGTYHDLLKIIKDKDFLDNEENEDILEDIVLTLTLFEDREMIEERLKTYAHLFDDKVMKQLKRRRYTGWGRLSRKLINGIRDKQSGKTILDFLKSDGFANRNFMQLIHDDSLTFKEDIQKAQVSGQGDSLHEHIANLAGSPAIKKGILQTVKVVDELVKVMGRHKPENIVIEMARENQTTQKGQKNSRERMKRIEEGIKELGSQILKEHPVENTQLQNEKLYLYYLQNGRDMYVDQELDINRLSDYDVDHIVPQSFLKDDSIDNKVLTRSDKARGKSDNVPSEEVVKKMKNYWRQLLNAKLITQRKFDNLTKAERGGLSELDKAGFIKRQLVETRQITKHVAQILDSRMNTKYDENDKLIREVKVITLKSKLVSDFRKDFQFYKVREINNYHHAHDAYLNAVVGTALIKKYPKLESEFVYGDYKVYDVRKMIAKSEQEIGKATAKYFFYSNIMNFFKTEITLANGEIRKRPLIETNGETGEIVWDKGRDFATVRKVLSMPQVNIVKKTEVQTGGFSKESILPKRNSDKLIARKKDWDPKKYGGFDSPTVAYSVLVVAKVEKGKSKKLKSVKELLGITIMERSSFEKNPIDFLEAKGYKEVKKDLIIKLPKYSLFELENGRKRMLASAGELQKGNELALPSKYVNFLYLASHYEKLKGSPEDNEQKQLFVEQHKHYLDEIIEQISEFSKRVILADANLDKVLSAYNKHRDKPIREQAENIIHLFTLTNLGAPAAFKYFDTTIDRKRYTSTKEVLDATLIHQSITGLYETRIDLSQLGGDGGGGSGGSGGSGGVLNLEEEYRLHEKPVPSSIDPSWLQLFPTVWAERAGMGLANQVPPVVVELRSGASPVAVRQYPMSKEAREGIRPHIQRFLDLGVLVPCQSPWNTPLLPVKKPGTNDYRPVQDLREINKRVQDIHPTVPNPYNLLSSLPPSHTWYSVLDLKDAFFCLKLHPNSQPLFAFEWRDPEKGNTGQLTWTRLPQGFKNSPTLFNEALHRDLAPFRALNPQVVLLQYVDDLLVAAPTYRDCKEGTQKLLQELSKLGYRVSAKKAQLCQKEVTYLGYLLKEGKRWLTPARKATVMKIPPPTTPRQVREFLGKAGFCRLFIPGFASLAAPLYPLTKPSIPFIWTEEHQKAFDRIKEALLSAPALALPDLTKPFTLYVDERAGVARGVLTQTLGPWRRPVAYLSKKLDPVASGWPTCLKAVAAVALLLKDADKLTLGQNVTVIASHSLESIVRQPPDRWMTNARMTHYQSLLLNERVSFAPPAVLNPATLLPVESEATPVHRCSEILAEETGTRRDLKDQPLPGVPAWYTDGSSFIAEGKRRAGAAIVDGKRTVWASSLPEGTSAQKAELVALTQALRLAEGKDINIYTDSRYAFATAHIHGAIYKQRGWLTSAGKDIKNKEEILALLEAIHLPKRVAIIHCPGHQKGNDPVATGNRRADEAAKQAALSTRVLAETTKPAGKRTADGSEFEKRTADGSEFESPKKKAKVE

SEQ ID NO: 886 - protein, 2095 aa, synthetic construct
MPAAKRVKLDGGDKKYSIGLDIGTNSVGWAVITDEYKVPSKKFKVLGNTDRHSIKKNLIGALLFDSGETAEATRLKRTARRRYTRRKNRICYLQEIFSNEMAKVDDSFFHRLEESFLVEEDKKHERHPIFGNIVDEVAYHEKYPTIYHLRKKLVDSTDKADLRLIYLALAHMIKFRGHFLIEGDLNPDNSDVDKLFIQLVQTYNQLFEENPINASGVDAKAILSARLSKSRRLENLIAQLPGEKKNGLFGNLIALSLGLTPNFKSNFDLAEDAKLQLSKDTYDDDLDNLLAQIGDQYADLFLAAKNLSDAILLSDILRVNTEITKAPLSASMIKRYDEHHQDLTLLKALVRQQLPEKYKEIFFDQSKNGYAGYIDGGASQEEFYKFIKPILEKMDGTEELLVKLNREDLLRKQRTFDNGSIPHQIHLGELHAILRRQEDFYPFLKDNREKIEKILTFRIPYYVGPLARGNSRFAWMTRKSEETITPWNFEEVVDKGASAQSFIERMTNFDKNLPNEKVLPKHSLLYEYFTVYNELTKVKYVTEGMRKPAFLSGEQKKAIVDLLFKTNRKVTVKQLKEDYFKKIECFDSVEISGVEDRFNASLGTYHDLLKIIKDKDFLDNEENEDILEDIVLTLTLFEDREMIEERLKTYAHLFDDKVMKQLKRRRYTGWGRLSRKLINGIRDKQSGKTILDFLKSDGFANRNFMQLIHDDSLTFKEDIQKAQVSGQGDSLHEHIANLAGSPAIKKGILQTVKVVDELVKVMGRHKPENIVIEMARENQTTQKGQKNSRERMKRIEEGIKELGSQILKEHPVENTQLQNEKLYLYYLQNGRDMYVDQELDINRLSDYDVDHIVPQSFLKDDSIDNKVLTRSDKARGKSDNVPSEEVVKKMKNYWRQLLNAKLITQRKFDNLTKAERGGLSELDKAGFIKRQLVETRQITKHVAQILDSRMNTKYDENDKLIREVKVITLKSKLVSDFRKDFQFYKVREINNYHHAHDAYLNAVVGTALIKKYPKLESEFVYGDYKVYDVRKMIAKSEQEIGKATAKYFFYSNIMNFFKTEITLANGEIRKRPLIETNGETGEIVWDKGRDFATVRKVLSMPQVNIVKKTEVQTGGFSKESILPKRNSDKLIARKKDWDPKKYGGFDSPTVAYSVLVVAKVEKGKSKKLKSVKELLGITIMERSSFEKNPIDFLEAKGYKEVKKDLIIKLPKYSLFELENGRKRMLASAGELQKGNELALPSKYVNFLYLASHYEKLKGSPEDNEQKQLFVEQHKHYLDEIIEQISEFSKRVILADANLDKVLSAYNKHRDKPIREQAENIIHLFTLTNLGAPAAFKYFDTTIDRKRYTSTKEVLDATLIHQSITGLYETRIDLSQLGGDGGGGSGGSGGSGGSGGVLNLEEEYRLHEKPVPSSIDPSWLQLFPTVWAERAGMGLANQVPPVVVELRSGASPVAVRQYPMSKEAREGIRPHIQRFLDLGVLVPCQSPWNTPLLPVKKPGTNDYRPVQDLREINKRVQDIHPTVPNPYNLLSSLPPSHTWYSVLDLKDAFFCLKLHPNSQPLFAFEWRDPEKGNTGQLTWTRLPQGFKNSPTLFNEALHRDLAPFRALNPQVVLLQYVDDLLVAAPTYRDCKEGTQKLLQELSKLGYRVSAKKAQLCQKEVTYLGYLLKEGKRWLTPARKATVMKIPPPTTPRQVREFLGKAGFCRLFIPGFASLAAPLYPLTKPSIPFIWTEEHQKAFDRIKEALLSAPALALPDLTKPFTLYVDERAGVARGVLTQTLGPWRRPVAYLSKKLDPVASGWPTCLKAVAAVALLLKDADKLTLGQNVTVIASHSLESIVRQPPDRWMTNARMTHYQSLLLNERVSFAPPAVLNPATLLPVESEATPVHRCSEILAEETGTRRDLKDQPLPGVPAWYTDGSSFIAEGKRRAGAAIVDGKRTVWASSLPEGTSAQKAELVALTQALRLAEGKDINIYTDSRYAFATAHIHGAIYKQRGWLTSAGKDIKNKEEILALLEAIHLPKRVAIIHCPGHQKGNDPVATGNRRADEAAKQAALSTRVLAETTKPAGKRTADGSEFEKRTADGSEFESPKKKAKVE

SEQ ID NO: 887 - protein, 2095 aa, synthetic construct
MPAAKRVKLDGGDKKYSIGLDIGTNSVGWAVITDEYKVPSKKFKVLGNTDRHSIKKNLIGALLFDSGETAEATRLKRTARRRYTRRKNRICYLQEIFSNEMAKVDDSFFHRLEESFLVEEDKKHERHPIFGNIVDEVAYHEKYPTIYHLRKKLVDSTDKADLRLIYLALAHMIKFRGHFLIEGDLNPDNSDVDKLFIQLVQTYNQLFEENPINASGVDAKAILSARLSKSRRLENLIAQLPGEKKNGLFGNLIALSLGLTPNFKSNFDLAEDAKLQLSKDTYDDDLDNLLAQIGDQYADLFLAAKNLSDAILLSDILRVNTEITKAPLSASMIKRYDEHHQDLTLLKALVRQQLPEKYKEIFFDQSKNGYAGYIDGGASQEEFYKFIKPILEKMDGTEELLVKLNREDLLRKQRTFDNGSIPHQIHLGELHAILRRQEDFYPFLKDNREKIEKILTFRIPYYVGPLARGNSRFAWMTRKSEETITPWNFEEVVDKGASAQSFIERMTNFDKNLPNEKVLPKHSLLYEYFTVYNELTKVKYVTEGMRKPAFLSGEQKKAIVDLLFKTNRKVTVKQLKEDYFKKIECFDSVEISGVEDRFNASLGTYHDLLKIIKDKDFLDNEENEDILEDIVLTLTLFEDREMIEERLKTYAHLFDDKVMKQLKRRRYTGWGRLSRKLINGIRDKQSGKTILDFLKSDGFANRNFMQLIHDDSLTFKEDIQKAQVSGQGDSLHEHIANLAGSPAIKKGILQTVKVVDELVKVMGRHKPENIVIEMARENQTTQKGQKNSRERMKRIEEGIKELGSQILKEHPVENTQLQNEKLYLYYLQNGRDMYVDQELDINRLSDYDVDHIVPQSFLKDDSIDNKVLTRSDKARGKSDNVPSEEVVKKMKNYWRQLLNAKLITQRKFDNLTKAERGGLSELDKAGFIKRQLVETRQITKHVAQILDSRMNTKYDENDKLIREVKVITLKSKLVSDFRKDFQFYKVREINNYHHAHDAYLNAVVGTALIKKYPKLESEFVYGDYKVYDVRKMIAKSEQEIGKATAKYFFYSNIMNFFKTEITLANGEIRKRPLIETNGETGEIVWDKGRDFATVRKVLSMPQVNIVKKTEVQTGGFSKESILPKRNSDKLIARKKDWDPKKYGGFDSPTVAYSVLVVAKVEKGKSKKLKSVKELLGITIMERSSFEKNPIDFLEAKGYKEVKKDLIIKLPKYSLFELENGRKRMLASAGELQKGNELALPSKYVNFLYLASHYEKLKGSPEDNEQKQLFVEQHKHYLDEIIEQISEFSKRVILADANLDKVLSAYNKHRDKPIREQAENIIHLFTLTNLGAPAAFKYFDTTIDRKRYTSTKEVLDATLIHQSITGLYETRIDLSQLGGDGGGSSGSSGSSGSSGGVLNLEEEYRLHEKPVPSSIDPSWLQLFPTVWAERAGMGLANQVPPVVVELRSGASPVAVRQYPMSKEAREGIRPHIQRFLDLGVLVPCQSPWNTPLLPVKKPGTNDYRPVQDLREINKRVQDIHPTVPNPYNLLSSLPPSHTWYSVLDLKDAFFCLKLHPNSQPLFAFEWRDPEKGNTGQLTWTRLPQGFKNSPTLFNEALHRDLAPFRALNPQVVLLQYVDDLLVAAPTYRDCKEGTQKLLQELSKLGYRVSAKKAQLCQKEVTYLGYLLKEGKRWLTPARKATVMKIPPPTTPRQVREFLGKAGFCRLFIPGFASLAAPLYPLTKPSIPFIWTEEHQKAFDRIKEALLSAPALALPDLTKPFTLYVDERAGVARGVLTQTLGPWRRPVAYLSKKLDPVASGWPTCLKAVAAVALLLKDADKLTLGQNVTVIASHSLESIVRQPPDRWMTNARMTHYQSLLLNERVSFAPPAVLNPATLLPVESEATPVHRCSEILAEETGTRRDLKDQPLPGVPAWYTDGSSFIAEGKRRAGAAIVDGKRTVWASSLPEGTSAQKAELVALTQALRLAEGKDINIYTDSRYAFATAHIHGAIYKQRGWLTSAGKDIKNKEEILALLEAIHLPKRVAIIHCPGHQKGNDPVATGNRRADEAAKQAALSTRVLAETTKPAGKRTADGSEFEKRTADGSEFESPKKKAKVE

SEQ ID NO: 888 - protein, 2092 aa, synthetic construct
MPAAKRVKLDGGDKKYSIGLDIGTNSVGWAVITDEYKVPSKKFKVLGNTDRHSIKKNLIGALLFDSGETAEATRLKRTARRRYTRRKNRICYLQEIFSNEMAKVDDSFFHRLEESFLVEEDKKHERHPIFGNIVDEVAYHEKYPTIYHLRKKLVDSTDKADLRLIYLALAHMIKFRGHFLIEGDLNPDNSDVDKLFIQLVQTYNQLFEENPINASGVDAKAILSARLSKSRRLENLIAQLPGEKKNGLFGNLIALSLGLTPNFKSNFDLAEDAKLQLSKDTYDDDLDNLLAQIGDQYADLFLAAKNLSDAILLSDILRVNTEITKAPLSASMIKRYDEHHQDLTLLKALVRQQLPEKYKEIFFDQSKNGYAGYIDGGASQEEFYKFIKPILEKMDGTEELLVKLNREDLLRKQRTFDNGSIPHQIHLGELHAILRRQEDFYPFLKDNREKIEKILTFRIPYYVGPLARGNSRFAWMTRKSEETITPWNFEEVVDKGASAQSFIERMTNFDKNLPNEKVLPKHSLLYEYFTVYNELTKVKYVTEGMRKPAFLSGEQKKAIVDLLFKTNRKVTVKQLKEDYFKKIECFDSVEISGVEDRFNASLGTYHDLLKIIKDKDFLDNEENEDILEDIVLTLTLFEDREMIEERLKTYAHLFDDKVMKQLKRRRYTGWGRLSRKLINGIRDKQSGKTILDFLKSDGFANRNFMQLIHDDSLTFKEDIQKAQVSGQGDSLHEHIANLAGSPAIKKGILQTVKVVDELVKVMGRHKPENIVIEMARENQTTQKGQKNSRERMKRIEEGIKELGSQILKEHPVENTQLQNEKLYLYYLQNGRDMYVDQELDINRLSDYDVDHIVPQSFLKDDSIDNKVLTRSDKARGKSDNVPSEEVVKKMKNYWRQLLNAKLITQRKFDNLTKAERGGLSELDKAGFIKRQLVETRQITKHVAQILDSRMNTKYDENDKLIREVKVITLKSKLVSDFRKDFQFYKVREINNYHHAHDAYLNAVVGTALIKKYPKLESEFVYGDYKVYDVRKMIAKSEQEIGKATAKYFFYSNIMNFFKTEITLANGEIRKRPLIETNGETGEIVWDKGRDFATVRKVLSMPQVNIVKKTEVQTGGFSKESILPKRNSDKLIARKKDWDPKKYGGFDSPTVAYSVLVVAKVEKGKSKKLKSVKELLGITIMERSSFEKNPIDFLEAKGYKEVKKDLIIKLPKYSLFELENGRKRMLASAGELQKGNELALPSKYVNFLYLASHYEKLKGSPEDNEQKQLFVEQHKHYLDEIIEQISEFSKRVILADANLDKVLSAYNKHRDKPIREQAENIIHLFTLTNLGAPAAFKYFDTTIDRKRYTSTKEVLDATLIHQSITGLYETRIDLSQLGGDGGGGGGSSPAPGGVLNLEEEYRLHEKPVPSSIDPSWLQLFPTVWAERAGMGLANQVPPVVVELRSGASPVAVRQYPMSKEAREGIRPHIQRFLDLGVLVPCQSPWNTPLLPVKKPGTNDYRPVQDLREINKRVQDIHPTVPNPYNLLSSLPPSHTWYSVLDLKDAFFCLKLHPNSQPLFAFEWRDPEKGNTGQLTWTRLPQGFKNSPTLFNEALHRDLAPFRALNPQVVLLQYVDDLLVAAPTYRDCKEGTQKLLQELSKLGYRVSAKKAQLCQKEVTYLGYLLKEGKRWLTPARKATVMKIPPPTTPRQVREFLGKAGFCRLFIPGFASLAAPLYPLTKPSIPFIWTEEHQKAFDRIKEALLSAPALALPDLTKPFTLYVDERAGVARGVLTQTLGPWRRPVAYLSKKLDPVASGWPTCLKAVAAVALLLKDADKLTLGQNVTVIASHSLESIVRQPPDRWMTNARMTHYQSLLLNERVSFAPPAVLNPATLLPVESEATPVHRCSEILAEETGTRRDLKDQPLPGVPAWYTDGSSFIAEGKRRAGAAIVDGKRTVWASSLPEGTSAQKAELVALTQALRLAEGKDINIYTDSRYAFATAHIHGAIYKQRGWLTSAGKDIKNKEEILALLEAIHLPKRVAIIHCPGHQKGNDPVATGNRRADEAAKQAALSTRVLAETTKPAGKRTADGSEFEKRTADGSEFESPKKKAKVE

SEQ ID NO: 889 - protein, 2092 aa, synthetic construct
MPAAKRVKLDGGDKKYSIGLDIGTNSVGWAVITDEYKVPSKKFKVLGNTDRHSIKKNLIGALLFDSGETAEATRLKRTARRRYTRRKNRICYLQEIFSNEMAKVDDSFFHRLEESFLVEEDKKHERHPIFGNIVDEVAYHEKYPTIYHLRKKLVDSTDKADLRLIYLALAHMIKFRGHFLIEGDLNPDNSDVDKLFIQLVQTYNQLFEENPINASGVDAKAILSARLSKSRRLENLIAQLPGEKKNGLFGNLIALSLGLTPNFKSNFDLAEDAKLQLSKDTYDDDLDNLLAQIGDQYADLFLAAKNLSDAILLSDILRVNTEITKAPLSASMIKRYDEHHQDLTLLKALVRQQLPEKYKEIFFDQSKNGYAGYIDGGASQEEFYKFIKPILEKMDGTEELLVKLNREDLLRKQRTFDNGSIPHQIHLGELHAILRRQEDFYPFLKDNREKIEKILTFRIPYYVGPLARGNSRFAWMTRKSEETITPWNFEEVVDKGASAQSFIERMTNFDKNLPNEKVLPKHSLLYEYFTVYNELTKVKYVTEGMRKPAFLSGEQKKAIVDLLFKTNRKVTVKQLKEDYFKKIECFDSVEISGVEDRFNASLGTYHDLLKIIKDKDFLDNEENEDILEDIVLTLTLFEDREMIEERLKTYAHLFDDKVMKQLKRRRYTGWGRLSRKLINGIRDKQSGKTILDFLKSDGFANRNFMQLIHDDSLTFKEDIQKAQVSGQGDSLHEHIANLAGSPAIKKGILQTVKVVDELVKVMGRHKPENIVIEMARENQTTQKGQKNSRERMKRIEEGIKELGSQILKEHPVENTQLQNEKLYLYYLQNGRDMYVDQELDINRLSDYDVDHIVPQSFLKDDSIDNKVLTRSDKARGKSDNVPSEEVVKKMKNYWRQLLNAKLITQRKFDNLTKAERGGLSELDKAGFIKRQLVETRQITKHVAQILDSRMNTKYDENDKLIREVKVITLKSKLVSDFRKDFQFYKVREINNYHHAHDAYLNAVVGTALIKKYPKLESEFVYGDYKVYDVRKMIAKSEQEIGKATAKYFFYSNIMNFFKTEITLANGEIRKRPLIETNGETGEIVWDKGRDFATVRKVLSMPQVNIVKKTEVQTGGFSKESILPKRNSDKLIARKKDWDPKKYGGFDSPTVAYSVLVVAKVEKGKSKKLKSVKELLGITIMERSSFEKNPIDFLEAKGYKEVKKDLIIKLPKYSLFELENGRKRMLASAGELQKGNELALPSKYVNFLYLASHYEKLKGSPEDNEQKQLFVEQHKHYLDEIIEQISEFSKRVILADANLDKVLSAYNKHRDKPIREQAENIIHLFTLTNLGAPAAFKYFDTTIDRKRYTSTKEVLDATLIHQSITGLYETRIDLSQLGGDGGPAPGGSGGGGGVLNLEEEYRLHEKPVPSSIDPSWLQLFPTVWAERAGMGLANQVPPVVVELRSGASPVAVRQYPMSKEAREGIRPHIQRFLDLGVLVPCQSPWNTPLLPVKKPGTNDYRPVQDLREINKRVQDIHPTVPNPYNLLSSLPPSHTWYSVLDLKDAFFCLKLHPNSQPLFAFEWRDPEKGNTGQLTWTRLPQGFKNSPTLFNEALHRDLAPFRALNPQVVLLQYVDDLLVAAPTYRDCKEGTQKLLQELSKLGYRVSAKKAQLCQKEVTYLGYLLKEGKRWLTPARKATVMKIPPPTTPRQVREFLGKAGFCRLFIPGFASLAAPLYPLTKPSIPFIWTEEHQKAFDRIKEALLSAPALALPDLTKPFTLYVDERAGVARGVLTQTLGPWRRPVAYLSKKLDPVASGWPTCLKAVAAVALLLKDADKLTLGQNVTVIASHSLESIVRQPPDRWMTNARMTHYQSLLLNERVSFAPPAVLNPATLLPVESEATPVHRCSEILAEETGTRRDLKDQPLPGVPAWYTDGSSFIAEGKRRAGAAIVDGKRTVWASSLPEGTSAQKAELVALTQALRLAEGKDINIYTDSRYAFATAHIHGAIYKQRGWLTSAGKDIKNKEEILALLEAIHLPKRVAIIHCPGHQKGNDPVATGNRRADEAAKQAALSTRVLAETTKPAGKRTADGSEFEKRTADGSEFESPKKKAKVE

SEQ ID NO: 890 - protein, 2096 aa, synthetic construct
MPAAKRVKLDGGDKKYSIGLDIGTNSVGWAVITDEYKVPSKKFKVLGNTDRHSIKKNLIGALLFDSGETAEATRLKRTARRRYTRRKNRICYLQEIFSNEMAKVDDSFFHRLEESFLVEEDKKHERHPIFGNIVDEVAYHEKYPTIYHLRKKLVDSTDKADLRLIYLALAHMIKFRGHFLIEGDLNPDNSDVDKLFIQLVQTYNQLFEENPINASGVDAKAILSARLSKSRRLENLIAQLPGEKKNGLFGNLIALSLGLTPNFKSNFDLAEDAKLQLSKDTYDDDLDNLLAQIGDQYADLFLAAKNLSDAILLSDILRVNTEITKAPLSASMIKRYDEHHQDLTLLKALVRQQLPEKYKEIFFDQSKNGYAGYIDGGASQEEFYKFIKPILEKMDGTEELLVKLNREDLLRKQRTFDNGSIPHQIHLGELHAILRRQEDFYPFLKDNREKIEKILTFRIPYYVGPLARGNSRFAWMTRKSEETITPWNFEEVVDKGASAQSFIERMTNFDKNLPNEKVLPKHSLLYEYFTVYNELTKVKYVTEGMRKPAFLSGEQKKAIVDLLFKTNRKVTVKQLKEDYFKKIECFDSVEISGVEDRFNASLGTYHDLLKIIKDKDFLDNEENEDILEDIVLTLTLFEDREMIEERLKTYAHLFDDKVMKQLKRRRYTGWGRLSRKLINGIRDKQSGKTILDFLKSDGFANRNFMQLIHDDSLTFKEDIQKAQVSGQGDSLHEHIANLAGSPAIKKGILQTVKVVDELVKVMGRHKPENIVIEMARENQTTQKGQKNSRERMKRIEEGIKELGSQILKEHPVENTQLQNEKLYLYYLQNGRDMYVDQELDINRLSDYDVDHIVPQSFLKDDSIDNKVLTRSDKARGKSDNVPSEEVVKKMKNYWRQLLNAKLITQRKFDNLTKAERGGLSELDKAGFIKRQLVETRQITKHVAQILDSRMNTKYDENDKLIREVKVITLKSKLVSDFRKDFQFYKVREINNYHHAHDAYLNAVVGTALIKKYPKLESEFVYGDYKVYDVRKMIAKSEQEIGKATAKYFFYSNIMNFFKTEITLANGEIRKRPLIETNGETGEIVWDKGRDFATVRKVLSMPQVNIVKKTEVQTGGFSKESILPKRNSDKLIARKKDWDPKKYGGFDSPTVAYSVLVVAKVEKGKSKKLKSVKELLGITIMERSSFEKNPIDFLEAKGYKEVKKDLIIKLPKYSLFELENGRKRMLASAGELQKGNELALPSKYVNFLYLASHYEKLKGSPEDNEQKQLFVEQHKHYLDEIIEQISEFSKRVILADANLDKVLSAYNKHRDKPIREQAENIIHLFTLTNLGAPAAFKYFDTTIDRKRYTSTKEVLDATLIHQSITGLYETRIDLSQLGGDGGPAPAPAPAPAPAPGGVLNLEEEYRLHEKPVPSSIDPSWLQLFPTVWAERAGMGLANQVPPVVVELRSGASPVAVRQYPMSKEAREGIRPHIQRFLDLGVLVPCQSPWNTPLLPVKKPGTNDYRPVQDLREINKRVQDIHPTVPNPYNLLSSLPPSHTWYSVLDLKDAFFCLKLHPNSQPLFAFEWRDPEKGNTGQLTWTRLPQGFKNSPTLFNEALHRDLAPFRALNPQVVLLQYVDDLLVAAPTYRDCKEGTQKLLQELSKLGYRVSAKKAQLCQKEVTYLGYLLKEGKRWLTPARKATVMKIPPPTTPRQVREFLGKAGFCRLFIPGFASLAAPLYPLTKPSIPFIWTEEHQKAFDRIKEALLSAPALALPDLTKPFTLYVDERAGVARGVLTQTLGPWRRPVAYLSKKLDPVASGWPTCLKAVAAVALLLKDADKLTLGQNVTVIASHSLESIVRQPPDRWMTNARMTHYQSLLLNERVSFAPPAVLNPATLLPVESEATPVHRCSEILAEETGTRRDLKDQPLPGVPAWYTDGSSFIAEGKRRAGAAIVDGKRTVWASSLPEGTSAQKAELVALTQALRLAEGKDINIYTDSRYAFATAHIHGAIYKQRGWLTSAGKDIKNKEEILALLEAIHLPKRVAIIHCPGHQKGNDPVATGNRRADEAAKQAALSTRVLAETTKPAGKRTADGSEFEKRTADGSEFESPKKKAKVE

SEQ ID NO: 891 - protein, 2094 aa, synthetic construct
MPAAKRVKLDGGDKKYSIGLDIGTNSVGWAVITDEYKVPSKKFKVLGNTDRHSIKKNLIGALLFDSGETAEATRLKRTARRRYTRRKNRICYLQEIFSNEMAKVDDSFFHRLEESFLVEEDKKHERHPIFGNIVDEVAYHEKYPTIYHLRKKLVDSTDKADLRLIYLALAHMIKFRGHFLIEGDLNPDNSDVDKLFIQLVQTYNQLFEENPINASGVDAKAILSARLSKSRRLENLIAQLPGEKKNGLFGNLIALSLGLTPNFKSNFDLAEDAKLQLSKDTYDDDLDNLLAQIGDQYADLFLAAKNLSDAILLSDILRVNTEITKAPLSASMIKRYDEHHQDLTLLKALVRQQLPEKYKEIFFDQSKNGYAGYIDGGASQEEFYKFIKPILEKMDGTEELLVKLNREDLLRKQRTFDNGSIPHQIHLGELHAILRRQEDFYPFLKDNREKIEKILTFRIPYYVGPLARGNSRFAWMTRKSEETITPWNFEEVVDKGASAQSFIERMTNFDKNLPNEKVLPKHSLLYEYFTVYNELTKVKYVTEGMRKPAFLSGEQKKAIVDLLFKTNRKVTVKQLKEDYFKKIECFDSVEISGVEDRFNASLGTYHDLLKIIKDKDFLDNEENEDILEDIVLTLTLFEDREMIEERLKTYAHLFDDKVMKQLKRRRYTGWGRLSRKLINGIRDKQSGKTILDFLKSDGFANRNFMQLIHDDSLTFKEDIQKAQVSGQGDSLHEHIANLAGSPAIKKGILQTVKVVDELVKVMGRHKPENIVIEMARENQTTQKGQKNSRERMKRIEEGIKELGSQILKEHPVENTQLQNEKLYLYYLQNGRDMYVDQELDINRLSDYDVDHIVPQSFLKDDSIDNKVLTRSDKARGKSDNVPSEEVVKKMKNYWRQLLNAKLITQRKFDNLTKAERGGLSELDKAGFIKRQLVETRQITKHVAQILDSRMNTKYDENDKLIREVKVITLKSKLVSDFRKDFQFYKVREINNYHHAHDAYLNAVVGTALIKKYPKLESEFVYGDYKVYDVRKMIAKSEQEIGKATAKYFFYSNIMNFFKTEITLANGEIRKRPLIETNGETGEIVWDKGRDFATVRKVLSMPQVNIVKKTEVQTGGFSKESILPKRNSDKLIARKKDWDPKKYGGFDSPTVAYSVLVVAKVEKGKSKKLKSVKELLGITIMERSSFEKNPIDFLEAKGYKEVKKDLIIKLPKYSLFELENGRKRMLASAGELQKGNELALPSKYVNFLYLASHYEKLKGSPEDNEQKQLFVEQHKHYLDEIIEQISEFSKRVILADANLDKVLSAYNKHRDKPIREQAENIIHLFTLTNLGAPAAFKYFDTTIDRKRYTSTKEVLDATLIHQSITGLYETRIDLSQLGGDGGEAAAKGSSGGGGGVLNLEEEYRLHEKPVPSSIDPSWLQLFPTVWAERAGMGLANQVPPVVVELRSGASPVAVRQYPMSKEAREGIRPHIQRFLDLGVLVPCQSPWNTPLLPVKKPGTNDYRPVQDLREINKRVQDIHPTVPNPYNLLSSLPPSHTWYSVLDLKDAFFCLKLHPNSQPLFAFEWRDPEKGNTGQLTWTRLPQGFKNSPTLFNEALHRDLAPFRALNPQVVLLQYVDDLLVAAPTYRDCKEGTQKLLQELSKLGYRVSAKKAQLCQKEVTYLGYLLKEGKRWLTPARKATVMKIPPPTTPRQVREFLGKAGFCRLFIPGFASLAAPLYPLTKPSIPFIWTEEHQKAFDRIKEALLSAPALALPDLTKPFTLYVDERAGVARGVLTQTLGPWRRPVAYLSKKLDPVASGWPTCLKAVAAVALLLKDADKLTLGQNVTVIASHSLESIVRQPPDRWMTNARMTHYQSLLLNERVSFAPPAVLNPATLLPVESEATPVHRCSEILAEETGTRRDLKDQPLPGVPAWYTDGSSFIAEGKRRAGAAIVDGKRTVWASSLPEGTSAQKAELVALTQALRLAEGKDINIYTDSRYAFATAHIHGAIYKQRGWLTSAGKDIKNKEEILALLEAIHLPKRVAIIHCPGHQKGNDPVATGNRRADEAAKQAALSTRVLAETTKPAGKRTADGSEFEKRTADGSEFESPKKKAKVE

SEQ ID NO: 892 - protein, 2094 aa, synthetic construct
MPAAKRVKLDGGDKKYSIGLDIGTNSVGWAVITDEYKVPSKKFKVLGNTDRHSIKKNLIGALLFDSGETAEATRLKRTARRRYTRRKNRICYLQEIFSNEMAKVDDSFFHRLEESFLVEEDKKHERHPIFGNIVDEVAYHEKYPTIYHLRKKLVDSTDKADLRLIYLALAHMIKFRGHFLIEGDLNPDNSDVDKLFIQLVQTYNQLFEENPINASGVDAKAILSARLSKSRRLENLIAQLPGEKKNGLFGNLIALSLGLTPNFKSNFDLAEDAKLQLSKDTYDDDLDNLLAQIGDQYADLFLAAKNLSDAILLSDILRVNTEITKAPLSASMIKRYDEHHQDLTLLKALVRQQLPEKYKEIFFDQSKNGYAGYIDGGASQEEFYKFIKPILEKMDGTEELLVKLNREDLLRKQRTFDNGSIPHQIHLGELHAILRRQEDFYPFLKDNREKIEKILTFRIPYYVGPLARGNSRFAWMTRKSEETITPWNFEEVVDKGASAQSFIERMTNFDKNLPNEKVLPKHSLLYEYFTVYNELTKVKYVTEGMRKPAFLSGEQKKAIVDLLFKTNRKVTVKQLKEDYFKKIECFDSVEISGVEDRFNASLGTYHDLLKIIKDKDFLDNEENEDILEDIVLTLTLFEDREMIEERLKTYAHLFDDKVMKQLKRRRYTGWGRLSRKLINGIRDKQSGKTILDFLKSDGFANRNFMQLIHDDSLTFKEDIQKAQVSGQGDSLHEHIANLAGSPAIKKGILQTVKVVDELVKVMGRHKPENIVIEMARENQTTQKGQKNSRERMKRIEEGIKELGSQILKEHPVENTQLQNEKLYLYYLQNGRDMYVDQELDINRLSDYDVDHIVPQSFLKDDSIDNKVLTRSDKARGKSDNVPSEEVVKKMKNYWRQLLNAKLITQRKFDNLTKAERGGLSELDKAGFIKRQLVETRQITKHVAQILDSRMNTKYDENDKLIREVKVITLKSKLVSDFRKDFQFYKVREINNYHHAHDAYLNAVVGTALIKKYPKLESEFVYGDYKVYDVRKMIAKSEQEIGKATAKYFFYSNIMNFFKTEITLANGEIRKRPLIETNGETGEIVWDKGRDFATVRKVLSMPQVNIVKKTEVQTGGFSKESILPKRNSDKLIARKKDWDPKKYGGFDSPTVAYSVLVVAKVEKGKSKKLKSVKELLGITIMERSSFEKNPIDFLEAKGYKEVKKDLIIKLPKYSLFELENGRKRMLASAGELQKGNELALPSKYVNFLYLASHYEKLKGSPEDNEQKQLFVEQHKHYLDEIIEQISEFSKRVILADANLDKVLSAYNKHRDKPIREQAENIIHLFTLTNLGAPAAFKYFDTTIDRKRYTSTKEVLDATLIHQSITGLYETRIDLSQLGGDGGPAPEAAAKGSSGGVLNLEEEYRLHEKPVPSSIDPSWLQLFPTVWAERAGMGLANQVPPVVVELRSGASPVAVRQYPMSKEAREGIRPHIQRFLDLGVLVPCQSPWNTPLLPVKKPGTNDYRPVQDLREINKRVQDIHPTVPNPYNLLSSLPPSHTWYSVLDLKDAFFCLKLHPNSQPLFAFEWRDPEKGNTGQLTWTRLPQGFKNSPTLFNEALHRDLAPFRALNPQVVLLQYVDDLLVAAPTYRDCKEGTQKLLQELSKLGYRVSAKKAQLCQKEVTYLGYLLKEGKRWLTPARKATVMKIPPPTTPRQVREFLGKAGFCRLFIPGFASLAAPLYPLTKPSIPFIWTEEHQKAFDRIKEALLSAPALALPDLTKPFTLYVDERAGVARGVLTQTLGPWRRPVAYLSKKLDPVASGWPTCLKAVAAVALLLKDADKLTLGQNVTVIASHSLESIVRQPPDRWMTNARMTHYQSLLLNERVSFAPPAVLNPATLLPVESEATPVHRCSEILAEETGTRRDLKDQPLPGVPAWYTDGSSFIAEGKRRAGAAIVDGKRTVWASSLPEGTSAQKAELVALTQALRLAEGKDINIYTDSRYAFATAHIHGAIYKQRGWLTSAGKDIKNKEEILALLEAIHLPKRVAIIHCPGHQKGNDPVATGNRRADEAAKQAALSTRVLAETTKPAGKRTADGSEFEKRTADGSEFESPKKKAKVE

SEQ ID NO: 893 - protein, 2113 aa, synthetic construct
MPAAKRVKLDGGDKKYSIGLDIGTNSVGWAVITDEYKVPSKKFKVLGNTDRHSIKKNLIGALLFDSGETAEATRLKRTARRRYTRRKNRICYLQEIFSNEMAKVDDSFFHRLEESFLVEEDKKHERHPIFGNIVDEVAYHEKYPTIYHLRKKLVDSTDKADLRLIYLALAHMIKFRGHFLIEGDLNPDNSDVDKLFIQLVQTYNQLFEENPINASGVDAKAILSARLSKSRRLENLIAQLPGEKKNGLFGNLIALSLGLTPNFKSNFDLAEDAKLQLSKDTYDDDLDNLLAQIGDQYADLFLAAKNLSDAILLSDILRVNTEITKAPLSASMIKRYDEHHQDLTLLKALVRQQLPEKYKEIFFDQSKNGYAGYIDGGASQEEFYKFIKPILEKMDGTEELLVKLNREDLLRKQRTFDNGSIPHQIHLGELHAILRRQEDFYPFLKDNREKIEKILTFRIPYYVGPLARGNSRFAWMTRKSEETITPWNFEEVVDKGASAQSFIERMTNFDKNLPNEKVLPKHSLLYEYFTVYNELTKVKYVTEGMRKPAFLSGEQKKAIVDLLFKTNRKVTVKQLKEDYFKKIECFDSVEISGVEDRFNASLGTYHDLLKIIKDKDFLDNEENEDILEDIVLTLTLFEDREMIEERLKTYAHLFDDKVMKQLKRRRYTGWGRLSRKLINGIRDKQSGKTILDFLKSDGFANRNFMQLIHDDSLTFKEDIQKAQVSGQGDSLHEHIANLAGSPAIKKGILQTVKVVDELVKVMGRHKPENIVIEMARENQTTQKGQKNSRERMKRIEEGIKELGSQILKEHPVENTQLQNEKLYLYYLQNGRDMYVDQELDINRLSDYDVDHIVPQSFLKDDSIDNKVLTRSDKARGKSDNVPSEEVVKKMKNYWRQLLNAKLITQRKFDNLTKAERGGLSELDKAGFIKRQLVETRQITKHVAQILDSRMNTKYDENDKLIREVKVITLKSKLVSDFRKDFQFYKVREINNYHHAHDAYLNAVVGTALIKKYPKLESEFVYGDYKVYDVRKMIAKSEQEIGKATAKYFFYSNIMNFFKTEITLANGEIRKRPLIETNGETGEIVWDKGRDFATVRKVLSMPQVNIVKKTEVQTGGFSKESILPKRNSDKLIARKKDWDPKKYGGFDSPTVAYSVLVVAKVEKGKSKKLKSVKELLGITIMERSSFEKNPIDFLEAKGYKEVKKDLIIKLPKYSLFELENGRKRMLASAGELQKGNELALPSKYVNFLYLASHYEKLKGSPEDNEQKQLFVEQHKHYLDEIIEQISEFSKRVILADANLDKVLSAYNKHRDKPIREQAENIIHLFTLTNLGAPAAFKYFDTTIDRKRYTSTKEVLDATLIHQSITGLYETRIDLSQLGGDGGEAAAKEAAAKEAAAKEAAAKEAAAKEAAAKGGVLNLEEEYRLHEKPVPSSIDPSWLQLFPTVWAERAGMGLANQVPPVVVELRSGASPVAVRQYPMSKEAREGIRPHIQRFLDLGVLVPCQSPWNTPLLPVKKPGTNDYRPVQDLREINKRVQDIHPTVPNPYNLLSSLPPSHTWYSVLDLKDAFFCLKLHPNSQPLFAFEWRDPEKGNTGQLTWTRLPQGFKNSPTLFNEALHRDLAPFRALNPQVVLLQYVDDLLVAAPTYRDCKEGTQKLLQELSKLGYRVSAKKAQLCQKEVTYLGYLLKEGKRWLTPARKATVMKIPPPTTPRQVREFLGKAGFCRLFIPGFASLAAPLYPLTKPSIPFIWTEEHQKAFDRIKEALLSAPALALPDLTKPFTLYVDERAGVARGVLTQTLGPWRRPVAYLSKKLDPVASGWPTCLKAVAAVALLLKDADKLTLGQNVTVIASHSLESIVRQPPDRWMTNARMTHYQSLLLNERVSFAPPAVLNPATLLPVESEATPVHRCSEILAEETGTRRDLKDQPLPGVPAWYTDGSSFIAEGKRRAGAAIVDGKRTVWASSLPEGTSAQKAELVALTQALRLAEGKDINIYTDSRYAFATAHIHGAIYKQRGWLTSAGKDIKNKEEILALLEAIHLPKRVAIIHCPGHQKGNDPVATGNRRADEAAKQAALSTRVLAETTKPAGKRTADGSEFEKRTADGSEFESPKKKAKVE

SEQ ID NO: 894 - protein, 2088 aa, synthetic construct
MPAAKRVKLDGGDKKYSIGLDIGTNSVGWAVITDEYKVPSKKFKVLGNTDRHSIKKNLIGALLFDSGETAEATRLKRTARRRYTRRKNRICYLQEIFSNEMAKVDDSFFHRLEESFLVEEDKKHERHPIFGNIVDEVAYHEKYPTIYHLRKKLVDSTDKADLRLIYLALAHMIKFRGHFLIEGDLNPDNSDVDKLFIQLVQTYNQLFEENPINASGVDAKAILSARLSKSRRLENLIAQLPGEKKNGLFGNLIALSLGLTPNFKSNFDLAEDAKLQLSKDTYDDDLDNLLAQIGDQYADLFLAAKNLSDAILLSDILRVNTEITKAPLSASMIKRYDEHHQDLTLLKALVRQQLPEKYKEIFFDQSKNGYAGYIDGGASQEEFYKFIKPILEKMDGTEELLVKLNREDLLRKQRTFDNGSIPHQIHLGELHAILRRQEDFYPFLKDNREKIEKILTFRIPYYVGPLARGNSRFAWMTRKSEETITPWNFEEVVDKGASAQSFIERMTNFDKNLPNEKVLPKHSLLYEYFTVYNELTKVKYVTEGMRKPAFLSGEQKKAIVDLLFKTNRKVTVKQLKEDYFKKIECFDSVEISGVEDRFNASLGTYHDLLKIIKDKDFLDNEENEDILEDIVLTLTLFEDREMIEERLKTYAHLFDDKVMKQLKRRRYTGWGRLSRKLINGIRDKQSGKTILDFLKSDGFANRNFMQLIHDDSLTFKEDIQKAQVSGQGDSLHEHIANLAGSPAIKKGILQTVKVVDELVKVMGRHKPENIVIEMARENQTTQKGQKNSRERMKRIEEGIKELGSQILKEHPVENTQLQNEKLYLYYLQNGRDMYVDQELDINRLSDYDVDHIVPQSFLKDDSIDNKVLTRSDKARGKSDNVPSEEVVKKMKNYWRQLLNAKLITQRKFDNLTKAERGGLSELDKAGFIKRQLVETRQITKHVAQILDSRMNTKYDENDKLIREVKVITLKSKLVSDFRKDFQFYKVREINNYHHAHDAYLNAVVGTALIKKYPKLESEFVYGDYKVYDVRKMIAKSEQEIGKATAKYFFYSNIMNFFKTEITLANGEIRKRPLIETNGETGEIVWDKGRDFATVRKVLSMPQVNIVKKTEVQTGGFSKESILPKRNSDKLIARKKDWDPKKYGGFDSPTVAYSVLVVAKVEKGKSKKLKSVKELLGITIMERSSFEKNPIDFLEAKGYKEVKKDLIIKLPKYSLFELENGRKRMLASAGELQKGNELALPSKYVNFLYLASHYEKLKGSPEDNEQKQLFVEQHKHYLDEIIEQISEFSKRVILADANLDKVLSAYNKHRDKPIREQAENIIHLFTLTNLGAPAAFKYFDTTIDRKRYTSTKEVLDATLIHQSITGLYETRIDLSQLGGDGGEAAAKGGVLNLEEEYRLHEKPVPSSIDPSWLQLFPTVWAERAGMGLANQVPPVVVELRSGASPVAVRQYPMSKEAREGIRPHIQRFLDLGVLVPCQSPWNTPLLPVKKPGTNDYRPVQDLREINKRVQDIHPTVPNPYNLLSSLPPSHTWYSVLDLKDAFFCLKLHPNSQPLFAFEWRDPEKGNTGQLTWTRLPQGFKNSPTLFNEALHRDLAPFRALNPQVVLLQYVDDLLVAAPTYRDCKEGTQKLLQELSKLGYRVSAKKAQLCQKEVTYLGYLLKEGKRWLTPARKATVMKIPPPTTPRQVREFLGKAGFCRLFIPGFASLAAPLYPLTKPSIPFIWTEEHQKAFDRIKEALLSAPALALPDLTKPFTLYVDERAGVARGVLTQTLGPWRRPVAYLSKKLDPVASGWPTCLKAVAAVALLLKDADKLTLGQNVTVIASHSLESIVRQPPDRWMTNARMTHYQSLLLNERVSFAPPAVLNPATLLPVESEATPVHRCSEILAEETGTRRDLKDQPLPGVPAWYTDGSSFIAEGKRRAGAAIVDGKRTVWASSLPEGTSAQKAELVALTQALRLAEGKDINIYTDSRYAFATAHIHGAIYKQRGWLTSAGKDIKNKEEILALLEAIHLPKRVAIIHCPGHQKGNDPVATGNRRADEAAKQAALSTRVLAETTKPAGKRTADGSEFEKRTADGSEFESPKKKAKVE

SEQ ID NO: 895 - protein, 2088 aa, synthetic construct
MPAAKRVKLDGGDKKYSIGLDIGTNSVGWAVITDEYKVPSKKFKVLGNTDRHSIKKNLIGALLFDSGETAEATRLKRTARRRYTRRKNRICYLQEIFSNEMAKVDDSFFHRLEESFLVEEDKKHERHPIFGNIVDEVAYHEKYPTIYHLRKKLVDSTDKADLRLIYLALAHMIKFRGHFLIEGDLNPDNSDVDKLFIQLVQTYNQLFEENPINASGVDAKAILSARLSKSRRLENLIAQLPGEKKNGLFGNLIALSLGLTPNFKSNFDLAEDAKLQLSKDTYDDDLDNLLAQIGDQYADLFLAAKNLSDAILLSDILRVNTEITKAPLSASMIKRYDEHHQDLTLLKALVRQQLPEKYKEIFFDQSKNGYAGYIDGGASQEEFYKFIKPILEKMDGTEELLVKLNREDLLRKQRTFDNGSIPHQIHLGELHAILRRQEDFYPFLKDNREKIEKILTFRIPYYVGPLARGNSRFAWMTRKSEETITPWNFEEVVDKGASAQSFIERMTNFDKNLPNEKVLPKHSLLYEYFTVYNELTKVKYVTEGMRKPAFLSGEQKKAIVDLLFKTNRKVTVKQLKEDYFKKIECFDSVEISGVEDRFNASLGTYHDLLKIIKDKDFLDNEENEDILEDIVLTLTLFEDREMIEERLKTYAHLFDDKVMKQLKRRRYTGWGRLSRKLINGIRDKQSGKTILDFLKSDGFANRNFMQLIHDDSLTFKEDIQKAQVSGQGDSLHEHIANLAGSPAIKKGILQTVKVVDELVKVMGRHKPENIVIEMARENQTTQKGQKNSRERMKRIEEGIKELGSQILKEHPVENTQLQNEKLYLYYLQNGRDMYVDQELDINRLSDYDVDHIVPQSFLKDDSIDNKVLTRSDKARGKSDNVPSEEVVKKMKNYWRQLLNAKLITQRKFDNLTKAERGGLSELDKAGFIKRQLVETRQITKHVAQILDSRMNTKYDENDKLIREVKVITLKSKLVSDFRKDFQFYKVREINNYHHAHDAYLNAVVGTALIKKYPKLESEFVYGDYKVYDVRKMIAKSEQEIGKATAKYFFYSNIMNFFKTEITLANGEIRKRPLIETNGETGEIVWDKGRDFATVRKVLSMPQVNIVKKTEVQTGGFSKESILPKRNSDKLIARKKDWDPKKYGGFDSPTVAYSVLVVAKVEKGKSKKLKSVKELLGITIMERSSFEKNPIDFLEAKGYKEVKKDLIIKLPKYSLFELENGRKRMLASAGELQKGNELALPSKYVNFLYLASHYEKLKGSPEDNEQKQLFVEQHKHYLDEIIEQISEFSKRVILADANLDKVLSAYNKHRDKPIREQAENIIHLFTLTNLGAPAAFKYFDTTIDRKRYTSTKEVLDATLIHQSITGLYETRIDLSQLGGDGGGGGGGGGVLNLEEEYRLHEKPVPSSIDPSWLQLFPTVWAERAGMGLANQVPPVVVELRSGASPVAVRQYPMSKEAREGIRPHIQRFLDLGVLVPCQSPWNTPLLPVKKPGTNDYRPVQDLREINKRVQDIHPTVPNPYNLLSSLPPSHTWYSVLDLKDAFFCLKLHPNSQPLFAFEWRDPEKGNTGQLTWTRLPQGFKNSPTLFNEALHRDLAPFRALNPQVVLLQYVDDLLVAAPTYRDCKEGTQKLLQELSKLGYRVSAKKAQLCQKEVTYLGYLLKEGKRWLTPARKATVMKIPPPTTPRQVREFLGKAGFCRLFIPGFASLAAPLYPLTKPSIPFIWTEEHQKAFDRIKEALLSAPALALPDLTKPFTLYVDERAGVARGVLTQTLGPWRRPVAYLSKKLDPVASGWPTCLKAVAAVALLLKDADKLTLGQNVTVIASHSLESIVRQPPDRWMTNARMTHYQSLLLNERVSFAPPAVLNPATLLPVESEATPVHRCSEILAEETGTRRDLKDQPLPGVPAWYTDGSSFIAEGKRRAGAAIVDGKRTVWASSLPEGTSAQKAELVALTQALRLAEGKDINIYTDSRYAFATAHIHGAIYKQRGWLTSAGKDIKNKEEILALLEAIHLPKRVAIIHCPGHQKGNDPVATGNRRADEAAKQAALSTRVLAETTKPAGKRTADGSEFEKRTADGSEFESPKKKAKVE

SEQ ID NO: 896 - protein, 2094 aa, synthetic construct
MPAAKRVKLDGGDKKYSIGLDIGTNSVGWAVITDEYKVPSKKFKVLGNTDRHSIKKNLIGALLFDSGETAEATRLKRTARRRYTRRKNRICYLQEIFSNEMAKVDDSFFHRLEESFLVEEDKKHERHPIFGNIVDEVAYHEKYPTIYHLRKKLVDSTDKADLRLIYLALAHMIKFRGHFLIEGDLNPDNSDVDKLFIQLVQTYNQLFEENPINASGVDAKAILSARLSKSRRLENLIAQLPGEKKNGLFGNLIALSLGLTPNFKSNFDLAEDAKLQLSKDTYDDDLDNLLAQIGDQYADLFLAAKNLSDAILLSDILRVNTEITKAPLSASMIKRYDEHHQDLTLLKALVRQQLPEKYKEIFFDQSKNGYAGYIDGGASQEEFYKFIKPILEKMDGTEELLVKLNREDLLRKQRTFDNGSIPHQIHLGELHAILRRQEDFYPFLKDNREKIEKILTFRIPYYVGPLARGNSRFAWMTRKSEETITPWNFEEVVDKGASAQSFIERMTNFDKNLPNEKVLPKHSLLYEYFTVYNELTKVKYVTEGMRKPAFLSGEQKKAIVDLLFKTNRKVTVKQLKEDYFKKIECFDSVEISGVEDRFNASLGTYHDLLKIIKDKDFLDNEENEDILEDIVLTLTLFEDREMIEERLKTYAHLFDDKVMKQLKRRRYTGWGRLSRKLINGIRDKQSGKTILDFLKSDGFANRNFMQLIHDDSLTFKEDIQKAQVSGQGDSLHEHIANLAGSPAIKKGILQTVKVVDELVKVMGRHKPENIVIEMARENQTTQKGQKNSRERMKRIEEGIKELGSQILKEHPVENTQLQNEKLYLYYLQNGRDMYVDQELDINRLSDYDVDHIVPQSFLKDDSIDNKVLTRSDKARGKSDNVPSEEVVKKMKNYWRQLLNAKLITQRKFDNLTKAERGGLSELDKAGFIKRQLVETRQITKHVAQILDSRMNTKYDENDKLIREVKVITLKSKLVSDFRKDFQFYKVREINNYHHAHDAYLNAVVGTALIKKYPKLESEFVYGDYKVYDVRKMIAKSEQEIGKATAKYFFYSNIMNFFKTEITLANGEIRKRPLIETNGETGEIVWDKGRDFATVRKVLSMPQVNIVKKTEVQTGGFSKESILPKRNSDKLIARKKDWDPKKYGGFDSPTVAYSVLVVAKVEKGKSKKLKSVKELLGITIMERSSFEKNPIDFLEAKGYKEVKKDLIIKLPKYSLFELENGRKRMLASAGELQKGNELALPSKYVNFLYLASHYEKLKGSPEDNEQKQLFVEQHKHYLDEIIEQISEFSKRVILADANLDKVLSAYNKHRDKPIREQAENIIHLFTLTNLGAPAAFKYFDTTIDRKRYTSTKEVLDATLIHQSITGLYETRIDLSQLGGDGGPAPEAAAKGGGGGVLNLEEEYRLHEKPVPSSIDPSWLQLFPTVWAERAGMGLANQVPPVVVELRSGASPVAVRQYPMSKEAREGIRPHIQRFLDLGVLVPCQSPWNTPLLPVKKPGTNDYRPVQDLREINKRVQDIHPTVPNPYNLLSSLPPSHTWYSVLDLKDAFFCLKLHPNSQPLFAFEWRDPEKGNTGQLTWTRLPQGFKNSPTLFNEALHRDLAPFRALNPQVVLLQYVDDLLVAAPTYRDCKEGTQKLLQELSKLGYRVSAKKAQLCQKEVTYLGYLLKEGKRWLTPARKATVMKIPPPTTPRQVREFLGKAGFCRLFIPGFASLAAPLYPLTKPSIPFIWTEEHQKAFDRIKEALLSAPALALPDLTKPFTLYVDERAGVARGVLTQTLGPWRRPVAYLSKKLDPVASGWPTCLKAVAAVALLLKDADKLTLGQNVTVIASHSLESIVRQPPDRWMTNARMTHYQSLLLNERVSFAPPAVLNPATLLPVESEATPVHRCSEILAEETGTRRDLKDQPLPGVPAWYTDGSSFIAEGKRRAGAAIVDGKRTVWASSLPEGTSAQKAELVALTQALRLAEGKDINIYTDSRYAFATAHIHGAIYKQRGWLTSAGKDIKNKEEILALLEAIHLPKRVAIIHCPGHQKGNDPVATGNRRADEAAKQAALSTRVLAETTKPAGKRTADGSEFEKRTADGSEFESPKKKAKVE

SEQ ID NO: 897 - protein, 2091 aa, synthetic construct
MPAAKRVKLDGGDKKYSIGLDIGTNSVGWAVITDEYKVPSKKFKVLGNTDRHSIKKNLIGALLFDSGETAEATRLKRTARRRYTRRKNRICYLQEIFSNEMAKVDDSFFHRLEESFLVEEDKKHERHPIFGNIVDEVAYHEKYPTIYHLRKKLVDSTDKADLRLIYLALAHMIKFRGHFLIEGDLNPDNSDVDKLFIQLVQTYNQLFEENPINASGVDAKAILSARLSKSRRLENLIAQLPGEKKNGLFGNLIALSLGLTPNFKSNFDLAEDAKLQLSKDTYDDDLDNLLAQIGDQYADLFLAAKNLSDAILLSDILRVNTEITKAPLSASMIKRYDEHHQDLTLLKALVRQQLPEKYKEIFFDQSKNGYAGYIDGGASQEEFYKFIKPILEKMDGTEELLVKLNREDLLRKQRTFDNGSIPHQIHLGELHAILRRQEDFYPFLKDNREKIEKILTFRIPYYVGPLARGNSRFAWMTRKSEETITPWNFEEVVDKGASAQSFIERMTNFDKNLPNEKVLPKHSLLYEYFTVYNELTKVKYVTEGMRKPAFLSGEQKKAIVDLLFKTNRKVTVKQLKEDYFKKIECFDSVEISGVEDRFNASLGTYHDLLKIIKDKDFLDNEENEDILEDIVLTLTLFEDREMIEERLKTYAHLFDDKVMKQLKRRRYTGWGRLSRKLINGIRDKQSGKTILDFLKSDGFANRNFMQLIHDDSLTFKEDIQKAQVSGQGDSLHEHIANLAGSPAIKKGILQTVKVVDELVKVMGRHKPENIVIEMARENQTTQKGQKNSRERMKRIEEGIKELGSQILKEHPVENTQLQNEKLYLYYLQNGRDMYVDQELDINRLSDYDVDHIVPQSFLKDDSIDNKVLTRSDKARGKSDNVPSEEVVKKMKNYWRQLLNAKLITQRKFDNLTKAERGGLSELDKAGFIKRQLVETRQITKHVAQILDSRMNTKYDENDKLIREVKVITLKSKLVSDFRKDFQFYKVREINNYHHAHDAYLNAVVGTALIKKYPKLESEFVYGDYKVYDVRKMIAKSEQEIGKATAKYFFYSNIMNFFKTEITLANGEIRKRPLIETNGETGEIVWDKGRDFATVRKVLSMPQVNIVKKTEVQTGGFSKESILPKRNSDKLIARKKDWDPKKYGGFDSPTVAYSVLVVAKVEKGKSKKLKSVKELLGITIMERSSFEKNPIDFLEAKGYKEVKKDLIIKLPKYSLFELENGRKRMLASAGELQKGNELALPSKYVNFLYLASHYEKLKGSPEDNEQKQLFVEQHKHYLDEIIEQISEFSKRVILADANLDKVLSAYNKHRDKPIREQAENIIHLFTLTNLGAPAAFKYFDTTIDRKRYTSTKEVLDATLIHQSITGLYETRIDLSQLGGDGGEAAAKGGSGGVLNLEEEYRLHEKPVPSSIDPSWLQLFPTVWAERAGMGLANQVPPVVVELRSGASPVAVRQYPMSKEAREGIRPHIQRFLDLGVLVPCQSPWNTPLLPVKKPGTNDYRPVQDLREINKRVQDIHPTVPNPYNLLSSLPPSHTWYSVLDLKDAFFCLKLHPNSQPLFAFEWRDPEKGNTGQLTWTRLPQGFKNSPTLFNEALHRDLAPFRALNPQVVLLQYVDDLLVAAPTYRDCKEGTQKLLQELSKLGYRVSAKKAQLCQKEVTYLGYLLKEGKRWLTPARKATVMKIPPPTTPRQVREFLGKAGFCRLFIPGFASLAAPLYPLTKPSIPFIWTEEHQKAFDRIKEALLSAPALALPDLTKPFTLYVDERAGVARGVLTQTLGPWRRPVAYLSKKLDPVASGWPTCLKAVAAVALLLKDADKLTLGQNVTVIASHSLESIVRQPPDRWMTNARMTHYQSLLLNERVSFAPPAVLNPATLLPVESEATPVHRCSEILAEETGTRRDLKDQPLPGVPAWYTDGSSFIAEGKRRAGAAIVDGKRTVWASSLPEGTSAQKAELVALTQALRLAEGKDINIYTDSRYAFATAHIHGAIYKQRGWLTSAGKDIKNKEEILALLEAIHLPKRVAIIHCPGHQKGNDPVATGNRRADEAAKQAALSTRVLAETTKPAGKRTADGSEFEKRTADGSEFESPKKKAKVE

SEQ ID NO: 898 - protein, 2094 aa, synthetic construct
MPAAKRVKLDGGDKKYSIGLDIGTNSVGWAVITDEYKVPSKKFKVLGNTDRHSIKKNLIGALLFDSGETAEATRLKRTARRRYTRRKNRICYLQEIFSNEMAKVDDSFFHRLEESFLVEEDKKHERHPIFGNIVDEVAYHEKYPTIYHLRKKLVDSTDKADLRLIYLALAHMIKFRGHFLIEGDLNPDNSDVDKLFIQLVQTYNQLFEENPINASGVDAKAILSARLSKSRRLENLIAQLPGEKKNGLFGNLIALSLGLTPNFKSNFDLAEDAKLQLSKDTYDDDLDNLLAQIGDQYADLFLAAKNLSDAILLSDILRVNTEITKAPLSASMIKRYDEHHQDLTLLKALVRQQLPEKYKEIFFDQSKNGYAGYIDGGASQEEFYKFIKPILEKMDGTEELLVKLNREDLLRKQRTFDNGSIPHQIHLGELHAILRRQEDFYPFLKDNREKIEKILTFRIPYYVGPLARGNSRFAWMTRKSEETITPWNFEEVVDKGASAQSFIERMTNFDKNLPNEKVLPKHSLLYEYFTVYNELTKVKYVTEGMRKPAFLSGEQKKAIVDLLFKTNRKVTVKQLKEDYFKKIECFDSVEISGVEDRFNASLGTYHDLLKIIKDKDFLDNEENEDILEDIVLTLTLFEDREMIEERLKTYAHLFDDKVMKQLKRRRYTGWGRLSRKLINGIRDKQSGKTILDFLKSDGFANRNFMQLIHDDSLTFKEDIQKAQVSGQGDSLHEHIANLAGSPAIKKGILQTVKVVDELVKVMGRHKPENIVIEMARENQTTQKGQKNSRERMKRIEEGIKELGSQILKEHPVENTQLQNEKLYLYYLQNGRDMYVDQELDINRLSDYDVDHIVPQSFLKDDSIDNKVLTRSDKARGKSDNVPSEEVVKKMKNYWRQLLNAKLITQRKFDNLTKAERGGLSELDKAGFIKRQLVETRQITKHVAQILDSRMNTKYDENDKLIREVKVITLKSKLVSDFRKDFQFYKVREINNYHHAHDAYLNAVVGTALIKKYPKLESEFVYGDYKVYDVRKMIAKSEQEIGKATAKYFFYSNIMNFFKTEITLANGEIRKRPLIETNGETGEIVWDKGRDFATVRKVLSMPQVNIVKKTEVQTGGFSKESILPKRNSDKLIARKKDWDPKKYGGFDSPTVAYSVLVVAKVEKGKSKKLKSVKELLGITIMERSSFEKNPIDFLEAKGYKEVKKDLIIKLPKYSLFELENGRKRMLASAGELQKGNELALPSKYVNFLYLASHYEKLKGSPEDNEQKQLFVEQHKHYLDEIIEQISEFSKRVILADANLDKVLSAYNKHRDKPIREQAENIIHLFTLTNLGAPAAFKYFDTTIDRKRYTSTKEVLDATLIHQSITGLYETRIDLSQLGGDGGGGSPAPEAAAKGGVLNLEEEYRLHEKPVPSSIDPSWLQLFPTVWAERAGMGLANQVPPVVVELRSGASPVAVRQYPMSKEAREGIRPHIQRFLDLGVLVPCQSPWNTPLLPVKKPGTNDYRPVQDLREINKRVQDIHPTVPNPYNLLSSLPPSHTWYSVLDLKDAFFCLKLHPNSQPLFAFEWRDPEKGNTGQLTWTRLPQGFKNSPTLFNEALHRDLAPFRALNPQVVLLQYVDDLLVAAPTYRDCKEGTQKLLQELSKLGYRVSAKKAQLCQKEVTYLGYLLKEGKRWLTPARKATVMKIPPPTTPRQVREFLGKAGFCRLFIPGFASLAAPLYPLTKPSIPFIWTEEHQKAFDRIKEALLSAPALALPDLTKPFTLYVDERAGVARGVLTQTLGPWRRPVAYLSKKLDPVASGWPTCLKAVAAVALLLKDADKLTLGQNVTVIASHSLESIVRQPPDRWMTNARMTHYQSLLLNERVSFAPPAVLNPATLLPVESEATPVHRCSEILAEETGTRRDLKDQPLPGVPAWYTDGSSFIAEGKRRAGAAIVDGKRTVWASSLPEGTSAQKAELVALTQALRLAEGKDINIYTDSRYAFATAHIHGAIYKQRGWLTSAGKDIKNKEEILALLEAIHLPKRVAIIHCPGHQKGNDPVATGNRRADEAAKQAALSTRVLAETTKPAGKRTADGSEFEKRTADGSEFESPKKKAKVE

SEQ ID NO: 899 - protein, 2101 aa, synthetic construct
MPAAKRVKLDGGDKKYSIGLDIGTNSVGWAVITDEYKVPSKKFKVLGNTDRHSIKKNLIGALLFDSGETAEATRLKRTARRRYTRRKNRICYLQEIFSNEMAKVDDSFFHRLEESFLVEEDKKHERHPIFGNIVDEVAYHEKYPTIYHLRKKLVDSTDKADLRLIYLALAHMIKFRGHFLIEGDLNPDNSDVDKLFIQLVQTYNQLFEENPINASGVDAKAILSARLSKSRRLENLIAQLPGEKKNGLFGNLIALSLGLTPNFKSNFDLAEDAKLQLSKDTYDDDLDNLLAQIGDQYADLFLAAKNLSDAILLSDILRVNTEITKAPLSASMIKRYDEHHQDLTLLKALVRQQLPEKYKEIFFDQSKNGYAGYIDGGASQEEFYKFIKPILEKMDGTEELLVKLNREDLLRKQRTFDNGSIPHQIHLGELHAILRRQEDFYPFLKDNREKIEKILTFRIPYYVGPLARGNSRFAWMTRKSEETITPWNFEEVVDKGASAQSFIERMTNFDKNLPNEKVLPKHSLLYEYFTVYNELTKVKYVTEGMRKPAFLSGEQKKAIVDLLFKTNRKVTVKQLKEDYFKKIECFDSVEISGVEDRFNASLGTYHDLLKIIKDKDFLDNEENEDILEDIVLTLTLFEDREMIEERLKTYAHLFDDKVMKQLKRRRYTGWGRLSRKLINGIRDKQSGKTILDFLKSDGFANRNFMQLIHDDSLTFKEDIQKAQVSGQGDSLHEHIANLAGSPAIKKGILQTVKVVDELVKVMGRHKPENIVIEMARENQTTQKGQKNSRERMKRIEEGIKELGSQILKEHPVENTQLQNEKLYLYYLQNGRDMYVDQELDINRLSDYDVDHIVPQSFLKDDSIDNKVLTRSDKARGKSDNVPSEEVVKKMKNYWRQLLNAKLITQRKFDNLTKAERGGLSELDKAGFIKRQLVETRQITKHVAQILDSRMNTKYDENDKLIREVKVITLKSKLVSDFRKDFQFYKVREINNYHHAHDAYLNAVVGTALIKKYPKLESEFVYGDYKVYDVRKMIAKSEQEIGKATAKYFFYSNIMNFFKTEITLANGEIRKRPLIETNGETGEIVWDKGRDFATVRKVLSMPQVNIVKKTEVQTGGFSKESILPKRNSDKLIARKKDWDPKKYGGFDSPTVAYSVLVVAKVEKGKSKKLKSVKELLGITIMERSSFEKNPIDFLEAKGYKEVKKDLIIKLPKYSLFELENGRKRMLASAGELQKGNELALPSKYVNFLYLASHYEKLKGSPEDNEQKQLFVEQHKHYLDEIIEQISEFSKRVILADANLDKVLSAYNKHRDKPIREQAENIIHLFTLTNLGAPAAFKYFDTTIDRKRYTSTKEVLDATLIHQSITGLYETRIDLSQLGGDGGGGSGGSGGSGGSGGSGGSGGVLNLEEEYRLHEKPVPSSIDPSWLQLFPTVWAERAGMGLANQVPPVVVELRSGASPVAVRQYPMSKEAREGIRPHIQRFLDLGVLVPCQSPWNTPLLPVKKPGTNDYRPVQDLREINKRVQDIHPTVPNPYNLLSSLPPSHTWYSVLDLKDAFFCLKLHPNSQPLFAFEWRDPEKGNTGQLTWTRLPQGFKNSPTLFNEALHRDLAPFRALNPQVVLLQYVDDLLVAAPTYRDCKEGTQKLLQELSKLGYRVSAKKAQLCQKEVTYLGYLLKEGKRWLTPARKATVMKIPPPTTPRQVREFLGKAGFCRLFIPGFASLAAPLYPLTKPSIPFIWTEEHQKAFDRIKEALLSAPALALPDLTKPFTLYVDERAGVARGVLTQTLGPWRRPVAYLSKKLDPVASGWPTCLKAVAAVALLLKDADKLTLGQNVTVIASHSLESIVRQPPDRWMTNARMTHYQSLLLNERVSFAPPAVLNPATLLPVESEATPVHRCSEILAEETGTRRDLKDQPLPGVPAWYTDGSSFIAEGKRRAGAAIVDGKRTVWASSLPEGTSAQKAELVALTQALRLAEGKDINIYTDSRYAFATAHIHGAIYKQRGWLTSAGKDIKNKEEILALLEAIHLPKRVAIIHCPGHQKGNDPVATGNRRADEAAKQAALSTRVLAETTKPAGKRTADGSEFEKRTADGSEFESPKKKAKVE

SEQ ID NO: 900 - protein, 2098 aa, synthetic construct
MPAAKRVKLDGGDKKYSIGLDIGTNSVGWAVITDEYKVPSKKFKVLGNTDRHSIKKNLIGALLFDSGETAEATRLKRTARRRYTRRKNRICYLQEIFSNEMAKVDDSFFHRLEESFLVEEDKKHERHPIFGNIVDEVAYHEKYPTIYHLRKKLVDSTDKADLRLIYLALAHMIKFRGHFLIEGDLNPDNSDVDKLFIQLVQTYNQLFEENPINASGVDAKAILSARLSKSRRLENLIAQLPGEKKNGLFGNLIALSLGLTPNFKSNFDLAEDAKLQLSKDTYDDDLDNLLAQIGDQYADLFLAAKNLSDAILLSDILRVNTEITKAPLSASMIKRYDEHHQDLTLLKALVRQQLPEKYKEIFFDQSKNGYAGYIDGGASQEEFYKFIKPILEKMDGTEELLVKLNREDLLRKQRTFDNGSIPHQIHLGELHAILRRQEDFYPFLKDNREKIEKILTFRIPYYVGPLARGNSRFAWMTRKSEETITPWNFEEVVDKGASAQSFIERMTNFDKNLPNEKVLPKHSLLYEYFTVYNELTKVKYVTEGMRKPAFLSGEQKKAIVDLLFKTNRKVTVKQLKEDYFKKIECFDSVEISGVEDRFNASLGTYHDLLKIIKDKDFLDNEENEDILEDIVLTLTLFEDREMIEERLKTYAHLFDDKVMKQLKRRRYTGWGRLSRKLINGIRDKQSGKTILDFLKSDGFANRNFMQLIHDDSLTFKEDIQKAQVSGQGDSLHEHIANLAGSPAIKKGILQTVKVVDELVKVMGRHKPENIVIEMARENQTTQKGQKNSRERMKRIEEGIKELGSQILKEHPVENTQLQNEKLYLYYLQNGRDMYVDQELDINRLSDYDVDHIVPQSFLKDDSIDNKVLTRSDKARGKSDNVPSEEVVKKMKNYWRQLLNAKLITQRKFDNLTKAERGGLSELDKAGFIKRQLVETRQITKHVAQILDSRMNTKYDENDKLIREVKVITLKSKLVSDFRKDFQFYKVREINNYHHAHDAYLNAVVGTALIKKYPKLESEFVYGDYKVYDVRKMIAKSEQEIGKATAKYFFYSNIMNFFKTEITLANGEIRKRPLIETNGETGEIVWDKGRDFATVRKVLSMPQVNIVKKTEVQTGGFSKESILPKRNSDKLIARKKDWDPKKYGGFDSPTVAYSVLVVAKVEKGKSKKLKSVKELLGITIMERSSFEKNPIDFLEAKGYKEVKKDLIIKLPKYSLFELENGRKRMLASAGELQKGNELALPSKYVNFLYLASHYEKLKGSPEDNEQKQLFVEQHKHYLDEIIEQISEFSKRVILADANLDKVLSAYNKHRDKPIREQAENIIHLFTLTNLGAPAAFKYFDTTIDRKRYTSTKEVLDATLIHQSITGLYETRIDLSQLGGDGGEAAAKGGGGSEAAAKGGVLNLEEEYRLHEKPVPSSIDPSWLQLFPTVWAERAGMGLANQVPPVVVELRSGASPVAVRQYPMSKEAREGIRPHIQRFLDLGVLVPCQSPWNTPLLPVKKPGTNDYRPVQDLREINKRVQDIHPTVPNPYNLLSSLPPSHTWYSVLDLKDAFFCLKLHPNSQPLFAFEWRDPEKGNTGQLTWTRLPQGFKNSPTLFNEALHRDLAPFRALNPQVVLLQYVDDLLVAAPTYRDCKEGTQKLLQELSKLGYRVSAKKAQLCQKEVTYLGYLLKEGKRWLTPARKATVMKIPPPTTPRQVREFLGKAGFCRLFIPGFASLAAPLYPLTKPSIPFIWTEEHQKAFDRIKEALLSAPALALPDLTKPFTLYVDERAGVARGVLTQTLGPWRRPVAYLSKKLDPVASGWPTCLKAVAAVALLLKDADKLTLGQNVTVIASHSLESIVRQPPDRWMTNARMTHYQSLLLNERVSFAPPAVLNPATLLPVESEATPVHRCSEILAEETGTRRDLKDQPLPGVPAWYTDGSSFIAEGKRRAGAAIVDGKRTVWASSLPEGTSAQKAELVALTQALRLAEGKDINIYTDSRYAFATAHIHGAIYKQRGWLTSAGKDIKNKEEILALLEAIHLPKRVAIIHCPGHQKGNDPVATGNRRADEAAKQAALSTRVLAETTKPAGKRTADGSEFEKRTADGSEFESPKKKAKVE

SEQ ID NO: 901 - protein, 2094 aa, synthetic construct
MPAAKRVKLDGGDKKYSIGLDIGTNSVGWAVITDEYKVPSKKFKVLGNTDRHSIKKNLIGALLFDSGETAEATRLKRTARRRYTRRKNRICYLQEIFSNEMAKVDDSFFHRLEESFLVEEDKKHERHPIFGNIVDEVAYHEKYPTIYHLRKKLVDSTDKADLRLIYLALAHMIKFRGHFLIEGDLNPDNSDVDKLFIQLVQTYNQLFEENPINASGVDAKAILSARLSKSRRLENLIAQLPGEKKNGLFGNLIALSLGLTPNFKSNFDLAEDAKLQLSKDTYDDDLDNLLAQIGDQYADLFLAAKNLSDAILLSDILRVNTEITKAPLSASMIKRYDEHHQDLTLLKALVRQQLPEKYKEIFFDQSKNGYAGYIDGGASQEEFYKFIKPILEKMDGTEELLVKLNREDLLRKQRTFDNGSIPHQIHLGELHAILRRQEDFYPFLKDNREKIEKILTFRIPYYVGPLARGNSRFAWMTRKSEETITPWNFEEVVDKGASAQSFIERMTNFDKNLPNEKVLPKHSLLYEYFTVYNELTKVKYVTEGMRKPAFLSGEQKKAIVDLLFKTNRKVTVKQLKEDYFKKIECFDSVEISGVEDRFNASLGTYHDLLKIIKDKDFLDNEENEDILEDIVLTLTLFEDREMIEERLKTYAHLFDDKVMKQLKRRRYTGWGRLSRKLINGIRDKQSGKTILDFLKSDGFANRNFMQLIHDDSLTFKEDIQKAQVSGQGDSLHEHIANLAGSPAIKKGILQTVKVVDELVKVMGRHKPENIVIEMARENQTTQKGQKNSRERMKRIEEGIKELGSQILKEHPVENTQLQNEKLYLYYLQNGRDMYVDQELDINRLSDYDVDHIVPQSFLKDDSIDNKVLTRSDKARGKSDNVPSEEVVKKMKNYWRQLLNAKLITQRKFDNLTKAERGGLSELDKAGFIKRQLVETRQITKHVAQILDSRMNTKYDENDKLIREVKVITLKSKLVSDFRKDFQFYKVREINNYHHAHDAYLNAVVGTALIKKYPKLESEFVYGDYKVYDVRKMIAKSEQEIGKATAKYFFYSNIMNFFKTEITLANGEIRKRPLIETNGETGEIVWDKGRDFATVRKVLSMPQVNIVKKTEVQTGGFSKESILPKRNSDKLIARKKDWDPKKYGGFDSPTVAYSVLVVAKVEKGKSKKLKSVKELLGITIMERSSFEKNPIDFLEAKGYKEVKKDLIIKLPKYSLFELENGRKRMLASAGELQKGNELALPSKYVNFLYLASHYEKLKGSPEDNEQKQLFVEQHKHYLDEIIEQISEFSKRVILADANLDKVLSAYNKHRDKPIREQAENIIHLFTLTNLGAPAAFKYFDTTIDRKRYTSTKEVLDATLIHQSITGLYETRIDLSQLGGDGGGGGEAAAKGGSGGVLNLEEEYRLHEKPVPSSIDPSWLQLFPTVWAERAGMGLANQVPPVVVELRSGASPVAVRQYPMSKEAREGIRPHIQRFLDLGVLVPCQSPWNTPLLPVKKPGTNDYRPVQDLREINKRVQDIHPTVPNPYNLLSSLPPSHTWYSVLDLKDAFFCLKLHPNSQPLFAFEWRDPEKGNTGQLTWTRLPQGFKNSPTLFNEALHRDLAPFRALNPQVVLLQYVDDLLVAAPTYRDCKEGTQKLLQELSKLGYRVSAKKAQLCQKEVTYLGYLLKEGKRWLTPARKATVMKIPPPTTPRQVREFLGKAGFCRLFIPGFASLAAPLYPLTKPSIPFIWTEEHQKAFDRIKEALLSAPALALPDLTKPFTLYVDERAGVARGVLTQTLGPWRRPVAYLSKKLDPVASGWPTCLKAVAAVALLLKDADKLTLGQNVTVIASHSLESIVRQPPDRWMTNARMTHYQSLLLNERVSFAPPAVLNPATLLPVESEATPVHRCSEILAEETGTRRDLKDQPLPGVPAWYTDGSSFIAEGKRRAGAAIVDGKRTVWASSLPEGTSAQKAELVALTQALRLAEGKDINIYTDSRYAFATAHIHGAIYKQRGWLTSAGKDIKNKEEILALLEAIHLPKRVAIIHCPGHQKGNDPVATGNRRADEAAKQAALSTRVLAETTKPAGKRTADGSEFEKRTADGSEFESPKKKAKVE

SEQ ID NO: 902 - protein, 2094 aa, synthetic construct
MPAAKRVKLDGGDKKYSIGLDIGTNSVGWAVITDEYKVPSKKFKVLGNTDRHSIKKNLIGALLFDSGETAEATRLKRTARRRYTRRKNRICYLQEIFSNEMAKVDDSFFHRLEESFLVEEDKKHERHPIFGNIVDEVAYHEKYPTIYHLRKKLVDSTDKADLRLIYLALAHMIKFRGHFLIEGDLNPDNSDVDKLFIQLVQTYNQLFEENPINASGVDAKAILSARLSKSRRLENLIAQLPGEKKNGLFGNLIALSLGLTPNFKSNFDLAEDAKLQLSKDTYDDDLDNLLAQIGDQYADLFLAAKNLSDAILLSDILRVNTEITKAPLSASMIKRYDEHHQDLTLLKALVRQQLPEKYKEIFFDQSKNGYAGYIDGGASQEEFYKFIKPILEKMDGTEELLVKLNREDLLRKQRTFDNGSIPHQIHLGELHAILRRQEDFYPFLKDNREKIEKILTFRIPYYVGPLARGNSRFAWMTRKSEETITPWNFEEVVDKGASAQSFIERMTNFDKNLPNEKVLPKHSLLYEYFTVYNELTKVKYVTEGMRKPAFLSGEQKKAIVDLLFKTNRKVTVKQLKEDYFKKIECFDSVEISGVEDRFNASLGTYHDLLKIIKDKDFLDNEENEDILEDIVLTLTLFEDREMIEERLKTYAHLFDDKVMKQLKRRRYTGWGRLSRKLINGIRDKQSGKTILDFLKSDGFANRNFMQLIHDDSLTFKEDIQKAQVSGQGDSLHEHIANLAGSPAIKKGILQTVKVVDELVKVMGRHKPENIVIEMARENQTTQKGQKNSRERMKRIEEGIKELGSQILKEHPVENTQLQNEKLYLYYLQNGRDMYVDQELDINRLSDYDVDHIVPQSFLKDDSIDNKVLTRSDKARGKSDNVPSEEVVKKMKNYWRQLLNAKLITQRKFDNLTKAERGGLSELDKAGFIKRQLVETRQITKHVAQILDSRMNTKYDENDKLIREVKVITLKSKLVSDFRKDFQFYKVREINNYHHAHDAYLNAVVGTALIKKYPKLESEFVYGDYKVYDVRKMIAKSEQEIGKATAKYFFYSNIMNFFKTEITLANGEIRKRPLIETNGETGEIVWDKGRDFATVRKVLSMPQVNIVKKTEVQTGGFSKESILPKRNSDKLIARKKDWDPKKYGGFDSPTVAYSVLVVAKVEKGKSKKLKSVKELLGITIMERSSFEKNPIDFLEAKGYKEVKKDLIIKLPKYSLFELENGRKRMLASAGELQKGNELALPSKYVNFLYLASHYEKLKGSPEDNEQKQLFVEQHKHYLDEIIEQISEFSKRVILADANLDKVLSAYNKHRDKPIREQAENIIHLFTLTNLGAPAAFKYFDTTIDRKRYTSTKEVLDATLIHQSITGLYETRIDLSQLGGDGGGGSEAAAKGGGGGVLNLEEEYRLHEKPVPSSIDPSWLQLFPTVWAERAGMGLANQVPPVVVELRSGASPVAVRQYPMSKEAREGIRPHIQRFLDLGVLVPCQSPWNTPLLPVKKPGTNDYRPVQDLREINKRVQDIHPTVPNPYNLLSSLPPSHTWYSVLDLKDAFFCLKLHPNSQPLFAFEWRDPEKGNTGQLTWTRLPQGFKNSPTLFNEALHRDLAPFRALNPQVVLLQYVDDLLVAAPTYRDCKEGTQKLLQELSKLGYRVSAKKAQLCQKEVTYLGYLLKEGKRWLTPARKATVMKIPPPTTPRQVREFLGKAGFCRLFIPGFASLAAPLYPLTKPSIPFIWTEEHQKAFDRIKEALLSAPALALPDLTKPFTLYVDERAGVARGVLTQTLGPWRRPVAYLSKKLDPVASGWPTCLKAVAAVALLLKDADKLTLGQNVTVIASHSLESIVRQPPDRWMTNARMTHYQSLLLNERVSFAPPAVLNPATLLPVESEATPVHRCSEILAEETGTRRDLKDQPLPGVPAWYTDGSSFIAEGKRRAGAAIVDGKRTVWASSLPEGTSAQKAELVALTQALRLAEGKDINIYTDSRYAFATAHIHGAIYKQRGWLTSAGKDIKNKEEILALLEAIHLPKRVAIIHCPGHQKGNDPVATGNRRADEAAKQAALSTRVLAETTKPAGKRTADGSEFEKRTADGSEFESPKKKAKVE

SEQ ID NO: 903 - protein, 2092 aa, synthetic construct
MPAAKRVKLDGGDKKYSIGLDIGTNSVGWAVITDEYKVPSKKFKVLGNTDRHSIKKNLIGALLFDSGETAEATRLKRTARRRYTRRKNRICYLQEIFSNEMAKVDDSFFHRLEESFLVEEDKKHERHPIFGNIVDEVAYHEKYPTIYHLRKKLVDSTDKADLRLIYLALAHMIKFRGHFLIEGDLNPDNSDVDKLFIQLVQTYNQLFEENPINASGVDAKAILSARLSKSRRLENLIAQLPGEKKNGLFGNLIALSLGLTPNFKSNFDLAEDAKLQLSKDTYDDDLDNLLAQIGDQYADLFLAAKNLSDAILLSDILRVNTEITKAPLSASMIKRYDEHHQDLTLLKALVRQQLPEKYKEIFFDQSKNGYAGYIDGGASQEEFYKFIKPILEKMDGTEELLVKLNREDLLRKQRTFDNGSIPHQIHLGELHAILRRQEDFYPFLKDNREKIEKILTFRIPYYVGPLARGNSRFAWMTRKSEETITPWNFEEVVDKGASAQSFIERMTNFDKNLPNEKVLPKHSLLYEYFTVYNELTKVKYVTEGMRKPAFLSGEQKKAIVDLLFKTNRKVTVKQLKEDYFKKIECFDSVEISGVEDRFNASLGTYHDLLKIIKDKDFLDNEENEDILEDIVLTLTLFEDREMIEERLKTYAHLFDDKVMKQLKRRRYTGWGRLSRKLINGIRDKQSGKTILDFLKSDGFANRNFMQLIHDDSLTFKEDIQKAQVSGQGDSLHEHIANLAGSPAIKKGILQTVKVVDELVKVMGRHKPENIVIEMARENQTTQKGQKNSRERMKRIEEGIKELGSQILKEHPVENTQLQNEKLYLYYLQNGRDMYVDQELDINRLSDYDVDHIVPQSFLKDDSIDNKVLTRSDKARGKSDNVPSEEVVKKMKNYWRQLLNAKLITQRKFDNLTKAERGGLSELDKAGFIKRQLVETRQITKHVAQILDSRMNTKYDENDKLIREVKVITLKSKLVSDFRKDFQFYKVREINNYHHAHDAYLNAVVGTALIKKYPKLESEFVYGDYKVYDVRKMIAKSEQEIGKATAKYFFYSNIMNFFKTEITLANGEIRKRPLIETNGETGEIVWDKGRDFATVRKVLSMPQVNIVKKTEVQTGGFSKESILPKRNSDKLIARKKDWDPKKYGGFDSPTVAYSVLVVAKVEKGKSKKLKSVKELLGITIMERSSFEKNPIDFLEAKGYKEVKKDLIIKLPKYSLFELENGRKRMLASAGELQKGNELALPSKYVNFLYLASHYEKLKGSPEDNEQKQLFVEQHKHYLDEIIEQISEFSKRVILADANLDKVLSAYNKHRDKPIREQAENIIHLFTLTNLGAPAAFKYFDTTIDRKRYTSTKEVLDATLIHQSITGLYETRIDLSQLGGDGGGGSGGGGSSGGVLNLEEEYRLHEKPVPSSIDPSWLQLFPTVWAERAGMGLANQVPPVVVELRSGASPVAVRQYPMSKEAREGIRPHIQRFLDLGVLVPCQSPWNTPLLPVKKPGTNDYRPVQDLREINKRVQDIHPTVPNPYNLLSSLPPSHTWYSVLDLKDAFFCLKLHPNSQPLFAFEWRDPEKGNTGQLTWTRLPQGFKNSPTLFNEALHRDLAPFRALNPQVVLLQYVDDLLVAAPTYRDCKEGTQKLLQELSKLGYRVSAKKAQLCQKEVTYLGYLLKEGKRWLTPARKATVMKIPPPTTPRQVREFLGKAGFCRLFIPGFASLAAPLYPLTKPSIPFIWTEEHQKAFDRIKEALLSAPALALPDLTKPFTLYVDERAGVARGVLTQTLGPWRRPVAYLSKKLDPVASGWPTCLKAVAAVALLLKDADKLTLGQNVTVIASHSLESIVRQPPDRWMTNARMTHYQSLLLNERVSFAPPAVLNPATLLPVESEATPVHRCSEILAEETGTRRDLKDQPLPGVPAWYTDGSSFIAEGKRRAGAAIVDGKRTVWASSLPEGTSAQKAELVALTQALRLAEGKDINIYTDSRYAFATAHIHGAIYKQRGWLTSAGKDIKNKEEILALLEAIHLPKRVAIIHCPGHQKGNDPVATGNRRADEAAKQAALSTRVLAETTKPAGKRTADGSEFEKRTADGSEFESPKKKAKVE

SEQ ID NO: 904 - protein, 2088 aa, synthetic construct
MPAAKRVKLDGGDKKYSIGLDIGTNSVGWAVITDEYKVPSKKFKVLGNTDRHSIKKNLIGALLFDSGETAEATRLKRTARRRYTRRKNRICYLQEIFSNEMAKVDDSFFHRLEESFLVEEDKKHERHPIFGNIVDEVAYHEKYPTIYHLRKKLVDSTDKADLRLIYLALAHMIKFRGHFLIEGDLNPDNSDVDKLFIQLVQTYNQLFEENPINASGVDAKAILSARLSKSRRLENLIAQLPGEKKNGLFGNLIALSLGLTPNFKSNFDLAEDAKLQLSKDTYDDDLDNLLAQIGDQYADLFLAAKNLSDAILLSDILRVNTEITKAPLSASMIKRYDEHHQDLTLLKALVRQQLPEKYKEIFFDQSKNGYAGYIDGGASQEEFYKFIKPILEKMDGTEELLVKLNREDLLRKQRTFDNGSIPHQIHLGELHAILRRQEDFYPFLKDNREKIEKILTFRIPYYVGPLARGNSRFAWMTRKSEETITPWNFEEVVDKGASAQSFIERMTNFDKNLPNEKVLPKHSLLYEYFTVYNELTKVKYVTEGMRKPAFLSGEQKKAIVDLLFKTNRKVTVKQLKEDYFKKIECFDSVEISGVEDRFNASLGTYHDLLKIIKDKDFLDNEENEDILEDIVLTLTLFEDREMIEERLKTYAHLFDDKVMKQLKRRRYTGWGRLSRKLINGIRDKQSGKTILDFLKSDGFANRNFMQLIHDDSLTFKEDIQKAQVSGQGDSLHEHIANLAGSPAIKKGILQTVKVVDELVKVMGRHKPENIVIEMARENQTTQKGQKNSRERMKRIEEGIKELGSQILKEHPVENTQLQNEKLYLYYLQNGRDMYVDQELDINRLSDYDVDHIVPQSFLKDDSIDNKVLTRSDKARGKSDNVPSEEVVKKMKNYWRQLLNAKLITQRKFDNLTKAERGGLSELDKAGFIKRQLVETRQITKHVAQILDSRMNTKYDENDKLIREVKVITLKSKLVSDFRKDFQFYKVREINNYHHAHDAYLNAVVGTALIKKYPKLESEFVYGDYKVYDVRKMIAKSEQEIGKATAKYFFYSNIMNFFKTEITLANGEIRKRPLIETNGETGEIVWDKGRDFATVRKVLSMPQVNIVKKTEVQTGGFSKESILPKRNSDKLIARKKDWDPKKYGGFDSPTVAYSVLVVAKVEKGKSKKLKSVKELLGITIMERSSFEKNPIDFLEAKGYKEVKKDLIIKLPKYSLFELENGRKRMLASAGELQKGNELALPSKYVNFLYLASHYEKLKGSPEDNEQKQLFVEQHKHYLDEIIEQISEFSKRVILADANLDKVLSAYNKHRDKPIREQAENIIHLFTLTNLGAPAAFKYFDTTIDRKRYTSTKEVLDATLIHQSITGLYETRIDLSQLGGDGGPAPAPGGVLNLEEEYRLHEKPVPSSIDPSWLQLFPTVWAERAGMGLANQVPPVVVELRSGASPVAVRQYPMSKEAREGIRPHIQRFLDLGVLVPCQSPWNTPLLPVKKPGTNDYRPVQDLREINKRVQDIHPTVPNPYNLLSSLPPSHTWYSVLDLKDAFFCLKLHPNSQPLFAFEWRDPEKGNTGQLTWTRLPQGFKNSPTLFNEALHRDLAPFRALNPQVVLLQYVDDLLVAAPTYRDCKEGTQKLLQELSKLGYRVSAKKAQLCQKEVTYLGYLLKEGKRWLTPARKATVMKIPPPTTPRQVREFLGKAGFCRLFIPGFASLAAPLYPLTKPSIPFIWTEEHQKAFDRIKEALLSAPALALPDLTKPFTLYVDERAGVARGVLTQTLGPWRRPVAYLSKKLDPVASGWPTCLKAVAAVALLLKDADKLTLGQNVTVIASHSLESIVRQPPDRWMTNARMTHYQSLLLNERVSFAPPAVLNPATLLPVESEATPVHRCSEILAEETGTRRDLKDQPLPGVPAWYTDGSSFIAEGKRRAGAAIVDGKRTVWASSLPEGTSAQKAELVALTQALRLAEGKDINIYTDSRYAFATAHIHGAIYKQRGWLTSAGKDIKNKEEILALLEAIHLPKRVAIIHCPGHQKGNDPVATGNRRADEAAKQAALSTRVLAETTKPAGKRTADGSEFEKRTADGSEFESPKKKAKVE

SEQ ID NO: 905 - protein, 2094 aa, synthetic construct
MPAAKRVKLDGGDKKYSIGLDIGTNSVGWAVITDEYKVPSKKFKVLGNTDRHSIKKNLIGALLFDSGETAEATRLKRTARRRYTRRKNRICYLQEIFSNEMAKVDDSFFHRLEESFLVEEDKKHERHPIFGNIVDEVAYHEKYPTIYHLRKKLVDSTDKADLRLIYLALAHMIKFRGHFLIEGDLNPDNSDVDKLFIQLVQTYNQLFEENPINASGVDAKAILSARLSKSRRLENLIAQLPGEKKNGLFGNLIALSLGLTPNFKSNFDLAEDAKLQLSKDTYDDDLDNLLAQIGDQYADLFLAAKNLSDAILLSDILRVNTEITKAPLSASMIKRYDEHHQDLTLLKALVRQQLPEKYKEIFFDQSKNGYAGYIDGGASQEEFYKFIKPILEKMDGTEELLVKLNREDLLRKQRTFDNGSIPHQIHLGELHAILRRQEDFYPFLKDNREKIEKILTFRIPYYVGPLARGNSRFAWMTRKSEETITPWNFEEVVDKGASAQSFIERMTNFDKNLPNEKVLPKHSLLYEYFTVYNELTKVKYVTEGMRKPAFLSGEQKKAIVDLLFKTNRKVTVKQLKEDYFKKIECFDSVEISGVEDRFNASLGTYHDLLKIIKDKDFLDNEENEDILEDIVLTLTLFEDREMIEERLKTYAHLFDDKVMKQLKRRRYTGWGRLSRKLINGIRDKQSGKTILDFLKSDGFANRNFMQLIHDDSLTFKEDIQKAQVSGQGDSLHEHIANLAGSPAIKKGILQTVKVVDELVKVMGRHKPENIVIEMARENQTTQKGQKNSRERMKRIEEGIKELGSQILKEHPVENTQLQNEKLYLYYLQNGRDMYVDQELDINRLSDYDVDHIVPQSFLKDDSIDNKVLTRSDKARGKSDNVPSEEVVKKMKNYWRQLLNAKLITQRKFDNLTKAERGGLSELDKAGFIKRQLVETRQITKHVAQILDSRMNTKYDENDKLIREVKVITLKSKLVSDFRKDFQFYKVREINNYHHAHDAYLNAVVGTALIKKYPKLESEFVYGDYKVYDVRKMIAKSEQEIGKATAKYFFYSNIMNFFKTEITLANGEIRKRPLIETNGETGEIVWDKGRDFATVRKVLSMPQVNIVKKTEVQTGGFSKESILPKRNSDKLIARKKDWDPKKYGGFDSPTVAYSVLVVAKVEKGKSKKLKSVKELLGITIMERSSFEKNPIDFLEAKGYKEVKKDLIIKLPKYSLFELENGRKRMLASAGELQKGNELALPSKYVNFLYLASHYEKLKGSPEDNEQKQLFVEQHKHYLDEIIEQISEFSKRVILADANLDKVLSAYNKHRDKPIREQAENIIHLFTLTNLGAPAAFKYFDTTIDRKRYTSTKEVLDATLIHQSITGLYETRIDLSQLGGDGGEAAAKGGSGSSGGVLNLEEEYRLHEKPVPSSIDPSWLQLFPTVWAERAGMGLANQVPPVVVELRSGASPVAVRQYPMSKEAREGIRPHIQRFLDLGVLVPCQSPWNTPLLPVKKPGTNDYRPVQDLREINKRVQDIHPTVPNPYNLLSSLPPSHTWYSVLDLKDAFFCLKLHPNSQPLFAFEWRDPEKGNTGQLTWTRLPQGFKNSPTLFNEALHRDLAPFRALNPQVVLLQYVDDLLVAAPTYRDCKEGTQKLLQELSKLGYRVSAKKAQLCQKEVTYLGYLLKEGKRWLTPARKATVMKIPPPTTPRQVREFLGKAGFCRLFIPGFASLAAPLYPLTKPSIPFIWTEEHQKAFDRIKEALLSAPALALPDLTKPFTLYVDERAGVARGVLTQTLGPWRRPVAYLSKKLDPVASGWPTCLKAVAAVALLLKDADKLTLGQNVTVIASHSLESIVRQPPDRWMTNARMTHYQSLLLNERVSFAPPAVLNPATLLPVESEATPVHRCSEILAEETGTRRDLKDQPLPGVPAWYTDGSSFIAEGKRRAGAAIVDGKRTVWASSLPEGTSAQKAELVALTQALRLAEGKDINIYTDSRYAFATAHIHGAIYKQRGWLTSAGKDIKNKEEILALLEAIHLPKRVAIIHCPGHQKGNDPVATGNRRADEAAKQAALSTRVLAETTKPAGKRTADGSEFEKRTADGSEFESPKKKAKVE

SEQ ID NO: 906 - protein, 2089 aa, synthetic construct
MPAAKRVKLDGGDKKYSIGLDIGTNSVGWAVITDEYKVPSKKFKVLGNTDRHSIKKNLIGALLFDSGETAEATRLKRTARRRYTRRKNRICYLQEIFSNEMAKVDDSFFHRLEESFLVEEDKKHERHPIFGNIVDEVAYHEKYPTIYHLRKKLVDSTDKADLRLIYLALAHMIKFRGHFLIEGDLNPDNSDVDKLFIQLVQTYNQLFEENPINASGVDAKAILSARLSKSRRLENLIAQLPGEKKNGLFGNLIALSLGLTPNFKSNFDLAEDAKLQLSKDTYDDDLDNLLAQIGDQYADLFLAAKNLSDAILLSDILRVNTEITKAPLSASMIKRYDEHHQDLTLLKALVRQQLPEKYKEIFFDQSKNGYAGYIDGGASQEEFYKFIKPILEKMDGTEELLVKLNREDLLRKQRTFDNGSIPHQIHLGELHAILRRQEDFYPFLKDNREKIEKILTFRIPYYVGPLARGNSRFAWMTRKSEETITPWNFEEVVDKGASAQSFIERMTNFDKNLPNEKVLPKHSLLYEYFTVYNELTKVKYVTEGMRKPAFLSGEQKKAIVDLLFKTNRKVTVKQLKEDYFKKIECFDSVEISGVEDRFNASLGTYHDLLKIIKDKDFLDNEENEDILEDIVLTLTLFEDREMIEERLKTYAHLFDDKVMKQLKRRRYTGWGRLSRKLINGIRDKQSGKTILDFLKSDGFANRNFMQLIHDDSLTFKEDIQKAQVSGQGDSLHEHIANLAGSPAIKKGILQTVKVVDELVKVMGRHKPENIVIEMARENQTTQKGQKNSRERMKRIEEGIKELGSQILKEHPVENTQLQNEKLYLYYLQNGRDMYVDQELDINRLSDYDVDHIVPQSFLKDDSIDNKVLTRSDKARGKSDNVPSEEVVKKMKNYWRQLLNAKLITQRKFDNLTKAERGGLSELDKAGFIKRQLVETRQITKHVAQILDSRMNTKYDENDKLIREVKVITLKSKLVSDFRKDFQFYKVREINNYHHAHDAYLNAVVGTALIKKYPKLESEFVYGDYKVYDVRKMIAKSEQEIGKATAKYFFYSNIMNFFKTEITLANGEIRKRPLIETNGETGEIVWDKGRDFATVRKVLSMPQVNIVKKTEVQTGGFSKESILPKRNSDKLIARKKDWDPKKYGGFDSPTVAYSVLVVAKVEKGKSKKLKSVKELLGITIMERSSFEKNPIDFLEAKGYKEVKKDLIIKLPKYSLFELENGRKRMLASAGELQKGNELALPSKYVNFLYLASHYEKLKGSPEDNEQKQLFVEQHKHYLDEIIEQISEFSKRVILADANLDKVLSAYNKHRDKPIREQAENIIHLFTLTNLGAPAAFKYFDTTIDRKRYTSTKEVLDATLIHQSITGLYETRIDLSQLGGDGGGGSGGSGGVLNLEEEYRLHEKPVPSSIDPSWLQLFPTVWAERAGMGLANQVPPVVVELRSGASPVAVRQYPMSKEAREGIRPHIQRFLDLGVLVPCQSPWNTPLLPVKKPGTNDYRPVQDLREINKRVQDIHPTVPNPYNLLSSLPPSHTWYSVLDLKDAFFCLKLHPNSQPLFAFEWRDPEKGNTGQLTWTRLPQGFKNSPTLFNEALHRDLAPFRALNPQVVLLQYVDDLLVAAPTYRDCKEGTQKLLQELSKLGYRVSAKKAQLCQKEVTYLGYLLKEGKRWLTPARKATVMKIPPPTTPRQVREFLGKAGFCRLFIPGFASLAAPLYPLTKPSIPFIWTEEHQKAFDRIKEALLSAPALALPDLTKPFTLYVDERAGVARGVLTQTLGPWRRPVAYLSKKLDPVASGWPTCLKAVAAVALLLKDADKLTLGQNVTVIASHSLESIVRQPPDRWMTNARMTHYQSLLLNERVSFAPPAVLNPATLLPVESEATPVHRCSEILAEETGTRRDLKDQPLPGVPAWYTDGSSFIAEGKRRAGAAIVDGKRTVWASSLPEGTSAQKAELVALTQALRLAEGKDINIYTDSRYAFATAHIHGAIYKQRGWLTSAGKDIKNKEEILALLEAIHLPKRVAIIHCPGHQKGNDPVATGNRRADEAAKQAALSTRVLAETTKPAGKRTADGSEFEKRTADGSEFESPKKKAKVE

SEQ ID NO: 907 - protein, 2095 aa, synthetic construct
MPAAKRVKLDGGDKKYSIGLDIGTNSVGWAVITDEYKVPSKKFKVLGNTDRHSIKKNLIGALLFDSGETAEATRLKRTARRRYTRRKNRICYLQEIFSNEMAKVDDSFFHRLEESFLVEEDKKHERHPIFGNIVDEVAYHEKYPTIYHLRKKLVDSTDKADLRLIYLALAHMIKFRGHFLIEGDLNPDNSDVDKLFIQLVQTYNQLFEENPINASGVDAKAILSARLSKSRRLENLIAQLPGEKKNGLFGNLIALSLGLTPNFKSNFDLAEDAKLQLSKDTYDDDLDNLLAQIGDQYADLFLAAKNLSDAILLSDILRVNTEITKAPLSASMIKRYDEHHQDLTLLKALVRQQLPEKYKEIFFDQSKNGYAGYIDGGASQEEFYKFIKPILEKMDGTEELLVKLNREDLLRKQRTFDNGSIPHQIHLGELHAILRRQEDFYPFLKDNREKIEKILTFRIPYYVGPLARGNSRFAWMTRKSEETITPWNFEEVVDKGASAQSFIERMTNFDKNLPNEKVLPKHSLLYEYFTVYNELTKVKYVTEGMRKPAFLSGEQKKAIVDLLFKTNRKVTVKQLKEDYFKKIECFDSVEISGVEDRFNASLGTYHDLLKIIKDKDFLDNEENEDILEDIVLTLTLFEDREMIEERLKTYAHLFDDKVMKQLKRRRYTGWGRLSRKLINGIRDKQSGKTILDFLKSDGFANRNFMQLIHDDSLTFKEDIQKAQVSGQGDSLHEHIANLAGSPAIKKGILQTVKVVDELVKVMGRHKPENIVIEMARENQTTQKGQKNSRERMKRIEEGIKELGSQILKEHPVENTQLQNEKLYLYYLQNGRDMYVDQELDINRLSDYDVDHIVPQSFLKDDSIDNKVLTRSDKARGKSDNVPSEEVVKKMKNYWRQLLNAKLITQRKFDNLTKAERGGLSELDKAGFIKRQLVETRQITKHVAQILDSRMNTKYDENDKLIREVKVITLKSKLVSDFRKDFQFYKVREINNYHHAHDAYLNAVVGTALIKKYPKLESEFVYGDYKVYDVRKMIAKSEQEIGKATAKYFFYSNIMNFFKTEITLANGEIRKRPLIETNGETGEIVWDKGRDFATVRKVLSMPQVNIVKKTEVQTGGFSKESILPKRNSDKLIARKKDWDPKKYGGFDSPTVAYSVLVVAKVEKGKSKKLKSVKELLGITIMERSSFEKNPIDFLEAKGYKEVKKDLIIKLPKYSLFELENGRKRMLASAGELQKGNELALPSKYVNFLYLASHYEKLKGSPEDNEQKQLFVEQHKHYLDEIIEQISEFSKRVILADANLDKVLSAYNKHRDKPIREQAENIIHLFTLTNLGAPAAFKYFDTTIDRKRYTSTKEVLDATLIHQSITGLYETRIDLSQLGGDGGGSAGSAAGSGEFGGVLNLEEEYRLHEKPVPSSIDPSWLQLFPTVWAERAGMGLANQVPPVVVELRSGASPVAVRQYPMSKEAREGIRPHIQRFLDLGVLVPCQSPWNTPLLPVKKPGTNDYRPVQDLREINKRVQDIHPTVPNPYNLLSSLPPSHTWYSVLDLKDAFFCLKLHPNSQPLFAFEWRDPEKGNTGQLTWTRLPQGFKNSPTLFNEALHRDLAPFRALNPQVVLLQYVDDLLVAAPTYRDCKEGTQKLLQELSKLGYRVSAKKAQLCQKEVTYLGYLLKEGKRWLTPARKATVMKIPPPTTPRQVREFLGKAGFCRLFIPGFASLAAPLYPLTKPSIPFIWTEEHQKAFDRIKEALLSAPALALPDLTKPFTLYVDERAGVARGVLTQTLGPWRRPVAYLSKKLDPVASGWPTCLKAVAAVALLLKDADKLTLGQNVTVIASHSLESIVRQPPDRWMTNARMTHYQSLLLNERVSFAPPAVLNPATLLPVESEATPVHRCSEILAEETGTRRDLKDQPLPGVPAWYTDGSSFIAEGKRRAGAAIVDGKRTVWASSLPEGTSAQKAELVALTQALRLAEGKDINIYTDSRYAFATAHIHGAIYKQRGWLTSAGKDIKNKEEILALLEAIHLPKRVAIIHCPGHQKGNDPVATGNRRADEAAKQAALSTRVLAETTKPAGKRTADGSEFEKRTADGSEFESPKKKAKVE

SEQ ID NO: 908 - protein, 2092 aa, synthetic construct
MPAAKRVKLDGGDKKYSIGLDIGTNSVGWAVITDEYKVPSKKFKVLGNTDRHSIKKNLIGALLFDSGETAEATRLKRTARRRYTRRKNRICYLQEIFSNEMAKVDDSFFHRLEESFLVEEDKKHERHPIFGNIVDEVAYHEKYPTIYHLRKKLVDSTDKADLRLIYLALAHMIKFRGHFLIEGDLNPDNSDVDKLFIQLVQTYNQLFEENPINASGVDAKAILSARLSKSRRLENLIAQLPGEKKNGLFGNLIALSLGLTPNFKSNFDLAEDAKLQLSKDTYDDDLDNLLAQIGDQYADLFLAAKNLSDAILLSDILRVNTEITKAPLSASMIKRYDEHHQDLTLLKALVRQQLPEKYKEIFFDQSKNGYAGYIDGGASQEEFYKFIKPILEKMDGTEELLVKLNREDLLRKQRTFDNGSIPHQIHLGELHAILRRQEDFYPFLKDNREKIEKILTFRIPYYVGPLARGNSRFAWMTRKSEETITPWNFEEVVDKGASAQSFIERMTNFDKNLPNEKVLPKHSLLYEYFTVYNELTKVKYVTEGMRKPAFLSGEQKKAIVDLLFKTNRKVTVKQLKEDYFKKIECFDSVEISGVEDRFNASLGTYHDLLKIIKDKDFLDNEENEDILEDIVLTLTLFEDREMIEERLKTYAHLFDDKVMKQLKRRRYTGWGRLSRKLINGIRDKQSGKTILDFLKSDGFANRNFMQLIHDDSLTFKEDIQKAQVSGQGDSLHEHIANLAGSPAIKKGILQTVKVVDELVKVMGRHKPENIVIEMARENQTTQKGQKNSRERMKRIEEGIKELGSQILKEHPVENTQLQNEKLYLYYLQNGRDMYVDQELDINRLSDYDVDHIVPQSFLKDDSIDNKVLTRSDKARGKSDNVPSEEVVKKMKNYWRQLLNAKLITQRKFDNLTKAERGGLSELDKAGFIKRQLVETRQITKHVAQILDSRMNTKYDENDKLIREVKVITLKSKLVSDFRKDFQFYKVREINNYHHAHDAYLNAVVGTALIKKYPKLESEFVYGDYKVYDVRKMIAKSEQEIGKATAKYFFYSNIMNFFKTEITLANGEIRKRPLIETNGETGEIVWDKGRDFATVRKVLSMPQVNIVKKTEVQTGGFSKESILPKRNSDKLIARKKDWDPKKYGGFDSPTVAYSVLVVAKVEKGKSKKLKSVKELLGITIMERSSFEKNPIDFLEAKGYKEVKKDLIIKLPKYSLFELENGRKRMLASAGELQKGNELALPSKYVNFLYLASHYEKLKGSPEDNEQKQLFVEQHKHYLDEIIEQISEFSKRVILADANLDKVLSAYNKHRDKPIREQAENIIHLFTLTNLGAPAAFKYFDTTIDRKRYTSTKEVLDATLIHQSITGLYETRIDLSQLGGDGGGGSGGGPAPGGVLNLEEEYRLHEKPVPSSIDPSWLQLFPTVWAERAGMGLANQVPPVVVELRSGASPVAVRQYPMSKEAREGIRPHIQRFLDLGVLVPCQSPWNTPLLPVKKPGTNDYRPVQDLREINKRVQDIHPTVPNPYNLLSSLPPSHTWYSVLDLKDAFFCLKLHPNSQPLFAFEWRDPEKGNTGQLTWTRLPQGFKNSPTLFNEALHRDLAPFRALNPQVVLLQYVDDLLVAAPTYRDCKEGTQKLLQELSKLGYRVSAKKAQLCQKEVTYLGYLLKEGKRWLTPARKATVMKIPPPTTPRQVREFLGKAGFCRLFIPGFASLAAPLYPLTKPSIPFIWTEEHQKAFDRIKEALLSAPALALPDLTKPFTLYVDERAGVARGVLTQTLGPWRRPVAYLSKKLDPVASGWPTCLKAVAAVALLLKDADKLTLGQNVTVIASHSLESIVRQPPDRWMTNARMTHYQSLLLNERVSFAPPAVLNPATLLPVESEATPVHRCSEILAEETGTRRDLKDQPLPGVPAWYTDGSSFIAEGKRRAGAAIVDGKRTVWASSLPEGTSAQKAELVALTQALRLAEGKDINIYTDSRYAFATAHIHGAIYKQRGWLTSAGKDIKNKEEILALLEAIHLPKRVAIIHCPGHQKGNDPVATGNRRADEAAKQAALSTRVLAETTKPAGKRTADGSEFEKRTADGSEFESPKKKAKVE

SEQ ID NO: 909 - protein, 2092 aa, synthetic construct
MPAAKRVKLDGGDKKYSIGLDIGTNSVGWAVITDEYKVPSKKFKVLGNTDRHSIKKNLIGALLFDSGETAEATRLKRTARRRYTRRKNRICYLQEIFSNEMAKVDDSFFHRLEESFLVEEDKKHERHPIFGNIVDEVAYHEKYPTIYHLRKKLVDSTDKADLRLIYLALAHMIKFRGHFLIEGDLNPDNSDVDKLFIQLVQTYNQLFEENPINASGVDAKAILSARLSKSRRLENLIAQLPGEKKNGLFGNLIALSLGLTPNFKSNFDLAEDAKLQLSKDTYDDDLDNLLAQIGDQYADLFLAAKNLSDAILLSDILRVNTEITKAPLSASMIKRYDEHHQDLTLLKALVRQQLPEKYKEIFFDQSKNGYAGYIDGGASQEEFYKFIKPILEKMDGTEELLVKLNREDLLRKQRTFDNGSIPHQIHLGELHAILRRQEDFYPFLKDNREKIEKILTFRIPYYVGPLARGNSRFAWMTRKSEETITPWNFEEVVDKGASAQSFIERMTNFDKNLPNEKVLPKHSLLYEYFTVYNELTKVKYVTEGMRKPAFLSGEQKKAIVDLLFKTNRKVTVKQLKEDYFKKIECFDSVEISGVEDRFNASLGTYHDLLKIIKDKDFLDNEENEDILEDIVLTLTLFEDREMIEERLKTYAHLFDDKVMKQLKRRRYTGWGRLSRKLINGIRDKQSGKTILDFLKSDGFANRNFMQLIHDDSLTFKEDIQKAQVSGQGDSLHEHIANLAGSPAIKKGILQTVKVVDELVKVMGRHKPENIVIEMARENQTTQKGQKNSRERMKRIEEGIKELGSQILKEHPVENTQLQNEKLYLYYLQNGRDMYVDQELDINRLSDYDVDHIVPQSFLKDDSIDNKVLTRSDKARGKSDNVPSEEVVKKMKNYWRQLLNAKLITQRKFDNLTKAERGGLSELDKAGFIKRQLVETRQITKHVAQILDSRMNTKYDENDKLIREVKVITLKSKLVSDFRKDFQFYKVREINNYHHAHDAYLNAVVGTALIKKYPKLESEFVYGDYKVYDVRKMIAKSEQEIGKATAKYFFYSNIMNFFKTEITLANGEIRKRPLIETNGETGEIVWDKGRDFATVRKVLSMPQVNIVKKTEVQTGGFSKESILPKRNSDKLIARKKDWDPKKYGGFDSPTVAYSVLVVAKVEKGKSKKLKSVKELLGITIMERSSFEKNPIDFLEAKGYKEVKKDLIIKLPKYSLFELENGRKRMLASAGELQKGNELALPSKYVNFLYLASHYEKLKGSPEDNEQKQLFVEQHKHYLDEIIEQISEFSKRVILADANLDKVLSAYNKHRDKPIREQAENIIHLFTLTNLGAPAAFKYFDTTIDRKRYTSTKEVLDATLIHQSITGLYETRIDLSQLGGDGGGGSGSSGGGGGVLNLEEEYRLHEKPVPSSIDPSWLQLFPTVWAERAGMGLANQVPPVVVELRSGASPVAVRQYPMSKEAREGIRPHIQRFLDLGVLVPCQSPWNTPLLPVKKPGTNDYRPVQDLREINKRVQDIHPTVPNPYNLLSSLPPSHTWYSVLDLKDAFFCLKLHPNSQPLFAFEWRDPEKGNTGQLTWTRLPQGFKNSPTLFNEALHRDLAPFRALNPQVVLLQYVDDLLVAAPTYRDCKEGTQKLLQELSKLGYRVSAKKAQLCQKEVTYLGYLLKEGKRWLTPARKATVMKIPPPTTPRQVREFLGKAGFCRLFIPGFASLAAPLYPLTKPSIPFIWTEEHQKAFDRIKEALLSAPALALPDLTKPFTLYVDERAGVARGVLTQTLGPWRRPVAYLSKKLDPVASGWPTCLKAVAAVALLLKDADKLTLGQNVTVIASHSLESIVRQPPDRWMTNARMTHYQSLLLNERVSFAPPAVLNPATLLPVESEATPVHRCSEILAEETGTRRDLKDQPLPGVPAWYTDGSSFIAEGKRRAGAAIVDGKRTVWASSLPEGTSAQKAELVALTQALRLAEGKDINIYTDSRYAFATAHIHGAIYKQRGWLTSAGKDIKNKEEILALLEAIHLPKRVAIIHCPGHQKGNDPVATGNRRADEAAKQAALSTRVLAETTKPAGKRTADGSEFEKRTADGSEFESPKKKAKVE

SEQ ID NO: 910 - protein, 2094 aa, synthetic construct
MPAAKRVKLDGGDKKYSIGLDIGTNSVGWAVITDEYKVPSKKFKVLGNTDRHSIKKNLIGALLFDSGETAEATRLKRTARRRYTRRKNRICYLQEIFSNEMAKVDDSFFHRLEESFLVEEDKKHERHPIFGNIVDEVAYHEKYPTIYHLRKKLVDSTDKADLRLIYLALAHMIKFRGHFLIEGDLNPDNSDVDKLFIQLVQTYNQLFEENPINASGVDAKAILSARLSKSRRLENLIAQLPGEKKNGLFGNLIALSLGLTPNFKSNFDLAEDAKLQLSKDTYDDDLDNLLAQIGDQYADLFLAAKNLSDAILLSDILRVNTEITKAPLSASMIKRYDEHHQDLTLLKALVRQQLPEKYKEIFFDQSKNGYAGYIDGGASQEEFYKFIKPILEKMDGTEELLVKLNREDLLRKQRTFDNGSIPHQIHLGELHAILRRQEDFYPFLKDNREKIEKILTFRIPYYVGPLARGNSRFAWMTRKSEETITPWNFEEVVDKGASAQSFIERMTNFDKNLPNEKVLPKHSLLYEYFTVYNELTKVKYVTEGMRKPAFLSGEQKKAIVDLLFKTNRKVTVKQLKEDYFKKIECFDSVEISGVEDRFNASLGTYHDLLKIIKDKDFLDNEENEDILEDIVLTLTLFEDREMIEERLKTYAHLFDDKVMKQLKRRRYTGWGRLSRKLINGIRDKQSGKTILDFLKSDGFANRNFMQLIHDDSLTFKEDIQKAQVSGQGDSLHEHIANLAGSPAIKKGILQTVKVVDELVKVMGRHKPENIVIEMARENQTTQKGQKNSRERMKRIEEGIKELGSQILKEHPVENTQLQNEKLYLYYLQNGRDMYVDQELDINRLSDYDVDHIVPQSFLKDDSIDNKVLTRSDKARGKSDNVPSEEVVKKMKNYWRQLLNAKLITQRKFDNLTKAERGGLSELDKAGFIKRQLVETRQITKHVAQILDSRMNTKYDENDKLIREVKVITLKSKLVSDFRKDFQFYKVREINNYHHAHDAYLNAVVGTALIKKYPKLESEFVYGDYKVYDVRKMIAKSEQEIGKATAKYFFYSNIMNFFKTEITLANGEIRKRPLIETNGETGEIVWDKGRDFATVRKVLSMPQVNIVKKTEVQTGGFSKESILPKRNSDKLIARKKDWDPKKYGGFDSPTVAYSVLVVAKVEKGKSKKLKSVKELLGITIMERSSFEKNPIDFLEAKGYKEVKKDLIIKLPKYSLFELENGRKRMLASAGELQKGNELALPSKYVNFLYLASHYEKLKGSPEDNEQKQLFVEQHKHYLDEIIEQISEFSKRVILADANLDKVLSAYNKHRDKPIREQAENIIHLFTLTNLGAPAAFKYFDTTIDRKRYTSTKEVLDATLIHQSITGLYETRIDLSQLGGDGGGSSEAAAKGGGGGVLNLEEEYRLHEKPVPSSIDPSWLQLFPTVWAERAGMGLANQVPPVVVELRSGASPVAVRQYPMSKEAREGIRPHIQRFLDLGVLVPCQSPWNTPLLPVKKPGTNDYRPVQDLREINKRVQDIHPTVPNPYNLLSSLPPSHTWYSVLDLKDAFFCLKLHPNSQPLFAFEWRDPEKGNTGQLTWTRLPQGFKNSPTLFNEALHRDLAPFRALNPQVVLLQYVDDLLVAAPTYRDCKEGTQKLLQELSKLGYRVSAKKAQLCQKEVTYLGYLLKEGKRWLTPARKATVMKIPPPTTPRQVREFLGKAGFCRLFIPGFASLAAPLYPLTKPSIPFIWTEEHQKAFDRIKEALLSAPALALPDLTKPFTLYVDERAGVARGVLTQTLGPWRRPVAYLSKKLDPVASGWPTCLKAVAAVALLLKDADKLTLGQNVTVIASHSLESIVRQPPDRWMTNARMTHYQSLLLNERVSFAPPAVLNPATLLPVESEATPVHRCSEILAEETGTRRDLKDQPLPGVPAWYTDGSSFIAEGKRRAGAAIVDGKRTVWASSLPEGTSAQKAELVALTQALRLAEGKDINIYTDSRYAFATAHIHGAIYKQRGWLTSAGKDIKNKEEILALLEAIHLPKRVAIIHCPGHQKGNDPVATGNRRADEAAKQAALSTRVLAETTKPAGKRTADGSEFEKRTADGSEFESPKKKAKVE

SEQ ID NO: 911 - protein, 2098 aa, synthetic construct
MPAAKRVKLDGGDKKYSIGLDIGTNSVGWAVITDEYKVPSKKFKVLGNTDRHSIKKNLIGALLFDSGETAEATRLKRTARRRYTRRKNRICYLQEIFSNEMAKVDDSFFHRLEESFLVEEDKKHERHPIFGNIVDEVAYHEKYPTIYHLRKKLVDSTDKADLRLIYLALAHMIKFRGHFLIEGDLNPDNSDVDKLFIQLVQTYNQLFEENPINASGVDAKAILSARLSKSRRLENLIAQLPGEKKNGLFGNLIALSLGLTPNFKSNFDLAEDAKLQLSKDTYDDDLDNLLAQIGDQYADLFLAAKNLSDAILLSDILRVNTEITKAPLSASMIKRYDEHHQDLTLLKALVRQQLPEKYKEIFFDQSKNGYAGYIDGGASQEEFYKFIKPILEKMDGTEELLVKLNREDLLRKQRTFDNGSIPHQIHLGELHAILRRQEDFYPFLKDNREKIEKILTFRIPYYVGPLARGNSRFAWMTRKSEETITPWNFEEVVDKGASAQSFIERMTNFDKNLPNEKVLPKHSLLYEYFTVYNELTKVKYVTEGMRKPAFLSGEQKKAIVDLLFKTNRKVTVKQLKEDYFKKIECFDSVEISGVEDRFNASLGTYHDLLKIIKDKDFLDNEENEDILEDIVLTLTLFEDREMIEERLKTYAHLFDDKVMKQLKRRRYTGWGRLSRKLINGIRDKQSGKTILDFLKSDGFANRNFMQLIHDDSLTFKEDIQKAQVSGQGDSLHEHIANLAGSPAIKKGILQTVKVVDELVKVMGRHKPENIVIEMARENQTTQKGQKNSRERMKRIEEGIKELGSQILKEHPVENTQLQNEKLYLYYLQNGRDMYVDQELDINRLSDYDVDHIVPQSFLKDDSIDNKVLTRSDKARGKSDNVPSEEVVKKMKNYWRQLLNAKLITQRKFDNLTKAERGGLSELDKAGFIKRQLVETRQITKHVAQILDSRMNTKYDENDKLIREVKVITLKSKLVSDFRKDFQFYKVREINNYHHAHDAYLNAVVGTALIKKYPKLESEFVYGDYKVYDVRKMIAKSEQEIGKATAKYFFYSNIMNFFKTEITLANGEIRKRPLIETNGETGEIVWDKGRDFATVRKVLSMPQVNIVKKTEVQTGGFSKESILPKRNSDKLIARKKDWDPKKYGGFDSPTVAYSVLVVAKVEKGKSKKLKSVKELLGITIMERSSFEKNPIDFLEAKGYKEVKKDLIIKLPKYSLFELENGRKRMLASAGELQKGNELALPSKYVNFLYLASHYEKLKGSPEDNEQKQLFVEQHKHYLDEIIEQISEFSKRVILADANLDKVLSAYNKHRDKPIREQAENIIHLFTLTNLGAPAAFKYFDTTIDRKRYTSTKEVLDATLIHQSITGLYETRIDLSQLGGDGGGGGGSEAAAKGGGGSGGVLNLEEEYRLHEKPVPSSIDPSWLQLFPTVWAERAGMGLANQVPPVVVELRSGASPVAVRQYPMSKEAREGIRPHIQRFLDLGVLVPCQSPWNTPLLPVKKPGTNDYRPVQDLREINKRVQDIHPTVPNPYNLLSSLPPSHTWYSVLDLKDAFFCLKLHPNSQPLFAFEWRDPEKGNTGQLTWTRLPQGFKNSPTLFNEALHRDLAPFRALNPQVVLLQYVDDLLVAAPTYRDCKEGTQKLLQELSKLGYRVSAKKAQLCQKEVTYLGYLLKEGKRWLTPARKATVMKIPPPTTPRQVREFLGKAGFCRLFIPGFASLAAPLYPLTKPSIPFIWTEEHQKAFDRIKEALLSAPALALPDLTKPFTLYVDERAGVARGVLTQTLGPWRRPVAYLSKKLDPVASGWPTCLKAVAAVALLLKDADKLTLGQNVTVIASHSLESIVRQPPDRWMTNARMTHYQSLLLNERVSFAPPAVLNPATLLPVESEATPVHRCSEILAEETGTRRDLKDQPLPGVPAWYTDGSSFIAEGKRRAGAAIVDGKRTVWASSLPEGTSAQKAELVALTQALRLAEGKDINIYTDSRYAFATAHIHGAIYKQRGWLTSAGKDIKNKEEILALLEAIHLPKRVAIIHCPGHQKGNDPVATGNRRADEAAKQAALSTRVLAETTKPAGKRTADGSEFEKRTADGSEFESPKKKAKVE

SEQ ID NO: 912 - protein, 2094 aa, synthetic construct
MPAAKRVKLDGGDKKYSIGLDIGTNSVGWAVITDEYKVPSKKFKVLGNTDRHSIKKNLIGALLFDSGETAEATRLKRTARRRYTRRKNRICYLQEIFSNEMAKVDDSFFHRLEESFLVEEDKKHERHPIFGNIVDEVAYHEKYPTIYHLRKKLVDSTDKADLRLIYLALAHMIKFRGHFLIEGDLNPDNSDVDKLFIQLVQTYNQLFEENPINASGVDAKAILSARLSKSRRLENLIAQLPGEKKNGLFGNLIALSLGLTPNFKSNFDLAEDAKLQLSKDTYDDDLDNLLAQIGDQYADLFLAAKNLSDAILLSDILRVNTEITKAPLSASMIKRYDEHHQDLTLLKALVRQQLPEKYKEIFFDQSKNGYAGYIDGGASQEEFYKFIKPILEKMDGTEELLVKLNREDLLRKQRTFDNGSIPHQIHLGELHAILRRQEDFYPFLKDNREKIEKILTFRIPYYVGPLARGNSRFAWMTRKSEETITPWNFEEVVDKGASAQSFIERMTNFDKNLPNEKVLPKHSLLYEYFTVYNELTKVKYVTEGMRKPAFLSGEQKKAIVDLLFKTNRKVTVKQLKEDYFKKIECFDSVEISGVEDRFNASLGTYHDLLKIIKDKDFLDNEENEDILEDIVLTLTLFEDREMIEERLKTYAHLFDDKVMKQLKRRRYTGWGRLSRKLINGIRDKQSGKTILDFLKSDGFANRNFMQLIHDDSLTFKEDIQKAQVSGQGDSLHEHIANLAGSPAIKKGILQTVKVVDELVKVMGRHKPENIVIEMARENQTTQKGQKNSRERMKRIEEGIKELGSQILKEHPVENTQLQNEKLYLYYLQNGRDMYVDQELDINRLSDYDVDHIVPQSFLKDDSIDNKVLTRSDKARGKSDNVPSEEVVKKMKNYWRQLLNAKLITQRKFDNLTKAERGGLSELDKAGFIKRQLVETRQITKHVAQILDSRMNTKYDENDKLIREVKVITLKSKLVSDFRKDFQFYKVREINNYHHAHDAYLNAVVGTALIKKYPKLESEFVYGDYKVYDVRKMIAKSEQEIGKATAKYFFYSNIMNFFKTEITLANGEIRKRPLIETNGETGEIVWDKGRDFATVRKVLSMPQVNIVKKTEVQTGGFSKESILPKRNSDKLIARKKDWDPKKYGGFDSPTVAYSVLVVAKVEKGKSKKLKSVKELLGITIMERSSFEKNPIDFLEAKGYKEVKKDLIIKLPKYSLFELENGRKRMLASAGELQKGNELALPSKYVNFLYLASHYEKLKGSPEDNEQKQLFVEQHKHYLDEIIEQISEFSKRVILADANLDKVLSAYNKHRDKPIREQAENIIHLFTLTNLGAPAAFKYFDTTIDRKRYTSTKEVLDATLIHQSITGLYETRIDLSQLGGDGGGGSEAAAKPAPGGVLNLEEEYRLHEKPVPSSIDPSWLQLFPTVWAERAGMGLANQVPPVVVELRSGASPVAVRQYPMSKEAREGIRPHIQRFLDLGVLVPCQSPWNTPLLPVKKPGTNDYRPVQDLREINKRVQDIHPTVPNPYNLLSSLPPSHTWYSVLDLKDAFFCLKLHPNSQPLFAFEWRDPEKGNTGQLTWTRLPQGFKNSPTLFNEALHRDLAPFRALNPQVVLLQYVDDLLVAAPTYRDCKEGTQKLLQELSKLGYRVSAKKAQLCQKEVTYLGYLLKEGKRWLTPARKATVMKIPPPTTPRQVREFLGKAGFCRLFIPGFASLAAPLYPLTKPSIPFIWTEEHQKAFDRIKEALLSAPALALPDLTKPFTLYVDERAGVARGVLTQTLGPWRRPVAYLSKKLDPVASGWPTCLKAVAAVALLLKDADKLTLGQNVTVIASHSLESIVRQPPDRWMTNARMTHYQSLLLNERVSFAPPAVLNPATLLPVESEATPVHRCSEILAEETGTRRDLKDQPLPGVPAWYTDGSSFIAEGKRRAGAAIVDGKRTVWASSLPEGTSAQKAELVALTQALRLAEGKDINIYTDSRYAFATAHIHGAIYKQRGWLTSAGKDIKNKEEILALLEAIHLPKRVAIIHCPGHQKGNDPVATGNRRADEAAKQAALSTRVLAETTKPAGKRTADGSEFEKRTADGSEFESPKKKAKVE

SEQ ID NO: 913 - protein, 2092 aa, synthetic construct
MPAAKRVKLDGGDKKYSIGLDIGTNSVGWAVITDEYKVPSKKFKVLGNTDRHSIKKNLIGALLFDSGETAEATRLKRTARRRYTRRKNRICYLQEIFSNEMAKVDDSFFHRLEESFLVEEDKKHERHPIFGNIVDEVAYHEKYPTIYHLRKKLVDSTDKADLRLIYLALAHMIKFRGHFLIEGDLNPDNSDVDKLFIQLVQTYNQLFEENPINASGVDAKAILSARLSKSRRLENLIAQLPGEKKNGLFGNLIALSLGLTPNFKSNFDLAEDAKLQLSKDTYDDDLDNLLAQIGDQYADLFLAAKNLSDAILLSDILRVNTEITKAPLSASMIKRYDEHHQDLTLLKALVRQQLPEKYKEIFFDQSKNGYAGYIDGGASQEEFYKFIKPILEKMDGTEELLVKLNREDLLRKQRTFDNGSIPHQIHLGELHAILRRQEDFYPFLKDNREKIEKILTFRIPYYVGPLARGNSRFAWMTRKSEETITPWNFEEVVDKGASAQSFIERMTNFDKNLPNEKVLPKHSLLYEYFTVYNELTKVKYVTEGMRKPAFLSGEQKKAIVDLLFKTNRKVTVKQLKEDYFKKIECFDSVEISGVEDRFNASLGTYHDLLKIIKDKDFLDNEENEDILEDIVLTLTLFEDREMIEERLKTYAHLFDDKVMKQLKRRRYTGWGRLSRKLINGIRDKQSGKTILDFLKSDGFANRNFMQLIHDDSLTFKEDIQKAQVSGQGDSLHEHIANLAGSPAIKKGILQTVKVVDELVKVMGRHKPENIVIEMARENQTTQKGQKNSRERMKRIEEGIKELGSQILKEHPVENTQLQNEKLYLYYLQNGRDMYVDQELDINRLSDYDVDHIVPQSFLKDDSIDNKVLTRSDKARGKSDNVPSEEVVKKMKNYWRQLLNAKLITQRKFDNLTKAERGGLSELDKAGFIKRQLVETRQITKHVAQILDSRMNTKYDENDKLIREVKVITLKSKLVSDFRKDFQFYKVREINNYHHAHDAYLNAVVGTALIKKYPKLESEFVYGDYKVYDVRKMIAKSEQEIGKATAKYFFYSNIMNFFKTEITLANGEIRKRPLIETNGETGEIVWDKGRDFATVRKVLSMPQVNIVKKTEVQTGGFSKESILPKRNSDKLIARKKDWDPKKYGGFDSPTVAYSVLVVAKVEKGKSKKLKSVKELLGITIMERSSFEKNPIDFLEAKGYKEVKKDLIIKLPKYSLFELENGRKRMLASAGELQKGNELALPSKYVNFLYLASHYEKLKGSPEDNEQKQLFVEQHKHYLDEIIEQISEFSKRVILADANLDKVLSAYNKHRDKPIREQAENIIHLFTLTNLGAPAAFKYFDTTIDRKRYTSTKEVLDATLIHQSITGLYETRIDLSQLGGDGGGGGPAPGSSGGVLNLEEEYRLHEKPVPSSIDPSWLQLFPTVWAERAGMGLANQVPPVVVELRSGASPVAVRQYPMSKEAREGIRPHIQRFLDLGVLVPCQSPWNTPLLPVKKPGTNDYRPVQDLREINKRVQDIHPTVPNPYNLLSSLPPSHTWYSVLDLKDAFFCLKLHPNSQPLFAFEWRDPEKGNTGQLTWTRLPQGFKNSPTLFNEALHRDLAPFRALNPQVVLLQYVDDLLVAAPTYRDCKEGTQKLLQELSKLGYRVSAKKAQLCQKEVTYLGYLLKEGKRWLTPARKATVMKIPPPTTPRQVREFLGKAGFCRLFIPGFASLAAPLYPLTKPSIPFIWTEEHQKAFDRIKEALLSAPALALPDLTKPFTLYVDERAGVARGVLTQTLGPWRRPVAYLSKKLDPVASGWPTCLKAVAAVALLLKDADKLTLGQNVTVIASHSLESIVRQPPDRWMTNARMTHYQSLLLNERVSFAPPAVLNPATLLPVESEATPVHRCSEILAEETGTRRDLKDQPLPGVPAWYTDGSSFIAEGKRRAGAAIVDGKRTVWASSLPEGTSAQKAELVALTQALRLAEGKDINIYTDSRYAFATAHIHGAIYKQRGWLTSAGKDIKNKEEILALLEAIHLPKRVAIIHCPGHQKGNDPVATGNRRADEAAKQAALSTRVLAETTKPAGKRTADGSEFEKRTADGSEFESPKKKAKVE

SEQ ID NO: 914 - protein, 2089 aa, synthetic construct
MPAAKRVKLDGGDKKYSIGLDIGTNSVGWAVITDEYKVPSKKFKVLGNTDRHSIKKNLIGALLFDSGETAEATRLKRTARRRYTRRKNRICYLQEIFSNEMAKVDDSFFHRLEESFLVEEDKKHERHPIFGNIVDEVAYHEKYPTIYHLRKKLVDSTDKADLRLIYLALAHMIKFRGHFLIEGDLNPDNSDVDKLFIQLVQTYNQLFEENPINASGVDAKAILSARLSKSRRLENLIAQLPGEKKNGLFGNLIALSLGLTPNFKSNFDLAEDAKLQLSKDTYDDDLDNLLAQIGDQYADLFLAAKNLSDAILLSDILRVNTEITKAPLSASMIKRYDEHHQDLTLLKALVRQQLPEKYKEIFFDQSKNGYAGYIDGGASQEEFYKFIKPILEKMDGTEELLVKLNREDLLRKQRTFDNGSIPHQIHLGELHAILRRQEDFYPFLKDNREKIEKILTFRIPYYVGPLARGNSRFAWMTRKSEETITPWNFEEVVDKGASAQSFIERMTNFDKNLPNEKVLPKHSLLYEYFTVYNELTKVKYVTEGMRKPAFLSGEQKKAIVDLLFKTNRKVTVKQLKEDYFKKIECFDSVEISGVEDRFNASLGTYHDLLKIIKDKDFLDNEENEDILEDIVLTLTLFEDREMIEERLKTYAHLFDDKVMKQLKRRRYTGWGRLSRKLINGIRDKQSGKTILDFLKSDGFANRNFMQLIHDDSLTFKEDIQKAQVSGQGDSLHEHIANLAGSPAIKKGILQTVKVVDELVKVMGRHKPENIVIEMARENQTTQKGQKNSRERMKRIEEGIKELGSQILKEHPVENTQLQNEKLYLYYLQNGRDMYVDQELDINRLSDYDVDHIVPQSFLKDDSIDNKVLTRSDKARGKSDNVPSEEVVKKMKNYWRQLLNAKLITQRKFDNLTKAERGGLSELDKAGFIKRQLVETRQITKHVAQILDSRMNTKYDENDKLIREVKVITLKSKLVSDFRKDFQFYKVREINNYHHAHDAYLNAVVGTALIKKYPKLESEFVYGDYKVYDVRKMIAKSEQEIGKATAKYFFYSNIMNFFKTEITLANGEIRKRPLIETNGETGEIVWDKGRDFATVRKVLSMPQVNIVKKTEVQTGGFSKESILPKRNSDKLIARKKDWDPKKYGGFDSPTVAYSVLVVAKVEKGKSKKLKSVKELLGITIMERSSFEKNPIDFLEAKGYKEVKKDLIIKLPKYSLFELENGRKRMLASAGELQKGNELALPSKYVNFLYLASHYEKLKGSPEDNEQKQLFVEQHKHYLDEIIEQISEFSKRVILADANLDKVLSAYNKHRDKPIREQAENIIHLFTLTNLGAPAAFKYFDTTIDRKRYTSTKEVLDATLIHQSITGLYETRIDLSQLGGDGGPAPGGGGGVLNLEEEYRLHEKPVPSSIDPSWLQLFPTVWAERAGMGLANQVPPVVVELRSGASPVAVRQYPMSKEAREGIRPHIQRFLDLGVLVPCQSPWNTPLLPVKKPGTNDYRPVQDLREINKRVQDIHPTVPNPYNLLSSLPPSHTWYSVLDLKDAFFCLKLHPNSQPLFAFEWRDPEKGNTGQLTWTRLPQGFKNSPTLFNEALHRDLAPFRALNPQVVLLQYVDDLLVAAPTYRDCKEGTQKLLQELSKLGYRVSAKKAQLCQKEVTYLGYLLKEGKRWLTPARKATVMKIPPPTTPRQVREFLGKAGFCRLFIPGFASLAAPLYPLTKPSIPFIWTEEHQKAFDRIKEALLSAPALALPDLTKPFTLYVDERAGVARGVLTQTLGPWRRPVAYLSKKLDPVASGWPTCLKAVAAVALLLKDADKLTLGQNVTVIASHSLESIVRQPPDRWMTNARMTHYQSLLLNERVSFAPPAVLNPATLLPVESEATPVHRCSEILAEETGTRRDLKDQPLPGVPAWYTDGSSFIAEGKRRAGAAIVDGKRTVWASSLPEGTSAQKAELVALTQALRLAEGKDINIYTDSRYAFATAHIHGAIYKQRGWLTSAGKDIKNKEEILALLEAIHLPKRVAIIHCPGHQKGNDPVATGNRRADEAAKQAALSTRVLAETTKPAGKRTADGSEFEKRTADGSEFESPKKKAKVE

SEQ ID NO: 915 - protein, 2094 aa, synthetic construct
MPAAKRVKLDGGDKKYSIGLDIGTNSVGWAVITDEYKVPSKKFKVLGNTDRHSIKKNLIGALLFDSGETAEATRLKRTARRRYTRRKNRICYLQEIFSNEMAKVDDSFFHRLEESFLVEEDKKHERHPIFGNIVDEVAYHEKYPTIYHLRKKLVDSTDKADLRLIYLALAHMIKFRGHFLIEGDLNPDNSDVDKLFIQLVQTYNQLFEENPINASGVDAKAILSARLSKSRRLENLIAQLPGEKKNGLFGNLIALSLGLTPNFKSNFDLAEDAKLQLSKDTYDDDLDNLLAQIGDQYADLFLAAKNLSDAILLSDILRVNTEITKAPLSASMIKRYDEHHQDLTLLKALVRQQLPEKYKEIFFDQSKNGYAGYIDGGASQEEFYKFIKPILEKMDGTEELLVKLNREDLLRKQRTFDNGSIPHQIHLGELHAILRRQEDFYPFLKDNREKIEKILTFRIPYYVGPLARGNSRFAWMTRKSEETITPWNFEEVVDKGASAQSFIERMTNFDKNLPNEKVLPKHSLLYEYFTVYNELTKVKYVTEGMRKPAFLSGEQKKAIVDLLFKTNRKVTVKQLKEDYFKKIECFDSVEISGVEDRFNASLGTYHDLLKIIKDKDFLDNEENEDILEDIVLTLTLFEDREMIEERLKTYAHLFDDKVMKQLKRRRYTGWGRLSRKLINGIRDKQSGKTILDFLKSDGFANRNFMQLIHDDSLTFKEDIQKAQVSGQGDSLHEHIANLAGSPAIKKGILQTVKVVDELVKVMGRHKPENIVIEMARENQTTQKGQKNSRERMKRIEEGIKELGSQILKEHPVENTQLQNEKLYLYYLQNGRDMYVDQELDINRLSDYDVDHIVPQSFLKDDSIDNKVLTRSDKARGKSDNVPSEEVVKKMKNYWRQLLNAKLITQRKFDNLTKAERGGLSELDKAGFIKRQLVETRQITKHVAQILDSRMNTKYDENDKLIREVKVITLKSKLVSDFRKDFQFYKVREINNYHHAHDAYLNAVVGTALIKKYPKLESEFVYGDYKVYDVRKMIAKSEQEIGKATAKYFFYSNIMNFFKTEITLANGEIRKRPLIETNGETGEIVWDKGRDFATVRKVLSMPQVNIVKKTEVQTGGFSKESILPKRNSDKLIARKKDWDPKKYGGFDSPTVAYSVLVVAKVEKGKSKKLKSVKELLGITIMERSSFEKNPIDFLEAKGYKEVKKDLIIKLPKYSLFELENGRKRMLASAGELQKGNELALPSKYVNFLYLASHYEKLKGSPEDNEQKQLFVEQHKHYLDEIIEQISEFSKRVILADANLDKVLSAYNKHRDKPIREQAENIIHLFTLTNLGAPAAFKYFDTTIDRKRYTSTKEVLDATLIHQSITGLYETRIDLSQLGGDGGGSSGGSEAAAKGGVLNLEEEYRLHEKPVPSSIDPSWLQLFPTVWAERAGMGLANQVPPVVVELRSGASPVAVRQYPMSKEAREGIRPHIQRFLDLGVLVPCQSPWNTPLLPVKKPGTNDYRPVQDLREINKRVQDIHPTVPNPYNLLSSLPPSHTWYSVLDLKDAFFCLKLHPNSQPLFAFEWRDPEKGNTGQLTWTRLPQGFKNSPTLFNEALHRDLAPFRALNPQVVLLQYVDDLLVAAPTYRDCKEGTQKLLQELSKLGYRVSAKKAQLCQKEVTYLGYLLKEGKRWLTPARKATVMKIPPPTTPRQVREFLGKAGFCRLFIPGFASLAAPLYPLTKPSIPFIWTEEHQKAFDRIKEALLSAPALALPDLTKPFTLYVDERAGVARGVLTQTLGPWRRPVAYLSKKLDPVASGWPTCLKAVAAVALLLKDADKLTLGQNVTVIASHSLESIVRQPPDRWMTNARMTHYQSLLLNERVSFAPPAVLNPATLLPVESEATPVHRCSEILAEETGTRRDLKDQPLPGVPAWYTDGSSFIAEGKRRAGAAIVDGKRTVWASSLPEGTSAQKAELVALTQALRLAEGKDINIYTDSRYAFATAHIHGAIYKQRGWLTSAGKDIKNKEEILALLEAIHLPKRVAIIHCPGHQKGNDPVATGNRRADEAAKQAALSTRVLAETTKPAGKRTADGSEFEKRTADGSEFESPKKKAKVE

SEQ ID NO: 916 - protein, 2092 aa, synthetic construct
MPAAKRVKLDGGDKKYSIGLDIGTNSVGWAVITDEYKVPSKKFKVLGNTDRHSIKKNLIGALLFDSGETAEATRLKRTARRRYTRRKNRICYLQEIFSNEMAKVDDSFFHRLEESFLVEEDKKHERHPIFGNIVDEVAYHEKYPTIYHLRKKLVDSTDKADLRLIYLALAHMIKFRGHFLIEGDLNPDNSDVDKLFIQLVQTYNQLFEENPINASGVDAKAILSARLSKSRRLENLIAQLPGEKKNGLFGNLIALSLGLTPNFKSNFDLAEDAKLQLSKDTYDDDLDNLLAQIGDQYADLFLAAKNLSDAILLSDILRVNTEITKAPLSASMIKRYDEHHQDLTLLKALVRQQLPEKYKEIFFDQSKNGYAGYIDGGASQEEFYKFIKPILEKMDGTEELLVKLNREDLLRKQRTFDNGSIPHQIHLGELHAILRRQEDFYPFLKDNREKIEKILTFRIPYYVGPLARGNSRFAWMTRKSEETITPWNFEEVVDKGASAQSFIERMTNFDKNLPNEKVLPKHSLLYEYFTVYNELTKVKYVTEGMRKPAFLSGEQKKAIVDLLFKTNRKVTVKQLKEDYFKKIECFDSVEISGVEDRFNASLGTYHDLLKIIKDKDFLDNEENEDILEDIVLTLTLFEDREMIEERLKTYAHLFDDKVMKQLKRRRYTGWGRLSRKLINGIRDKQSGKTILDFLKSDGFANRNFMQLIHDDSLTFKEDIQKAQVSGQGDSLHEHIANLAGSPAIKKGILQTVKVVDELVKVMGRHKPENIVIEMARENQTTQKGQKNSRERMKRIEEGIKELGSQILKEHPVENTQLQNEKLYLYYLQNGRDMYVDQELDINRLSDYDVDHIVPQSFLKDDSIDNKVLTRSDKARGKSDNVPSEEVVKKMKNYWRQLLNAKLITQRKFDNLTKAERGGLSELDKAGFIKRQLVETRQITKHVAQILDSRMNTKYDENDKLIREVKVITLKSKLVSDFRKDFQFYKVREINNYHHAHDAYLNAVVGTALIKKYPKLESEFVYGDYKVYDVRKMIAKSEQEIGKATAKYFFYSNIMNFFKTEITLANGEIRKRPLIETNGETGEIVWDKGRDFATVRKVLSMPQVNIVKKTEVQTGGFSKESILPKRNSDKLIARKKDWDPKKYGGFDSPTVAYSVLVVAKVEKGKSKKLKSVKELLGITIMERSSFEKNPIDFLEAKGYKEVKKDLIIKLPKYSLFELENGRKRMLASAGELQKGNELALPSKYVNFLYLASHYEKLKGSPEDNEQKQLFVEQHKHYLDEIIEQISEFSKRVILADANLDKVLSAYNKHRDKPIREQAENIIHLFTLTNLGAPAAFKYFDTTIDRKRYTSTKEVLDATLIHQSITGLYETRIDLSQLGGDGGPAPAPAPAPGGVLNLEEEYRLHEKPVPSSIDPSWLQLFPTVWAERAGMGLANQVPPVVVELRSGASPVAVRQYPMSKEAREGIRPHIQRFLDLGVLVPCQSPWNTPLLPVKKPGTNDYRPVQDLREINKRVQDIHPTVPNPYNLLSSLPPSHTWYSVLDLKDAFFCLKLHPNSQPLFAFEWRDPEKGNTGQLTWTRLPQGFKNSPTLFNEALHRDLAPFRALNPQVVLLQYVDDLLVAAPTYRDCKEGTQKLLQELSKLGYRVSAKKAQLCQKEVTYLGYLLKEGKRWLTPARKATVMKIPPPTTPRQVREFLGKAGFCRLFIPGFASLAAPLYPLTKPSIPFIWTEEHQKAFDRIKEALLSAPALALPDLTKPFTLYVDERAGVARGVLTQTLGPWRRPVAYLSKKLDPVASGWPTCLKAVAAVALLLKDADKLTLGQNVTVIASHSLESIVRQPPDRWMTNARMTHYQSLLLNERVSFAPPAVLNPATLLPVESEATPVHRCSEILAEETGTRRDLKDQPLPGVPAWYTDGSSFIAEGKRRAGAAIVDGKRTVWASSLPEGTSAQKAELVALTQALRLAEGKDINIYTDSRYAFATAHIHGAIYKQRGWLTSAGKDIKNKEEILALLEAIHLPKRVAIIHCPGHQKGNDPVATGNRRADEAAKQAALSTRVLAETTKPAGKRTADGSEFEKRTADGSEFESPKKKAKVE

SEQ ID NO: 917 - protein, 2093 aa, synthetic construct
MPAAKRVKLDGGDKKYSIGLDIGTNSVGWAVITDEYKVPSKKFKVLGNTDRHSIKKNLIGALLFDSGETAEATRLKRTARRRYTRRKNRICYLQEIFSNEMAKVDDSFFHRLEESFLVEEDKKHERHPIFGNIVDEVAYHEKYPTIYHLRKKLVDSTDKADLRLIYLALAHMIKFRGHFLIEGDLNPDNSDVDKLFIQLVQTYNQLFEENPINASGVDAKAILSARLSKSRRLENLIAQLPGEKKNGLFGNLIALSLGLTPNFKSNFDLAEDAKLQLSKDTYDDDLDNLLAQIGDQYADLFLAAKNLSDAILLSDILRVNTEITKAPLSASMIKRYDEHHQDLTLLKALVRQQLPEKYKEIFFDQSKNGYAGYIDGGASQEEFYKFIKPILEKMDGTEELLVKLNREDLLRKQRTFDNGSIPHQIHLGELHAILRRQEDFYPFLKDNREKIEKILTFRIPYYVGPLARGNSRFAWMTRKSEETITPWNFEEVVDKGASAQSFIERMTNFDKNLPNEKVLPKHSLLYEYFTVYNELTKVKYVTEGMRKPAFLSGEQKKAIVDLLFKTNRKVTVKQLKEDYFKKIECFDSVEISGVEDRFNASLGTYHDLLKIIKDKDFLDNEENEDILEDIVLTLTLFEDREMIEERLKTYAHLFDDKVMKQLKRRRYTGWGRLSRKLINGIRDKQSGKTILDFLKSDGFANRNFMQLIHDDSLTFKEDIQKAQVSGQGDSLHEHIANLAGSPAIKKGILQTVKVVDELVKVMGRHKPENIVIEMARENQTTQKGQKNSRERMKRIEEGIKELGSQILKEHPVENTQLQNEKLYLYYLQNGRDMYVDQELDINRLSDYDVDHIVPQSFLKDDSIDNKVLTRSDKARGKSDNVPSEEVVKKMKNYWRQLLNAKLITQRKFDNLTKAERGGLSELDKAGFIKRQLVETRQITKHVAQILDSRMNTKYDENDKLIREVKVITLKSKLVSDFRKDFQFYKVREINNYHHAHDAYLNAVVGTALIKKYPKLESEFVYGDYKVYDVRKMIAKSEQEIGKATAKYFFYSNIMNFFKTEITLANGEIRKRPLIETNGETGEIVWDKGRDFATVRKVLSMPQVNIVKKTEVQTGGFSKESILPKRNSDKLIARKKDWDPKKYGGFDSPTVAYSVLVVAKVEKGKSKKLKSVKELLGITIMERSSFEKNPIDFLEAKGYKEVKKDLIIKLPKYSLFELENGRKRMLASAGELQKGNELALPSKYVNFLYLASHYEKLKGSPEDNEQKQLFVEQHKHYLDEIIEQISEFSKRVILADANLDKVLSAYNKHRDKPIREQAENIIHLFTLTNLGAPAAFKYFDTTIDRKRYTSTKEVLDATLIHQSITGLYETRIDLSQLGGDGGEAAAKEAAAKGGVLNLEEEYRLHEKPVPSSIDPSWLQLFPTVWAERAGMGLANQVPPVVVELRSGASPVAVRQYPMSKEAREGIRPHIQRFLDLGVLVPCQSPWNTPLLPVKKPGTNDYRPVQDLREINKRVQDIHPTVPNPYNLLSSLPPSHTWYSVLDLKDAFFCLKLHPNSQPLFAFEWRDPEKGNTGQLTWTRLPQGFKNSPTLFNEALHRDLAPFRALNPQVVLLQYVDDLLVAAPTYRDCKEGTQKLLQELSKLGYRVSAKKAQLCQKEVTYLGYLLKEGKRWLTPARKATVMKIPPPTTPRQVREFLGKAGFCRLFIPGFASLAAPLYPLTKPSIPFIWTEEHQKAFDRIKEALLSAPALALPDLTKPFTLYVDERAGVARGVLTQTLGPWRRPVAYLSKKLDPVASGWPTCLKAVAAVALLLKDADKLTLGQNVTVIASHSLESIVRQPPDRWMTNARMTHYQSLLLNERVSFAPPAVLNPATLLPVESEATPVHRCSEILAEETGTRRDLKDQPLPGVPAWYTDGSSFIAEGKRRAGAAIVDGKRTVWASSLPEGTSAQKAELVALTQALRLAEGKDINIYTDSRYAFATAHIHGAIYKQRGWLTSAGKDIKNKEEILALLEAIHLPKRVAIIHCPGHQKGNDPVATGNRRADEAAKQAALSTRVLAETTKPAGKRTADGSEFEKRTADGSEFESPKKKAKVE

SEQ ID NO: 918 - protein, 2092 aa, synthetic construct
MPAAKRVKLDGGDKKYSIGLDIGTNSVGWAVITDEYKVPSKKFKVLGNTDRHSIKKNLIGALLFDSGETAEATRLKRTARRRYTRRKNRICYLQEIFSNEMAKVDDSFFHRLEESFLVEEDKKHERHPIFGNIVDEVAYHEKYPTIYHLRKKLVDSTDKADLRLIYLALAHMIKFRGHFLIEGDLNPDNSDVDKLFIQLVQTYNQLFEENPINASGVDAKAILSARLSKSRRLENLIAQLPGEKKNGLFGNLIALSLGLTPNFKSNFDLAEDAKLQLSKDTYDDDLDNLLAQIGDQYADLFLAAKNLSDAILLSDILRVNTEITKAPLSASMIKRYDEHHQDLTLLKALVRQQLPEKYKEIFFDQSKNGYAGYIDGGASQEEFYKFIKPILEKMDGTEELLVKLNREDLLRKQRTFDNGSIPHQIHLGELHAILRRQEDFYPFLKDNREKIEKILTFRIPYYVGPLARGNSRFAWMTRKSEETITPWNFEEVVDKGASAQSFIERMTNFDKNLPNEKVLPKHSLLYEYFTVYNELTKVKYVTEGMRKPAFLSGEQKKAIVDLLFKTNRKVTVKQLKEDYFKKIECFDSVEISGVEDRFNASLGTYHDLLKIIKDKDFLDNEENEDILEDIVLTLTLFEDREMIEERLKTYAHLFDDKVMKQLKRRRYTGWGRLSRKLINGIRDKQSGKTILDFLKSDGFANRNFMQLIHDDSLTFKEDIQKAQVSGQGDSLHEHIANLAGSPAIKKGILQTVKVVDELVKVMGRHKPENIVIEMARENQTTQKGQKNSRERMKRIEEGIKELGSQILKEHPVENTQLQNEKLYLYYLQNGRDMYVDQELDINRLSDYDVDHIVPQSFLKDDSIDNKVLTRSDKARGKSDNVPSEEVVKKMKNYWRQLLNAKLITQRKFDNLTKAERGGLSELDKAGFIKRQLVETRQITKHVAQILDSRMNTKYDENDKLIREVKVITLKSKLVSDFRKDFQFYKVREINNYHHAHDAYLNAVVGTALIKKYPKLESEFVYGDYKVYDVRKMIAKSEQEIGKATAKYFFYSNIMNFFKTEITLANGEIRKRPLIETNGETGEIVWDKGRDFATVRKVLSMPQVNIVKKTEVQTGGFSKESILPKRNSDKLIARKKDWDPKKYGGFDSPTVAYSVLVVAKVEKGKSKKLKSVKELLGITIMERSSFEKNPIDFLEAKGYKEVKKDLIIKLPKYSLFELENGRKRMLASAGELQKGNELALPSKYVNFLYLASHYEKLKGSPEDNEQKQLFVEQHKHYLDEIIEQISEFSKRVILADANLDKVLSAYNKHRDKPIREQAENIIHLFTLTNLGAPAAFKYFDTTIDRKRYTSTKEVLDATLIHQSITGLYETRIDLSQLGGDGGGSSGGGGGSGGVLNLEEEYRLHEKPVPSSIDPSWLQLFPTVWAERAGMGLANQVPPVVVELRSGASPVAVRQYPMSKEAREGIRPHIQRFLDLGVLVPCQSPWNTPLLPVKKPGTNDYRPVQDLREINKRVQDIHPTVPNPYNLLSSLPPSHTWYSVLDLKDAFFCLKLHPNSQPLFAFEWRDPEKGNTGQLTWTRLPQGFKNSPTLFNEALHRDLAPFRALNPQVVLLQYVDDLLVAAPTYRDCKEGTQKLLQELSKLGYRVSAKKAQLCQKEVTYLGYLLKEGKRWLTPARKATVMKIPPPTTPRQVREFLGKAGFCRLFIPGFASLAAPLYPLTKPSIPFIWTEEHQKAFDRIKEALLSAPALALPDLTKPFTLYVDERAGVARGVLTQTLGPWRRPVAYLSKKLDPVASGWPTCLKAVAAVALLLKDADKLTLGQNVTVIASHSLESIVRQPPDRWMTNARMTHYQSLLLNERVSFAPPAVLNPATLLPVESEATPVHRCSEILAEETGTRRDLKDQPLPGVPAWYTDGSSFIAEGKRRAGAAIVDGKRTVWASSLPEGTSAQKAELVALTQALRLAEGKDINIYTDSRYAFATAHIHGAIYKQRGWLTSAGKDIKNKEEILALLEAIHLPKRVAIIHCPGHQKGNDPVATGNRRADEAAKQAALSTRVLAETTKPAGKRTADGSEFEKRTADGSEFESPKKKAKVE

SEQ ID NO: 919 - protein, 2094 aa, synthetic construct
MPAAKRVKLDGGDKKYSIGLDIGTNSVGWAVITDEYKVPSKKFKVLGNTDRHSIKKNLIGALLFDSGETAEATRLKRTARRRYTRRKNRICYLQEIFSNEMAKVDDSFFHRLEESFLVEEDKKHERHPIFGNIVDEVAYHEKYPTIYHLRKKLVDSTDKADLRLIYLALAHMIKFRGHFLIEGDLNPDNSDVDKLFIQLVQTYNQLFEENPINASGVDAKAILSARLSKSRRLENLIAQLPGEKKNGLFGNLIALSLGLTPNFKSNFDLAEDAKLQLSKDTYDDDLDNLLAQIGDQYADLFLAAKNLSDAILLSDILRVNTEITKAPLSASMIKRYDEHHQDLTLLKALVRQQLPEKYKEIFFDQSKNGYAGYIDGGASQEEFYKFIKPILEKMDGTEELLVKLNREDLLRKQRTFDNGSIPHQIHLGELHAILRRQEDFYPFLKDNREKIEKILTFRIPYYVGPLARGNSRFAWMTRKSEETITPWNFEEVVDKGASAQSFIERMTNFDKNLPNEKVLPKHSLLYEYFTVYNELTKVKYVTEGMRKPAFLSGEQKKAIVDLLFKTNRKVTVKQLKEDYFKKIECFDSVEISGVEDRFNASLGTYHDLLKIIKDKDFLDNEENEDILEDIVLTLTLFEDREMIEERLKTYAHLFDDKVMKQLKRRRYTGWGRLSRKLINGIRDKQSGKTILDFLKSDGFANRNFMQLIHDDSLTFKEDIQKAQVSGQGDSLHEHIANLAGSPAIKKGILQTVKVVDELVKVMGRHKPENIVIEMARENQTTQKGQKNSRERMKRIEEGIKELGSQILKEHPVENTQLQNEKLYLYYLQNGRDMYVDQELDINRLSDYDVDHIVPQSFLKDDSIDNKVLTRSDKARGKSDNVPSEEVVKKMKNYWRQLLNAKLITQRKFDNLTKAERGGLSELDKAGFIKRQLVETRQITKHVAQILDSRMNTKYDENDKLIREVKVITLKSKLVSDFRKDFQFYKVREINNYHHAHDAYLNAVVGTALIKKYPKLESEFVYGDYKVYDVRKMIAKSEQEIGKATAKYFFYSNIMNFFKTEITLANGEIRKRPLIETNGETGEIVWDKGRDFATVRKVLSMPQVNIVKKTEVQTGGFSKESILPKRNSDKLIARKKDWDPKKYGGFDSPTVAYSVLVVAKVEKGKSKKLKSVKELLGITIMERSSFEKNPIDFLEAKGYKEVKKDLIIKLPKYSLFELENGRKRMLASAGELQKGNELALPSKYVNFLYLASHYEKLKGSPEDNEQKQLFVEQHKHYLDEIIEQISEFSKRVILADANLDKVLSAYNKHRDKPIREQAENIIHLFTLTNLGAPAAFKYFDTTIDRKRYTSTKEVLDATLIHQSITGLYETRIDLSQLGGDGGEAAAKGSSPAPGGVLNLEEEYRLHEKPVPSSIDPSWLQLFPTVWAERAGMGLANQVPPVVVELRSGASPVAVRQYPMSKEAREGIRPHIQRFLDLGVLVPCQSPWNTPLLPVKKPGTNDYRPVQDLREINKRVQDIHPTVPNPYNLLSSLPPSHTWYSVLDLKDAFFCLKLHPNSQPLFAFEWRDPEKGNTGQLTWTRLPQGFKNSPTLFNEALHRDLAPFRALNPQVVLLQYVDDLLVAAPTYRDCKEGTQKLLQELSKLGYRVSAKKAQLCQKEVTYLGYLLKEGKRWLTPARKATVMKIPPPTTPRQVREFLGKAGFCRLFIPGFASLAAPLYPLTKPSIPFIWTEEHQKAFDRIKEALLSAPALALPDLTKPFTLYVDERAGVARGVLTQTLGPWRRPVAYLSKKLDPVASGWPTCLKAVAAVALLLKDADKLTLGQNVTVIASHSLESIVRQPPDRWMTNARMTHYQSLLLNERVSFAPPAVLNPATLLPVESEATPVHRCSEILAEETGTRRDLKDQPLPGVPAWYTDGSSFIAEGKRRAGAAIVDGKRTVWASSLPEGTSAQKAELVALTQALRLAEGKDINIYTDSRYAFATAHIHGAIYKQRGWLTSAGKDIKNKEEILALLEAIHLPKRVAIIHCPGHQKGNDPVATGNRRADEAAKQAALSTRVLAETTKPAGKRTADGSEFEKRTADGSEFESPKKKAKVE

SEQ ID NO: 920 - protein, 2094 aa, synthetic construct
MPAAKRVKLDGGDKKYSIGLDIGTNSVGWAVITDEYKVPSKKFKVLGNTDRHSIKKNLIGALLFDSGETAEATRLKRTARRRYTRRKNRICYLQEIFSNEMAKVDDSFFHRLEESFLVEEDKKHERHPIFGNIVDEVAYHEKYPTIYHLRKKLVDSTDKADLRLIYLALAHMIKFRGHFLIEGDLNPDNSDVDKLFIQLVQTYNQLFEENPINASGVDAKAILSARLSKSRRLENLIAQLPGEKKNGLFGNLIALSLGLTPNFKSNFDLAEDAKLQLSKDTYDDDLDNLLAQIGDQYADLFLAAKNLSDAILLSDILRVNTEITKAPLSASMIKRYDEHHQDLTLLKALVRQQLPEKYKEIFFDQSKNGYAGYIDGGASQEEFYKFIKPILEKMDGTEELLVKLNREDLLRKQRTFDNGSIPHQIHLGELHAILRRQEDFYPFLKDNREKIEKILTFRIPYYVGPLARGNSRFAWMTRKSEETITPWNFEEVVDKGASAQSFIERMTNFDKNLPNEKVLPKHSLLYEYFTVYNELTKVKYVTEGMRKPAFLSGEQKKAIVDLLFKTNRKVTVKQLKEDYFKKIECFDSVEISGVEDRFNASLGTYHDLLKIIKDKDFLDNEENEDILEDIVLTLTLFEDREMIEERLKTYAHLFDDKVMKQLKRRRYTGWGRLSRKLINGIRDKQSGKTILDFLKSDGFANRNFMQLIHDDSLTFKEDIQKAQVSGQGDSLHEHIANLAGSPAIKKGILQTVKVVDELVKVMGRHKPENIVIEMARENQTTQKGQKNSRERMKRIEEGIKELGSQILKEHPVENTQLQNEKLYLYYLQNGRDMYVDQELDINRLSDYDVDHIVPQSFLKDDSIDNKVLTRSDKARGKSDNVPSEEVVKKMKNYWRQLLNAKLITQRKFDNLTKAERGGLSELDKAGFIKRQLVETRQITKHVAQILDSRMNTKYDENDKLIREVKVITLKSKLVSDFRKDFQFYKVREINNYHHAHDAYLNAVVGTALIKKYPKLESEFVYGDYKVYDVRKMIAKSEQEIGKATAKYFFYSNIMNFFKTEITLANGEIRKRPLIETNGETGEIVWDKGRDFATVRKVLSMPQVNIVKKTEVQTGGFSKESILPKRNSDKLIARKKDWDPKKYGGFDSPTVAYSVLVVAKVEKGKSKKLKSVKELLGITIMERSSFEKNPIDFLEAKGYKEVKKDLIIKLPKYSLFELENGRKRMLASAGELQKGNELALPSKYVNFLYLASHYEKLKGSPEDNEQKQLFVEQHKHYLDEIIEQISEFSKRVILADANLDKVLSAYNKHRDKPIREQAENIIHLFTLTNLGAPAAFKYFDTTIDRKRYTSTKEVLDATLIHQSITGLYETRIDLSQLGGDGGGSSGGGEAAAKGGVLNLEEEYRLHEKPVPSSIDPSWLQLFPTVWAERAGMGLANQVPPVVVELRSGASPVAVRQYPMSKEAREGIRPHIQRFLDLGVLVPCQSPWNTPLLPVKKPGTNDYRPVQDLREINKRVQDIHPTVPNPYNLLSSLPPSHTWYSVLDLKDAFFCLKLHPNSQPLFAFEWRDPEKGNTGQLTWTRLPQGFKNSPTLFNEALHRDLAPFRALNPQVVLLQYVDDLLVAAPTYRDCKEGTQKLLQELSKLGYRVSAKKAQLCQKEVTYLGYLLKEGKRWLTPARKATVMKIPPPTTPRQVREFLGKAGFCRLFIPGFASLAAPLYPLTKPSIPFIWTEEHQKAFDRIKEALLSAPALALPDLTKPFTLYVDERAGVARGVLTQTLGPWRRPVAYLSKKLDPVASGWPTCLKAVAAVALLLKDADKLTLGQNVTVIASHSLESIVRQPPDRWMTNARMTHYQSLLLNERVSFAPPAVLNPATLLPVESEATPVHRCSEILAEETGTRRDLKDQPLPGVPAWYTDGSSFIAEGKRRAGAAIVDGKRTVWASSLPEGTSAQKAELVALTQALRLAEGKDINIYTDSRYAFATAHIHGAIYKQRGWLTSAGKDIKNKEEILALLEAIHLPKRVAIIHCPGHQKGNDPVATGNRRADEAAKQAALSTRVLAETTKPAGKRTADGSEFEKRTADGSEFESPKKKAKVE

SEQ ID NO: 921 - protein, 2094 aa, synthetic construct
MPAAKRVKLDGGDKKYSIGLDIGTNSVGWAVITDEYKVPSKKFKVLGNTDRHSIKKNLIGALLFDSGETAEATRLKRTARRRYTRRKNRICYLQEIFSNEMAKVDDSFFHRLEESFLVEEDKKHERHPIFGNIVDEVAYHEKYPTIYHLRKKLVDSTDKADLRLIYLALAHMIKFRGHFLIEGDLNPDNSDVDKLFIQLVQTYNQLFEENPINASGVDAKAILSARLSKSRRLENLIAQLPGEKKNGLFGNLIALSLGLTPNFKSNFDLAEDAKLQLSKDTYDDDLDNLLAQIGDQYADLFLAAKNLSDAILLSDILRVNTEITKAPLSASMIKRYDEHHQDLTLLKALVRQQLPEKYKEIFFDQSKNGYAGYIDGGASQEEFYKFIKPILEKMDGTEELLVKLNREDLLRKQRTFDNGSIPHQIHLGELHAILRRQEDFYPFLKDNREKIEKILTFRIPYYVGPLARGNSRFAWMTRKSEETITPWNFEEVVDKGASAQSFIERMTNFDKNLPNEKVLPKHSLLYEYFTVYNELTKVKYVTEGMRKPAFLSGEQKKAIVDLLFKTNRKVTVKQLKEDYFKKIECFDSVEISGVEDRFNASLGTYHDLLKIIKDKDFLDNEENEDILEDIVLTLTLFEDREMIEERLKTYAHLFDDKVMKQLKRRRYTGWGRLSRKLINGIRDKQSGKTILDFLKSDGFANRNFMQLIHDDSLTFKEDIQKAQVSGQGDSLHEHIANLAGSPAIKKGILQTVKVVDELVKVMGRHKPENIVIEMARENQTTQKGQKNSRERMKRIEEGIKELGSQILKEHPVENTQLQNEKLYLYYLQNGRDMYVDQELDINRLSDYDVDHIVPQSFLKDDSIDNKVLTRSDKARGKSDNVPSEEVVKKMKNYWRQLLNAKLITQRKFDNLTKAERGGLSELDKAGFIKRQLVETRQITKHVAQILDSRMNTKYDENDKLIREVKVITLKSKLVSDFRKDFQFYKVREINNYHHAHDAYLNAVVGTALIKKYPKLESEFVYGDYKVYDVRKMIAKSEQEIGKATAKYFFYSNIMNFFKTEITLANGEIRKRPLIETNGETGEIVWDKGRDFATVRKVLSMPQVNIVKKTEVQTGGFSKESILPKRNSDKLIARKKDWDPKKYGGFDSPTVAYSVLVVAKVEKGKSKKLKSVKELLGITIMERSSFEKNPIDFLEAKGYKEVKKDLIIKLPKYSLFELENGRKRMLASAGELQKGNELALPSKYVNFLYLASHYEKLKGSPEDNEQKQLFVEQHKHYLDEIIEQISEFSKRVILADANLDKVLSAYNKHRDKPIREQAENIIHLFTLTNLGAPAAFKYFDTTIDRKRYTSTKEVLDATLIHQSITGLYETRIDLSQLGGDGGEAAAKPAPGGSGGVLNLEEEYRLHEKPVPSSIDPSWLQLFPTVWAERAGMGLANQVPPVVVELRSGASPVAVRQYPMSKEAREGIRPHIQRFLDLGVLVPCQSPWNTPLLPVKKPGTNDYRPVQDLREINKRVQDIHPTVPNPYNLLSSLPPSHTWYSVLDLKDAFFCLKLHPNSQPLFAFEWRDPEKGNTGQLTWTRLPQGFKNSPTLFNEALHRDLAPFRALNPQVVLLQYVDDLLVAAPTYRDCKEGTQKLLQELSKLGYRVSAKKAQLCQKEVTYLGYLLKEGKRWLTPARKATVMKIPPPTTPRQVREFLGKAGFCRLFIPGFASLAAPLYPLTKPSIPFIWTEEHQKAFDRIKEALLSAPALALPDLTKPFTLYVDERAGVARGVLTQTLGPWRRPVAYLSKKLDPVASGWPTCLKAVAAVALLLKDADKLTLGQNVTVIASHSLESIVRQPPDRWMTNARMTHYQSLLLNERVSFAPPAVLNPATLLPVESEATPVHRCSEILAEETGTRRDLKDQPLPGVPAWYTDGSSFIAEGKRRAGAAIVDGKRTVWASSLPEGTSAQKAELVALTQALRLAEGKDINIYTDSRYAFATAHIHGAIYKQRGWLTSAGKDIKNKEEILALLEAIHLPKRVAIIHCPGHQKGNDPVATGNRRADEAAKQAALSTRVLAETTKPAGKRTADGSEFEKRTADGSEFESPKKKAKVE

SEQ ID NO: 922 - protein, 2092 aa, synthetic construct
MPAAKRVKLDGGDKKYSIGLDIGTNSVGWAVITDEYKVPSKKFKVLGNTDRHSIKKNLIGALLFDSGETAEATRLKRTARRRYTRRKNRICYLQEIFSNEMAKVDDSFFHRLEESFLVEEDKKHERHPIFGNIVDEVAYHEKYPTIYHLRKKLVDSTDKADLRLIYLALAHMIKFRGHFLIEGDLNPDNSDVDKLFIQLVQTYNQLFEENPINASGVDAKAILSARLSKSRRLENLIAQLPGEKKNGLFGNLIALSLGLTPNFKSNFDLAEDAKLQLSKDTYDDDLDNLLAQIGDQYADLFLAAKNLSDAILLSDILRVNTEITKAPLSASMIKRYDEHHQDLTLLKALVRQQLPEKYKEIFFDQSKNGYAGYIDGGASQEEFYKFIKPILEKMDGTEELLVKLNREDLLRKQRTFDNGSIPHQIHLGELHAILRRQEDFYPFLKDNREKIEKILTFRIPYYVGPLARGNSRFAWMTRKSEETITPWNFEEVVDKGASAQSFIERMTNFDKNLPNEKVLPKHSLLYEYFTVYNELTKVKYVTEGMRKPAFLSGEQKKAIVDLLFKTNRKVTVKQLKEDYFKKIECFDSVEISGVEDRFNASLGTYHDLLKIIKDKDFLDNEENEDILEDIVLTLTLFEDREMIEERLKTYAHLFDDKVMKQLKRRRYTGWGRLSRKLINGIRDKQSGKTILDFLKSDGFANRNFMQLIHDDSLTFKEDIQKAQVSGQGDSLHEHIANLAGSPAIKKGILQTVKVVDELVKVMGRHKPENIVIEMARENQTTQKGQKNSRERMKRIEEGIKELGSQILKEHPVENTQLQNEKLYLYYLQNGRDMYVDQELDINRLSDYDVDHIVPQSFLKDDSIDNKVLTRSDKARGKSDNVPSEEVVKKMKNYWRQLLNAKLITQRKFDNLTKAERGGLSELDKAGFIKRQLVETRQITKHVAQILDSRMNTKYDENDKLIREVKVITLKSKLVSDFRKDFQFYKVREINNYHHAHDAYLNAVVGTALIKKYPKLESEFVYGDYKVYDVRKMIAKSEQEIGKATAKYFFYSNIMNFFKTEITLANGEIRKRPLIETNGETGEIVWDKGRDFATVRKVLSMPQVNIVKKTEVQTGGFSKESILPKRNSDKLIARKKDWDPKKYGGFDSPTVAYSVLVVAKVEKGKSKKLKSVKELLGITIMERSSFEKNPIDFLEAKGYKEVKKDLIIKLPKYSLFELENGRKRMLASAGELQKGNELALPSKYVNFLYLASHYEKLKGSPEDNEQKQLFVEQHKHYLDEIIEQISEFSKRVILADANLDKVLSAYNKHRDKPIREQAENIIHLFTLTNLGAPAAFKYFDTTIDRKRYTSTKEVLDATLIHQSITGLYETRIDLSQLGGDGGGSSPAPGGGGGVLNLEEEYRLHEKPVPSSIDPSWLQLFPTVWAERAGMGLANQVPPVVVELRSGASPVAVRQYPMSKEAREGIRPHIQRFLDLGVLVPCQSPWNTPLLPVKKPGTNDYRPVQDLREINKRVQDIHPTVPNPYNLLSSLPPSHTWYSVLDLKDAFFCLKLHPNSQPLFAFEWRDPEKGNTGQLTWTRLPQGFKNSPTLFNEALHRDLAPFRALNPQVVLLQYVDDLLVAAPTYRDCKEGTQKLLQELSKLGYRVSAKKAQLCQKEVTYLGYLLKEGKRWLTPARKATVMKIPPPTTPRQVREFLGKAGFCRLFIPGFASLAAPLYPLTKPSIPFIWTEEHQKAFDRIKEALLSAPALALPDLTKPFTLYVDERAGVARGVLTQTLGPWRRPVAYLSKKLDPVASGWPTCLKAVAAVALLLKDADKLTLGQNVTVIASHSLESIVRQPPDRWMTNARMTHYQSLLLNERVSFAPPAVLNPATLLPVESEATPVHRCSEILAEETGTRRDLKDQPLPGVPAWYTDGSSFIAEGKRRAGAAIVDGKRTVWASSLPEGTSAQKAELVALTQALRLAEGKDINIYTDSRYAFATAHIHGAIYKQRGWLTSAGKDIKNKEEILALLEAIHLPKRVAIIHCPGHQKGNDPVATGNRRADEAAKQAALSTRVLAETTKPAGKRTADGSEFEKRTADGSEFESPKKKAKVE

SEQ ID NO: 923 - protein, 2101 aa, synthetic construct
MPAAKRVKLDGGDKKYSIGLDIGTNSVGWAVITDEYKVPSKKFKVLGNTDRHSIKKNLIGALLFDSGETAEATRLKRTARRRYTRRKNRICYLQEIFSNEMAKVDDSFFHRLEESFLVEEDKKHERHPIFGNIVDEVAYHEKYPTIYHLRKKLVDSTDKADLRLIYLALAHMIKFRGHFLIEGDLNPDNSDVDKLFIQLVQTYNQLFEENPINASGVDAKAILSARLSKSRRLENLIAQLPGEKKNGLFGNLIALSLGLTPNFKSNFDLAEDAKLQLSKDTYDDDLDNLLAQIGDQYADLFLAAKNLSDAILLSDILRVNTEITKAPLSASMIKRYDEHHQDLTLLKALVRQQLPEKYKEIFFDQSKNGYAGYIDGGASQEEFYKFIKPILEKMDGTEELLVKLNREDLLRKQRTFDNGSIPHQIHLGELHAILRRQEDFYPFLKDNREKIEKILTFRIPYYVGPLARGNSRFAWMTRKSEETITPWNFEEVVDKGASAQSFIERMTNFDKNLPNEKVLPKHSLLYEYFTVYNELTKVKYVTEGMRKPAFLSGEQKKAIVDLLFKTNRKVTVKQLKEDYFKKIECFDSVEISGVEDRFNASLGTYHDLLKIIKDKDFLDNEENEDILEDIVLTLTLFEDREMIEERLKTYAHLFDDKVMKQLKRRRYTGWGRLSRKLINGIRDKQSGKTILDFLKSDGFANRNFMQLIHDDSLTFKEDIQKAQVSGQGDSLHEHIANLAGSPAIKKGILQTVKVVDELVKVMGRHKPENIVIEMARENQTTQKGQKNSRERMKRIEEGIKELGSQILKEHPVENTQLQNEKLYLYYLQNGRDMYVDQELDINRLSDYDVDHIVPQSFLKDDSIDNKVLTRSDKARGKSDNVPSEEVVKKMKNYWRQLLNAKLITQRKFDNLTKAERGGLSELDKAGFIKRQLVETRQITKHVAQILDSRMNTKYDENDKLIREVKVITLKSKLVSDFRKDFQFYKVREINNYHHAHDAYLNAVVGTALIKKYPKLESEFVYGDYKVYDVRKMIAKSEQEIGKATAKYFFYSNIMNFFKTEITLANGEIRKRPLIETNGETGEIVWDKGRDFATVRKVLSMPQVNIVKKTEVQTGGFSKESILPKRNSDKLIARKKDWDPKKYGGFDSPTVAYSVLVVAKVEKGKSKKLKSVKELLGITIMERSSFEKNPIDFLEAKGYKEVKKDLIIKLPKYSLFELENGRKRMLASAGELQKGNELALPSKYVNFLYLASHYEKLKGSPEDNEQKQLFVEQHKHYLDEIIEQISEFSKRVILADANLDKVLSAYNKHRDKPIREQAENIIHLFTLTNLGAPAAFKYFDTTIDRKRYTSTKEVLDATLIHQSITGLYETRIDLSQLGGDGGGSSGSSGSSGSSGSSGSSGGVLNLEEEYRLHEKPVPSSIDPSWLQLFPTVWAERAGMGLANQVPPVVVELRSGASPVAVRQYPMSKEAREGIRPHIQRFLDLGVLVPCQSPWNTPLLPVKKPGTNDYRPVQDLREINKRVQDIHPTVPNPYNLLSSLPPSHTWYSVLDLKDAFFCLKLHPNSQPLFAFEWRDPEKGNTGQLTWTRLPQGFKNSPTLFNEALHRDLAPFRALNPQVVLLQYVDDLLVAAPTYRDCKEGTQKLLQELSKLGYRVSAKKAQLCQKEVTYLGYLLKEGKRWLTPARKATVMKIPPPTTPRQVREFLGKAGFCRLFIPGFASLAAPLYPLTKPSIPFIWTEEHQKAFDRIKEALLSAPALALPDLTKPFTLYVDERAGVARGVLTQTLGPWRRPVAYLSKKLDPVASGWPTCLKAVAAVALLLKDADKLTLGQNVTVIASHSLESIVRQPPDRWMTNARMTHYQSLLLNERVSFAPPAVLNPATLLPVESEATPVHRCSEILAEETGTRRDLKDQPLPGVPAWYTDGSSFIAEGKRRAGAAIVDGKRTVWASSLPEGTSAQKAELVALTQALRLAEGKDINIYTDSRYAFATAHIHGAIYKQRGWLTSAGKDIKNKEEILALLEAIHLPKRVAIIHCPGHQKGNDPVATGNRRADEAAKQAALSTRVLAETTKPAGKRTADGSEFEKRTADGSEFESPKKKAKVE

SEQ ID NO: 924 - protein, 2092 aa, synthetic construct
MPAAKRVKLDGGDKKYSIGLDIGTNSVGWAVITDEYKVPSKKFKVLGNTDRHSIKKNLIGALLFDSGETAEATRLKRTARRRYTRRKNRICYLQEIFSNEMAKVDDSFFHRLEESFLVEEDKKHERHPIFGNIVDEVAYHEKYPTIYHLRKKLVDSTDKADLRLIYLALAHMIKFRGHFLIEGDLNPDNSDVDKLFIQLVQTYNQLFEENPINASGVDAKAILSARLSKSRRLENLIAQLPGEKKNGLFGNLIALSLGLTPNFKSNFDLAEDAKLQLSKDTYDDDLDNLLAQIGDQYADLFLAAKNLSDAILLSDILRVNTEITKAPLSASMIKRYDEHHQDLTLLKALVRQQLPEKYKEIFFDQSKNGYAGYIDGGASQEEFYKFIKPILEKMDGTEELLVKLNREDLLRKQRTFDNGSIPHQIHLGELHAILRRQEDFYPFLKDNREKIEKILTFRIPYYVGPLARGNSRFAWMTRKSEETITPWNFEEVVDKGASAQSFIERMTNFDKNLPNEKVLPKHSLLYEYFTVYNELTKVKYVTEGMRKPAFLSGEQKKAIVDLLFKTNRKVTVKQLKEDYFKKIECFDSVEISGVEDRFNASLGTYHDLLKIIKDKDFLDNEENEDILEDIVLTLTLFEDREMIEERLKTYAHLFDDKVMKQLKRRRYTGWGRLSRKLINGIRDKQSGKTILDFLKSDGFANRNFMQLIHDDSLTFKEDIQKAQVSGQGDSLHEHIANLAGSPAIKKGILQTVKVVDELVKVMGRHKPENIVIEMARENQTTQKGQKNSRERMKRIEEGIKELGSQILKEHPVENTQLQNEKLYLYYLQNGRDMYVDQELDINRLSDYDVDHIVPQSFLKDDSIDNKVLTRSDKARGKSDNVPSEEVVKKMKNYWRQLLNAKLITQRKFDNLTKAERGGLSELDKAGFIKRQLVETRQITKHVAQILDSRMNTKYDENDKLIREVKVITLKSKLVSDFRKDFQFYKVREINNYHHAHDAYLNAVVGTALIKKYPKLESEFVYGDYKVYDVRKMIAKSEQEIGKATAKYFFYSNIMNFFKTEITLANGEIRKRPLIETNGETGEIVWDKGRDFATVRKVLSMPQVNIVKKTEVQTGGFSKESILPKRNSDKLIARKKDWDPKKYGGFDSPTVAYSVLVVAKVEKGKSKKLKSVKELLGITIMERSSFEKNPIDFLEAKGYKEVKKDLIIKLPKYSLFELENGRKRMLASAGELQKGNELALPSKYVNFLYLASHYEKLKGSPEDNEQKQLFVEQHKHYLDEIIEQISEFSKRVILADANLDKVLSAYNKHRDKPIREQAENIIHLFTLTNLGAPAAFKYFDTTIDRKRYTSTKEVLDATLIHQSITGLYETRIDLSQLGGDGGGGSGSSPAPGGVLNLEEEYRLHEKPVPSSIDPSWLQLFPTVWAERAGMGLANQVPPVVVELRSGASPVAVRQYPMSKEAREGIRPHIQRFLDLGVLVPCQSPWNTPLLPVKKPGTNDYRPVQDLREINKRVQDIHPTVPNPYNLLSSLPPSHTWYSVLDLKDAFFCLKLHPNSQPLFAFEWRDPEKGNTGQLTWTRLPQGFKNSPTLFNEALHRDLAPFRALNPQVVLLQYVDDLLVAAPTYRDCKEGTQKLLQELSKLGYRVSAKKAQLCQKEVTYLGYLLKEGKRWLTPARKATVMKIPPPTTPRQVREFLGKAGFCRLFIPGFASLAAPLYPLTKPSIPFIWTEEHQKAFDRIKEALLSAPALALPDLTKPFTLYVDERAGVARGVLTQTLGPWRRPVAYLSKKLDPVASGWPTCLKAVAAVALLLKDADKLTLGQNVTVIASHSLESIVRQPPDRWMTNARMTHYQSLLLNERVSFAPPAVLNPATLLPVESEATPVHRCSEILAEETGTRRDLKDQPLPGVPAWYTDGSSFIAEGKRRAGAAIVDGKRTVWASSLPEGTSAQKAELVALTQALRLAEGKDINIYTDSRYAFATAHIHGAIYKQRGWLTSAGKDIKNKEEILALLEAIHLPKRVAIIHCPGHQKGNDPVATGNRRADEAAKQAALSTRVLAETTKPAGKRTADGSEFEKRTADGSEFESPKKKAKVE

SEQ ID NO: 925 - protein, 2094 aa, synthetic construct
MPAAKRVKLDGGDKKYSIGLDIGTNSVGWAVITDEYKVPSKKFKVLGNTDRHSIKKNLIGALLFDSGETAEATRLKRTARRRYTRRKNRICYLQEIFSNEMAKVDDSFFHRLEESFLVEEDKKHERHPIFGNIVDEVAYHEKYPTIYHLRKKLVDSTDKADLRLIYLALAHMIKFRGHFLIEGDLNPDNSDVDKLFIQLVQTYNQLFEENPINASGVDAKAILSARLSKSRRLENLIAQLPGEKKNGLFGNLIALSLGLTPNFKSNFDLAEDAKLQLSKDTYDDDLDNLLAQIGDQYADLFLAAKNLSDAILLSDILRVNTEITKAPLSASMIKRYDEHHQDLTLLKALVRQQLPEKYKEIFFDQSKNGYAGYIDGGASQEEFYKFIKPILEKMDGTEELLVKLNREDLLRKQRTFDNGSIPHQIHLGELHAILRRQEDFYPFLKDNREKIEKILTFRIPYYVGPLARGNSRFAWMTRKSEETITPWNFEEVVDKGASAQSFIERMTNFDKNLPNEKVLPKHSLLYEYFTVYNELTKVKYVTEGMRKPAFLSGEQKKAIVDLLFKTNRKVTVKQLKEDYFKKIECFDSVEISGVEDRFNASLGTYHDLLKIIKDKDFLDNEENEDILEDIVLTLTLFEDREMIEERLKTYAHLFDDKVMKQLKRRRYTGWGRLSRKLINGIRDKQSGKTILDFLKSDGFANRNFMQLIHDDSLTFKEDIQKAQVSGQGDSLHEHIANLAGSPAIKKGILQTVKVVDELVKVMGRHKPENIVIEMARENQTTQKGQKNSRERMKRIEEGIKELGSQILKEHPVENTQLQNEKLYLYYLQNGRDMYVDQELDINRLSDYDVDHIVPQSFLKDDSIDNKVLTRSDKARGKSDNVPSEEVVKKMKNYWRQLLNAKLITQRKFDNLTKAERGGLSELDKAGFIKRQLVETRQITKHVAQILDSRMNTKYDENDKLIREVKVITLKSKLVSDFRKDFQFYKVREINNYHHAHDAYLNAVVGTALIKKYPKLESEFVYGDYKVYDVRKMIAKSEQEIGKATAKYFFYSNIMNFFKTEITLANGEIRKRPLIETNGETGEIVWDKGRDFATVRKVLSMPQVNIVKKTEVQTGGFSKESILPKRNSDKLIARKKDWDPKKYGGFDSPTVAYSVLVVAKVEKGKSKKLKSVKELLGITIMERSSFEKNPIDFLEAKGYKEVKKDLIIKLPKYSLFELENGRKRMLASAGELQKGNELALPSKYVNFLYLASHYEKLKGSPEDNEQKQLFVEQHKHYLDEIIEQISEFSKRVILADANLDKVLSAYNKHRDKPIREQAENIIHLFTLTNLGAPAAFKYFDTTIDRKRYTSTKEVLDATLIHQSITGLYETRIDLSQLGGDGGGGGEAAAKGSSGGVLNLEEEYRLHEKPVPSSIDPSWLQLFPTVWAERAGMGLANQVPPVVVELRSGASPVAVRQYPMSKEAREGIRPHIQRFLDLGVLVPCQSPWNTPLLPVKKPGTNDYRPVQDLREINKRVQDIHPTVPNPYNLLSSLPPSHTWYSVLDLKDAFFCLKLHPNSQPLFAFEWRDPEKGNTGQLTWTRLPQGFKNSPTLFNEALHRDLAPFRALNPQVVLLQYVDDLLVAAPTYRDCKEGTQKLLQELSKLGYRVSAKKAQLCQKEVTYLGYLLKEGKRWLTPARKATVMKIPPPTTPRQVREFLGKAGFCRLFIPGFASLAAPLYPLTKPSIPFIWTEEHQKAFDRIKEALLSAPALALPDLTKPFTLYVDERAGVARGVLTQTLGPWRRPVAYLSKKLDPVASGWPTCLKAVAAVALLLKDADKLTLGQNVTVIASHSLESIVRQPPDRWMTNARMTHYQSLLLNERVSFAPPAVLNPATLLPVESEATPVHRCSEILAEETGTRRDLKDQPLPGVPAWYTDGSSFIAEGKRRAGAAIVDGKRTVWASSLPEGTSAQKAELVALTQALRLAEGKDINIYTDSRYAFATAHIHGAIYKQRGWLTSAGKDIKNKEEILALLEAIHLPKRVAIIHCPGHQKGNDPVATGNRRADEAAKQAALSTRVLAETTKPAGKRTADGSEFEKRTADGSEFESPKKKAKVE

SEQ ID NO: 926 - protein, 2087 aa, synthetic construct
MPAAKRVKLDGGDKKYSIGLDIGTNSVGWAVITDEYKVPSKKFKVLGNTDRHSIKKNLIGALLFDSGETAEATRLKRTARRRYTRRKNRICYLQEIFSNEMAKVDDSFFHRLEESFLVEEDKKHERHPIFGNIVDEVAYHEKYPTIYHLRKKLVDSTDKADLRLIYLALAHMIKFRGHFLIEGDLNPDNSDVDKLFIQLVQTYNQLFEENPINASGVDAKAILSARLSKSRRLENLIAQLPGEKKNGLFGNLIALSLGLTPNFKSNFDLAEDAKLQLSKDTYDDDLDNLLAQIGDQYADLFLAAKNLSDAILLSDILRVNTEITKAPLSASMIKRYDEHHQDLTLLKALVRQQLPEKYKEIFFDQSKNGYAGYIDGGASQEEFYKFIKPILEKMDGTEELLVKLNREDLLRKQRTFDNGSIPHQIHLGELHAILRRQEDFYPFLKDNREKIEKILTFRIPYYVGPLARGNSRFAWMTRKSEETITPWNFEEVVDKGASAQSFIERMTNFDKNLPNEKVLPKHSLLYEYFTVYNELTKVKYVTEGMRKPAFLSGEQKKAIVDLLFKTNRKVTVKQLKEDYFKKIECFDSVEISGVEDRFNASLGTYHDLLKIIKDKDFLDNEENEDILEDIVLTLTLFEDREMIEERLKTYAHLFDDKVMKQLKRRRYTGWGRLSRKLINGIRDKQSGKTILDFLKSDGFANRNFMQLIHDDSLTFKEDIQKAQVSGQGDSLHEHIANLAGSPAIKKGILQTVKVVDELVKVMGRHKPENIVIEMARENQTTQKGQKNSRERMKRIEEGIKELGSQILKEHPVENTQLQNEKLYLYYLQNGRDMYVDQELDINRLSDYDVDHIVPQSFLKDDSIDNKVLTRSDKARGKSDNVPSEEVVKKMKNYWRQLLNAKLITQRKFDNLTKAERGGLSELDKAGFIKRQLVETRQITKHVAQILDSRMNTKYDENDKLIREVKVITLKSKLVSDFRKDFQFYKVREINNYHHAHDAYLNAVVGTALIKKYPKLESEFVYGDYKVYDVRKMIAKSEQEIGKATAKYFFYSNIMNFFKTEITLANGEIRKRPLIETNGETGEIVWDKGRDFATVRKVLSMPQVNIVKKTEVQTGGFSKESILPKRNSDKLIARKKDWDPKKYGGFDSPTVAYSVLVVAKVEKGKSKKLKSVKELLGITIMERSSFEKNPIDFLEAKGYKEVKKDLIIKLPKYSLFELENGRKRMLASAGELQKGNELALPSKYVNFLYLASHYEKLKGSPEDNEQKQLFVEQHKHYLDEIIEQISEFSKRVILADANLDKVLSAYNKHRDKPIREQAENIIHLFTLTNLGAPAAFKYFDTTIDRKRYTSTKEVLDATLIHQSITGLYETRIDLSQLGGDGGGGGGGGVLNLEEEYRLHEKPVPSSIDPSWLQLFPTVWAERAGMGLANQVPPVVVELRSGASPVAVRQYPMSKEAREGIRPHIQRFLDLGVLVPCQSPWNTPLLPVKKPGTNDYRPVQDLREINKRVQDIHPTVPNPYNLLSSLPPSHTWYSVLDLKDAFFCLKLHPNSQPLFAFEWRDPEKGNTGQLTWTRLPQGFKNSPTLFNEALHRDLAPFRALNPQVVLLQYVDDLLVAAPTYRDCKEGTQKLLQELSKLGYRVSAKKAQLCQKEVTYLGYLLKEGKRWLTPARKATVMKIPPPTTPRQVREFLGKAGFCRLFIPGFASLAAPLYPLTKPSIPFIWTEEHQKAFDRIKEALLSAPALALPDLTKPFTLYVDERAGVARGVLTQTLGPWRRPVAYLSKKLDPVASGWPTCLKAVAAVALLLKDADKLTLGQNVTVIASHSLESIVRQPPDRWMTNARMTHYQSLLLNERVSFAPPAVLNPATLLPVESEATPVHRCSEILAEETGTRRDLKDQPLPGVPAWYTDGSSFIAEGKRRAGAAIVDGKRTVWASSLPEGTSAQKAELVALTQALRLAEGKDINIYTDSRYAFATAHIHGAIYKQRGWLTSAGKDIKNKEEILALLEAIHLPKRVAIIHCPGHQKGNDPVATGNRRADEAAKQAALSTRVLAETTKPAGKRTADGSEFEKRTADGSEFESPKKKAKVE

SEQ ID NO: 927 - protein, 2092 aa, synthetic construct
MPAAKRVKLDGGDKKYSIGLDIGTNSVGWAVITDEYKVPSKKFKVLGNTDRHSIKKNLIGALLFDSGETAEATRLKRTARRRYTRRKNRICYLQEIFSNEMAKVDDSFFHRLEESFLVEEDKKHERHPIFGNIVDEVAYHEKYPTIYHLRKKLVDSTDKADLRLIYLALAHMIKFRGHFLIEGDLNPDNSDVDKLFIQLVQTYNQLFEENPINASGVDAKAILSARLSKSRRLENLIAQLPGEKKNGLFGNLIALSLGLTPNFKSNFDLAEDAKLQLSKDTYDDDLDNLLAQIGDQYADLFLAAKNLSDAILLSDILRVNTEITKAPLSASMIKRYDEHHQDLTLLKALVRQQLPEKYKEIFFDQSKNGYAGYIDGGASQEEFYKFIKPILEKMDGTEELLVKLNREDLLRKQRTFDNGSIPHQIHLGELHAILRRQEDFYPFLKDNREKIEKILTFRIPYYVGPLARGNSRFAWMTRKSEETITPWNFEEVVDKGASAQSFIERMTNFDKNLPNEKVLPKHSLLYEYFTVYNELTKVKYVTEGMRKPAFLSGEQKKAIVDLLFKTNRKVTVKQLKEDYFKKIECFDSVEISGVEDRFNASLGTYHDLLKIIKDKDFLDNEENEDILEDIVLTLTLFEDREMIEERLKTYAHLFDDKVMKQLKRRRYTGWGRLSRKLINGIRDKQSGKTILDFLKSDGFANRNFMQLIHDDSLTFKEDIQKAQVSGQGDSLHEHIANLAGSPAIKKGILQTVKVVDELVKVMGRHKPENIVIEMARENQTTQKGQKNSRERMKRIEEGIKELGSQILKEHPVENTQLQNEKLYLYYLQNGRDMYVDQELDINRLSDYDVDHIVPQSFLKDDSIDNKVLTRSDKARGKSDNVPSEEVVKKMKNYWRQLLNAKLITQRKFDNLTKAERGGLSELDKAGFIKRQLVETRQITKHVAQILDSRMNTKYDENDKLIREVKVITLKSKLVSDFRKDFQFYKVREINNYHHAHDAYLNAVVGTALIKKYPKLESEFVYGDYKVYDVRKMIAKSEQEIGKATAKYFFYSNIMNFFKTEITLANGEIRKRPLIETNGETGEIVWDKGRDFATVRKVLSMPQVNIVKKTEVQTGGFSKESILPKRNSDKLIARKKDWDPKKYGGFDSPTVAYSVLVVAKVEKGKSKKLKSVKELLGITIMERSSFEKNPIDFLEAKGYKEVKKDLIIKLPKYSLFELENGRKRMLASAGELQKGNELALPSKYVNFLYLASHYEKLKGSPEDNEQKQLFVEQHKHYLDEIIEQISEFSKRVILADANLDKVLSAYNKHRDKPIREQAENIIHLFTLTNLGAPAAFKYFDTTIDRKRYTSTKEVLDATLIHQSITGLYETRIDLSQLGGDGGPAPGSSGGGGGVLNLEEEYRLHEKPVPSSIDPSWLQLFPTVWAERAGMGLANQVPPVVVELRSGASPVAVRQYPMSKEAREGIRPHIQRFLDLGVLVPCQSPWNTPLLPVKKPGTNDYRPVQDLREINKRVQDIHPTVPNPYNLLSSLPPSHTWYSVLDLKDAFFCLKLHPNSQPLFAFEWRDPEKGNTGQLTWTRLPQGFKNSPTLFNEALHRDLAPFRALNPQVVLLQYVDDLLVAAPTYRDCKEGTQKLLQELSKLGYRVSAKKAQLCQKEVTYLGYLLKEGKRWLTPARKATVMKIPPPTTPRQVREFLGKAGFCRLFIPGFASLAAPLYPLTKPSIPFIWTEEHQKAFDRIKEALLSAPALALPDLTKPFTLYVDERAGVARGVLTQTLGPWRRPVAYLSKKLDPVASGWPTCLKAVAAVALLLKDADKLTLGQNVTVIASHSLESIVRQPPDRWMTNARMTHYQSLLLNERVSFAPPAVLNPATLLPVESEATPVHRCSEILAEETGTRRDLKDQPLPGVPAWYTDGSSFIAEGKRRAGAAIVDGKRTVWASSLPEGTSAQKAELVALTQALRLAEGKDINIYTDSRYAFATAHIHGAIYKQRGWLTSAGKDIKNKEEILALLEAIHLPKRVAIIHCPGHQKGNDPVATGNRRADEAAKQAALSTRVLAETTKPAGKRTADGSEFEKRTADGSEFESPKKKAKVE

SEQ ID NO: 928 - protein, 2094 aa, synthetic construct
MPAAKRVKLDGGDKKYSIGLDIGTNSVGWAVITDEYKVPSKKFKVLGNTDRHSIKKNLIGALLFDSGETAEATRLKRTARRRYTRRKNRICYLQEIFSNEMAKVDDSFFHRLEESFLVEEDKKHERHPIFGNIVDEVAYHEKYPTIYHLRKKLVDSTDKADLRLIYLALAHMIKFRGHFLIEGDLNPDNSDVDKLFIQLVQTYNQLFEENPINASGVDAKAILSARLSKSRRLENLIAQLPGEKKNGLFGNLIALSLGLTPNFKSNFDLAEDAKLQLSKDTYDDDLDNLLAQIGDQYADLFLAAKNLSDAILLSDILRVNTEITKAPLSASMIKRYDEHHQDLTLLKALVRQQLPEKYKEIFFDQSKNGYAGYIDGGASQEEFYKFIKPILEKMDGTEELLVKLNREDLLRKQRTFDNGSIPHQIHLGELHAILRRQEDFYPFLKDNREKIEKILTFRIPYYVGPLARGNSRFAWMTRKSEETITPWNFEEVVDKGASAQSFIERMTNFDKNLPNEKVLPKHSLLYEYFTVYNELTKVKYVTEGMRKPAFLSGEQKKAIVDLLFKTNRKVTVKQLKEDYFKKIECFDSVEISGVEDRFNASLGTYHDLLKIIKDKDFLDNEENEDILEDIVLTLTLFEDREMIEERLKTYAHLFDDKVMKQLKRRRYTGWGRLSRKLINGIRDKQSGKTILDFLKSDGFANRNFMQLIHDDSLTFKEDIQKAQVSGQGDSLHEHIANLAGSPAIKKGILQTVKVVDELVKVMGRHKPENIVIEMARENQTTQKGQKNSRERMKRIEEGIKELGSQILKEHPVENTQLQNEKLYLYYLQNGRDMYVDQELDINRLSDYDVDHIVPQSFLKDDSIDNKVLTRSDKARGKSDNVPSEEVVKKMKNYWRQLLNAKLITQRKFDNLTKAERGGLSELDKAGFIKRQLVETRQITKHVAQILDSRMNTKYDENDKLIREVKVITLKSKLVSDFRKDFQFYKVREINNYHHAHDAYLNAVVGTALIKKYPKLESEFVYGDYKVYDVRKMIAKSEQEIGKATAKYFFYSNIMNFFKTEITLANGEIRKRPLIETNGETGEIVWDKGRDFATVRKVLSMPQVNIVKKTEVQTGGFSKESILPKRNSDKLIARKKDWDPKKYGGFDSPTVAYSVLVVAKVEKGKSKKLKSVKELLGITIMERSSFEKNPIDFLEAKGYKEVKKDLIIKLPKYSLFELENGRKRMLASAGELQKGNELALPSKYVNFLYLASHYEKLKGSPEDNEQKQLFVEQHKHYLDEIIEQISEFSKRVILADANLDKVLSAYNKHRDKPIREQAENIIHLFTLTNLGAPAAFKYFDTTIDRKRYTSTKEVLDATLIHQSITGLYETRIDLSQLGGDGGGGGEAAAKPAPGGVLNLEEEYRLHEKPVPSSIDPSWLQLFPTVWAERAGMGLANQVPPVVVELRSGASPVAVRQYPMSKEAREGIRPHIQRFLDLGVLVPCQSPWNTPLLPVKKPGTNDYRPVQDLREINKRVQDIHPTVPNPYNLLSSLPPSHTWYSVLDLKDAFFCLKLHPNSQPLFAFEWRDPEKGNTGQLTWTRLPQGFKNSPTLFNEALHRDLAPFRALNPQVVLLQYVDDLLVAAPTYRDCKEGTQKLLQELSKLGYRVSAKKAQLCQKEVTYLGYLLKEGKRWLTPARKATVMKIPPPTTPRQVREFLGKAGFCRLFIPGFASLAAPLYPLTKPSIPFIWTEEHQKAFDRIKEALLSAPALALPDLTKPFTLYVDERAGVARGVLTQTLGPWRRPVAYLSKKLDPVASGWPTCLKAVAAVALLLKDADKLTLGQNVTVIASHSLESIVRQPPDRWMTNARMTHYQSLLLNERVSFAPPAVLNPATLLPVESEATPVHRCSEILAEETGTRRDLKDQPLPGVPAWYTDGSSFIAEGKRRAGAAIVDGKRTVWASSLPEGTSAQKAELVALTQALRLAEGKDINIYTDSRYAFATAHIHGAIYKQRGWLTSAGKDIKNKEEILALLEAIHLPKRVAIIHCPGHQKGNDPVATGNRRADEAAKQAALSTRVLAETTKPAGKRTADGSEFEKRTADGSEFESPKKKAKVE

SEQ ID NO: 929 - protein, 2092 aa, synthetic construct
MPAAKRVKLDGGDKKYSIGLDIGTNSVGWAVITDEYKVPSKKFKVLGNTDRHSIKKNLIGALLFDSGETAEATRLKRTARRRYTRRKNRICYLQEIFSNEMAKVDDSFFHRLEESFLVEEDKKHERHPIFGNIVDEVAYHEKYPTIYHLRKKLVDSTDKADLRLIYLALAHMIKFRGHFLIEGDLNPDNSDVDKLFIQLVQTYNQLFEENPINASGVDAKAILSARLSKSRRLENLIAQLPGEKKNGLFGNLIALSLGLTPNFKSNFDLAEDAKLQLSKDTYDDDLDNLLAQIGDQYADLFLAAKNLSDAILLSDILRVNTEITKAPLSASMIKRYDEHHQDLTLLKALVRQQLPEKYKEIFFDQSKNGYAGYIDGGASQEEFYKFIKPILEKMDGTEELLVKLNREDLLRKQRTFDNGSIPHQIHLGELHAILRRQEDFYPFLKDNREKIEKILTFRIPYYVGPLARGNSRFAWMTRKSEETITPWNFEEVVDKGASAQSFIERMTNFDKNLPNEKVLPKHSLLYEYFTVYNELTKVKYVTEGMRKPAFLSGEQKKAIVDLLFKTNRKVTVKQLKEDYFKKIECFDSVEISGVEDRFNASLGTYHDLLKIIKDKDFLDNEENEDILEDIVLTLTLFEDREMIEERLKTYAHLFDDKVMKQLKRRRYTGWGRLSRKLINGIRDKQSGKTILDFLKSDGFANRNFMQLIHDDSLTFKEDIQKAQVSGQGDSLHEHIANLAGSPAIKKGILQTVKVVDELVKVMGRHKPENIVIEMARENQTTQKGQKNSRERMKRIEEGIKELGSQILKEHPVENTQLQNEKLYLYYLQNGRDMYVDQELDINRLSDYDVDHIVPQSFLKDDSIDNKVLTRSDKARGKSDNVPSEEVVKKMKNYWRQLLNAKLITQRKFDNLTKAERGGLSELDKAGFIKRQLVETRQITKHVAQILDSRMNTKYDENDKLIREVKVITLKSKLVSDFRKDFQFYKVREINNYHHAHDAYLNAVVGTALIKKYPKLESEFVYGDYKVYDVRKMIAKSEQEIGKATAKYFFYSNIMNFFKTEITLANGEIRKRPLIETNGETGEIVWDKGRDFATVRKVLSMPQVNIVKKTEVQTGGFSKESILPKRNSDKLIARKKDWDPKKYGGFDSPTVAYSVLVVAKVEKGKSKKLKSVKELLGITIMERSSFEKNPIDFLEAKGYKEVKKDLIIKLPKYSLFELENGRKRMLASAGELQKGNELALPSKYVNFLYLASHYEKLKGSPEDNEQKQLFVEQHKHYLDEIIEQISEFSKRVILADANLDKVLSAYNKHRDKPIREQAENIIHLFTLTNLGAPAAFKYFDTTIDRKRYTSTKEVLDATLIHQSITGLYETRIDLSQLGGDGGGSSGSSGSSGGVLNLEEEYRLHEKPVPSSIDPSWLQLFPTVWAERAGMGLANQVPPVVVELRSGASPVAVRQYPMSKEAREGIRPHIQRFLDLGVLVPCQSPWNTPLLPVKKPGTNDYRPVQDLREINKRVQDIHPTVPNPYNLLSSLPPSHTWYSVLDLKDAFFCLKLHPNSQPLFAFEWRDPEKGNTGQLTWTRLPQGFKNSPTLFNEALHRDLAPFRALNPQVVLLQYVDDLLVAAPTYRDCKEGTQKLLQELSKLGYRVSAKKAQLCQKEVTYLGYLLKEGKRWLTPARKATVMKIPPPTTPRQVREFLGKAGFCRLFIPGFASLAAPLYPLTKPSIPFIWTEEHQKAFDRIKEALLSAPALALPDLTKPFTLYVDERAGVARGVLTQTLGPWRRPVAYLSKKLDPVASGWPTCLKAVAAVALLLKDADKLTLGQNVTVIASHSLESIVRQPPDRWMTNARMTHYQSLLLNERVSFAPPAVLNPATLLPVESEATPVHRCSEILAEETGTRRDLKDQPLPGVPAWYTDGSSFIAEGKRRAGAAIVDGKRTVWASSLPEGTSAQKAELVALTQALRLAEGKDINIYTDSRYAFATAHIHGAIYKQRGWLTSAGKDIKNKEEILALLEAIHLPKRVAIIHCPGHQKGNDPVATGNRRADEAAKQAALSTRVLAETTKPAGKRTADGSEFEKRTADGSEFESPKKKAKVE

SEQ ID NO: 930 - protein, 2092 aa, synthetic construct
MPAAKRVKLDGGDKKYSIGLDIGTNSVGWAVITDEYKVPSKKFKVLGNTDRHSIKKNLIGALLFDSGETAEATRLKRTARRRYTRRKNRICYLQEIFSNEMAKVDDSFFHRLEESFLVEEDKKHERHPIFGNIVDEVAYHEKYPTIYHLRKKLVDSTDKADLRLIYLALAHMIKFRGHFLIEGDLNPDNSDVDKLFIQLVQTYNQLFEENPINASGVDAKAILSARLSKSRRLENLIAQLPGEKKNGLFGNLIALSLGLTPNFKSNFDLAEDAKLQLSKDTYDDDLDNLLAQIGDQYADLFLAAKNLSDAILLSDILRVNTEITKAPLSASMIKRYDEHHQDLTLLKALVRQQLPEKYKEIFFDQSKNGYAGYIDGGASQEEFYKFIKPILEKMDGTEELLVKLNREDLLRKQRTFDNGSIPHQIHLGELHAILRRQEDFYPFLKDNREKIEKILTFRIPYYVGPLARGNSRFAWMTRKSEETITPWNFEEVVDKGASAQSFIERMTNFDKNLPNEKVLPKHSLLYEYFTVYNELTKVKYVTEGMRKPAFLSGEQKKAIVDLLFKTNRKVTVKQLKEDYFKKIECFDSVEISGVEDRFNASLGTYHDLLKIIKDKDFLDNEENEDILEDIVLTLTLFEDREMIEERLKTYAHLFDDKVMKQLKRRRYTGWGRLSRKLINGIRDKQSGKTILDFLKSDGFANRNFMQLIHDDSLTFKEDIQKAQVSGQGDSLHEHIANLAGSPAIKKGILQTVKVVDELVKVMGRHKPENIVIEMARENQTTQKGQKNSRERMKRIEEGIKELGSQILKEHPVENTQLQNEKLYLYYLQNGRDMYVDQELDINRLSDYDVDHIVPQSFLKDDSIDNKVLTRSDKARGKSDNVPSEEVVKKMKNYWRQLLNAKLITQRKFDNLTKAERGGLSELDKAGFIKRQLVETRQITKHVAQILDSRMNTKYDENDKLIREVKVITLKSKLVSDFRKDFQFYKVREINNYHHAHDAYLNAVVGTALIKKYPKLESEFVYGDYKVYDVRKMIAKSEQEIGKATAKYFFYSNIMNFFKTEITLANGEIRKRPLIETNGETGEIVWDKGRDFATVRKVLSMPQVNIVKKTEVQTGGFSKESILPKRNSDKLIARKKDWDPKKYGGFDSPTVAYSVLVVAKVEKGKSKKLKSVKELLGITIMERSSFEKNPIDFLEAKGYKEVKKDLIIKLPKYSLFELENGRKRMLASAGELQKGNELALPSKYVNFLYLASHYEKLKGSPEDNEQKQLFVEQHKHYLDEIIEQISEFSKRVILADANLDKVLSAYNKHRDKPIREQAENIIHLFTLTNLGAPAAFKYFDTTIDRKRYTSTKEVLDATLIHQSITGLYETRIDLSQLGGDGGGGSPAPGGGGGVLNLEEEYRLHEKPVPSSIDPSWLQLFPTVWAERAGMGLANQVPPVVVELRSGASPVAVRQYPMSKEAREGIRPHIQRFLDLGVLVPCQSPWNTPLLPVKKPGTNDYRPVQDLREINKRVQDIHPTVPNPYNLLSSLPPSHTWYSVLDLKDAFFCLKLHPNSQPLFAFEWRDPEKGNTGQLTWTRLPQGFKNSPTLFNEALHRDLAPFRALNPQVVLLQYVDDLLVAAPTYRDCKEGTQKLLQELSKLGYRVSAKKAQLCQKEVTYLGYLLKEGKRWLTPARKATVMKIPPPTTPRQVREFLGKAGFCRLFIPGFASLAAPLYPLTKPSIPFIWTEEHQKAFDRIKEALLSAPALALPDLTKPFTLYVDERAGVARGVLTQTLGPWRRPVAYLSKKLDPVASGWPTCLKAVAAVALLLKDADKLTLGQNVTVIASHSLESIVRQPPDRWMTNARMTHYQSLLLNERVSFAPPAVLNPATLLPVESEATPVHRCSEILAEETGTRRDLKDQPLPGVPAWYTDGSSFIAEGKRRAGAAIVDGKRTVWASSLPEGTSAQKAELVALTQALRLAEGKDINIYTDSRYAFATAHIHGAIYKQRGWLTSAGKDIKNKEEILALLEAIHLPKRVAIIHCPGHQKGNDPVATGNRRADEAAKQAALSTRVLAETTKPAGKRTADGSEFEKRTADGSEFESPKKKAKVE

SEQ ID NO: 931 - protein, 2091 aa, synthetic construct
MPAAKRVKLDGGDKKYSIGLDIGTNSVGWAVITDEYKVPSKKFKVLGNTDRHSIKKNLIGALLFDSGETAEATRLKRTARRRYTRRKNRICYLQEIFSNEMAKVDDSFFHRLEESFLVEEDKKHERHPIFGNIVDEVAYHEKYPTIYHLRKKLVDSTDKADLRLIYLALAHMIKFRGHFLIEGDLNPDNSDVDKLFIQLVQTYNQLFEENPINASGVDAKAILSARLSKSRRLENLIAQLPGEKKNGLFGNLIALSLGLTPNFKSNFDLAEDAKLQLSKDTYDDDLDNLLAQIGDQYADLFLAAKNLSDAILLSDILRVNTEITKAPLSASMIKRYDEHHQDLTLLKALVRQQLPEKYKEIFFDQSKNGYAGYIDGGASQEEFYKFIKPILEKMDGTEELLVKLNREDLLRKQRTFDNGSIPHQIHLGELHAILRRQEDFYPFLKDNREKIEKILTFRIPYYVGPLARGNSRFAWMTRKSEETITPWNFEEVVDKGASAQSFIERMTNFDKNLPNEKVLPKHSLLYEYFTVYNELTKVKYVTEGMRKPAFLSGEQKKAIVDLLFKTNRKVTVKQLKEDYFKKIECFDSVEISGVEDRFNASLGTYHDLLKIIKDKDFLDNEENEDILEDIVLTLTLFEDREMIEERLKTYAHLFDDKVMKQLKRRRYTGWGRLSRKLINGIRDKQSGKTILDFLKSDGFANRNFMQLIHDDSLTFKEDIQKAQVSGQGDSLHEHIANLAGSPAIKKGILQTVKVVDELVKVMGRHKPENIVIEMARENQTTQKGQKNSRERMKRIEEGIKELGSQILKEHPVENTQLQNEKLYLYYLQNGRDMYVDQELDINRLSDYDVDHIVPQSFLKDDSIDNKVLTRSDKARGKSDNVPSEEVVKKMKNYWRQLLNAKLITQRKFDNLTKAERGGLSELDKAGFIKRQLVETRQITKHVAQILDSRMNTKYDENDKLIREVKVITLKSKLVSDFRKDFQFYKVREINNYHHAHDAYLNAVVGTALIKKYPKLESEFVYGDYKVYDVRKMIAKSEQEIGKATAKYFFYSNIMNFFKTEITLANGEIRKRPLIETNGETGEIVWDKGRDFATVRKVLSMPQVNIVKKTEVQTGGFSKESILPKRNSDKLIARKKDWDPKKYGGFDSPTVAYSVLVVAKVEKGKSKKLKSVKELLGITIMERSSFEKNPIDFLEAKGYKEVKKDLIIKLPKYSLFELENGRKRMLASAGELQKGNELALPSKYVNFLYLASHYEKLKGSPEDNEQKQLFVEQHKHYLDEIIEQISEFSKRVILADANLDKVLSAYNKHRDKPIREQAENIIHLFTLTNLGAPAAFKYFDTTIDRKRYTSTKEVLDATLIHQSITGLYETRIDLSQLGGDGGEAAAKGGGGGVLNLEEEYRLHEKPVPSSIDPSWLQLFPTVWAERAGMGLANQVPPVVVELRSGASPVAVRQYPMSKEAREGIRPHIQRFLDLGVLVPCQSPWNTPLLPVKKPGTNDYRPVQDLREINKRVQDIHPTVPNPYNLLSSLPPSHTWYSVLDLKDAFFCLKLHPNSQPLFAFEWRDPEKGNTGQLTWTRLPQGFKNSPTLFNEALHRDLAPFRALNPQVVLLQYVDDLLVAAPTYRDCKEGTQKLLQELSKLGYRVSAKKAQLCQKEVTYLGYLLKEGKRWLTPARKATVMKIPPPTTPRQVREFLGKAGFCRLFIPGFASLAAPLYPLTKPSIPFIWTEEHQKAFDRIKEALLSAPALALPDLTKPFTLYVDERAGVARGVLTQTLGPWRRPVAYLSKKLDPVASGWPTCLKAVAAVALLLKDADKLTLGQNVTVIASHSLESIVRQPPDRWMTNARMTHYQSLLLNERVSFAPPAVLNPATLLPVESEATPVHRCSEILAEETGTRRDLKDQPLPGVPAWYTDGSSFIAEGKRRAGAAIVDGKRTVWASSLPEGTSAQKAELVALTQALRLAEGKDINIYTDSRYAFATAHIHGAIYKQRGWLTSAGKDIKNKEEILALLEAIHLPKRVAIIHCPGHQKGNDPVATGNRRADEAAKQAALSTRVLAETTKPAGKRTADGSEFEKRTADGSEFESPKKKAKVE

SEQ ID NO: 932 - protein, 2089 aa, synthetic construct
MPAAKRVKLDGGDKKYSIGLDIGTNSVGWAVITDEYKVPSKKFKVLGNTDRHSIKKNLIGALLFDSGETAEATRLKRTARRRYTRRKNRICYLQEIFSNEMAKVDDSFFHRLEESFLVEEDKKHERHPIFGNIVDEVAYHEKYPTIYHLRKKLVDSTDKADLRLIYLALAHMIKFRGHFLIEGDLNPDNSDVDKLFIQLVQTYNQLFEENPINASGVDAKAILSARLSKSRRLENLIAQLPGEKKNGLFGNLIALSLGLTPNFKSNFDLAEDAKLQLSKDTYDDDLDNLLAQIGDQYADLFLAAKNLSDAILLSDILRVNTEITKAPLSASMIKRYDEHHQDLTLLKALVRQQLPEKYKEIFFDQSKNGYAGYIDGGASQEEFYKFIKPILEKMDGTEELLVKLNREDLLRKQRTFDNGSIPHQIHLGELHAILRRQEDFYPFLKDNREKIEKILTFRIPYYVGPLARGNSRFAWMTRKSEETITPWNFEEVVDKGASAQSFIERMTNFDKNLPNEKVLPKHSLLYEYFTVYNELTKVKYVTEGMRKPAFLSGEQKKAIVDLLFKTNRKVTVKQLKEDYFKKIECFDSVEISGVEDRFNASLGTYHDLLKIIKDKDFLDNEENEDILEDIVLTLTLFEDREMIEERLKTYAHLFDDKVMKQLKRRRYTGWGRLSRKLINGIRDKQSGKTILDFLKSDGFANRNFMQLIHDDSLTFKEDIQKAQVSGQGDSLHEHIANLAGSPAIKKGILQTVKVVDELVKVMGRHKPENIVIEMARENQTTQKGQKNSRERMKRIEEGIKELGSQILKEHPVENTQLQNEKLYLYYLQNGRDMYVDQELDINRLSDYDVDHIVPQSFLKDDSIDNKVLTRSDKARGKSDNVPSEEVVKKMKNYWRQLLNAKLITQRKFDNLTKAERGGLSELDKAGFIKRQLVETRQITKHVAQILDSRMNTKYDENDKLIREVKVITLKSKLVSDFRKDFQFYKVREINNYHHAHDAYLNAVVGTALIKKYPKLESEFVYGDYKVYDVRKMIAKSEQEIGKATAKYFFYSNIMNFFKTEITLANGEIRKRPLIETNGETGEIVWDKGRDFATVRKVLSMPQVNIVKKTEVQTGGFSKESILPKRNSDKLIARKKDWDPKKYGGFDSPTVAYSVLVVAKVEKGKSKKLKSVKELLGITIMERSSFEKNPIDFLEAKGYKEVKKDLIIKLPKYSLFELENGRKRMLASAGELQKGNELALPSKYVNFLYLASHYEKLKGSPEDNEQKQLFVEQHKHYLDEIIEQISEFSKRVILADANLDKVLSAYNKHRDKPIREQAENIIHLFTLTNLGAPAAFKYFDTTIDRKRYTSTKEVLDATLIHQSITGLYETRIDLSQLGGDGGGSSGSSGGVLNLEEEYRLHEKPVPSSIDPSWLQLFPTVWAERAGMGLANQVPPVVVELRSGASPVAVRQYPMSKEAREGIRPHIQRFLDLGVLVPCQSPWNTPLLPVKKPGTNDYRPVQDLREINKRVQDIHPTVPNPYNLLSSLPPSHTWYSVLDLKDAFFCLKLHPNSQPLFAFEWRDPEKGNTGQLTWTRLPQGFKNSPTLFNEALHRDLAPFRALNPQVVLLQYVDDLLVAAPTYRDCKEGTQKLLQELSKLGYRVSAKKAQLCQKEVTYLGYLLKEGKRWLTPARKATVMKIPPPTTPRQVREFLGKAGFCRLFIPGFASLAAPLYPLTKPSIPFIWTEEHQKAFDRIKEALLSAPALALPDLTKPFTLYVDERAGVARGVLTQTLGPWRRPVAYLSKKLDPVASGWPTCLKAVAAVALLLKDADKLTLGQNVTVIASHSLESIVRQPPDRWMTNARMTHYQSLLLNERVSFAPPAVLNPATLLPVESEATPVHRCSEILAEETGTRRDLKDQPLPGVPAWYTDGSSFIAEGKRRAGAAIVDGKRTVWASSLPEGTSAQKAELVALTQALRLAEGKDINIYTDSRYAFATAHIHGAIYKQRGWLTSAGKDIKNKEEILALLEAIHLPKRVAIIHCPGHQKGNDPVATGNRRADEAAKQAALSTRVLAETTKPAGKRTADGSEFEKRTADGSEFESPKKKAKVE

SEQ ID NO: 933 - protein, 2098 aa, synthetic construct
MPAAKRVKLDGGDKKYSIGLDIGTNSVGWAVITDEYKVPSKKFKVLGNTDRHSIKKNLIGALLFDSGETAEATRLKRTARRRYTRRKNRICYLQEIFSNEMAKVDDSFFHRLEESFLVEEDKKHERHPIFGNIVDEVAYHEKYPTIYHLRKKLVDSTDKADLRLIYLALAHMIKFRGHFLIEGDLNPDNSDVDKLFIQLVQTYNQLFEENPINASGVDAKAILSARLSKSRRLENLIAQLPGEKKNGLFGNLIALSLGLTPNFKSNFDLAEDAKLQLSKDTYDDDLDNLLAQIGDQYADLFLAAKNLSDAILLSDILRVNTEITKAPLSASMIKRYDEHHQDLTLLKALVRQQLPEKYKEIFFDQSKNGYAGYIDGGASQEEFYKFIKPILEKMDGTEELLVKLNREDLLRKQRTFDNGSIPHQIHLGELHAILRRQEDFYPFLKDNREKIEKILTFRIPYYVGPLARGNSRFAWMTRKSEETITPWNFEEVVDKGASAQSFIERMTNFDKNLPNEKVLPKHSLLYEYFTVYNELTKVKYVTEGMRKPAFLSGEQKKAIVDLLFKTNRKVTVKQLKEDYFKKIECFDSVEISGVEDRFNASLGTYHDLLKIIKDKDFLDNEENEDILEDIVLTLTLFEDREMIEERLKTYAHLFDDKVMKQLKRRRYTGWGRLSRKLINGIRDKQSGKTILDFLKSDGFANRNFMQLIHDDSLTFKEDIQKAQVSGQGDSLHEHIANLAGSPAIKKGILQTVKVVDELVKVMGRHKPENIVIEMARENQTTQKGQKNSRERMKRIEEGIKELGSQILKEHPVENTQLQNEKLYLYYLQNGRDMYVDQELDINRLSDYDVDHIVPQSFLKDDSIDNKVLTRSDKARGKSDNVPSEEVVKKMKNYWRQLLNAKLITQRKFDNLTKAERGGLSELDKAGFIKRQLVETRQITKHVAQILDSRMNTKYDENDKLIREVKVITLKSKLVSDFRKDFQFYKVREINNYHHAHDAYLNAVVGTALIKKYPKLESEFVYGDYKVYDVRKMIAKSEQEIGKATAKYFFYSNIMNFFKTEITLANGEIRKRPLIETNGETGEIVWDKGRDFATVRKVLSMPQVNIVKKTEVQTGGFSKESILPKRNSDKLIARKKDWDPKKYGGFDSPTVAYSVLVVAKVEKGKSKKLKSVKELLGITIMERSSFEKNPIDFLEAKGYKEVKKDLIIKLPKYSLFELENGRKRMLASAGELQKGNELALPSKYVNFLYLASHYEKLKGSPEDNEQKQLFVEQHKHYLDEIIEQISEFSKRVILADANLDKVLSAYNKHRDKPIREQAENIIHLFTLTNLGAPAAFKYFDTTIDRKRYTSTKEVLDATLIHQSITGLYETRIDLSQLGGDGGEAAAKEAAAKEAAAKGGVLNLEEEYRLHEKPVPSSIDPSWLQLFPTVWAERAGMGLANQVPPVVVELRSGASPVAVRQYPMSKEAREGIRPHIQRFLDLGVLVPCQSPWNTPLLPVKKPGTNDYRPVQDLREINKRVQDIHPTVPNPYNLLSSLPPSHTWYSVLDLKDAFFCLKLHPNSQPLFAFEWRDPEKGNTGQLTWTRLPQGFKNSPTLFNEALHRDLAPFRALNPQVVLLQYVDDLLVAAPTYRDCKEGTQKLLQELSKLGYRVSAKKAQLCQKEVTYLGYLLKEGKRWLTPARKATVMKIPPPTTPRQVREFLGKAGFCRLFIPGFASLAAPLYPLTKPSIPFIWTEEHQKAFDRIKEALLSAPALALPDLTKPFTLYVDERAGVARGVLTQTLGPWRRPVAYLSKKLDPVASGWPTCLKAVAAVALLLKDADKLTLGQNVTVIASHSLESIVRQPPDRWMTNARMTHYQSLLLNERVSFAPPAVLNPATLLPVESEATPVHRCSEILAEETGTRRDLKDQPLPGVPAWYTDGSSFIAEGKRRAGAAIVDGKRTVWASSLPEGTSAQKAELVALTQALRLAEGKDINIYTDSRYAFATAHIHGAIYKQRGWLTSAGKDIKNKEEILALLEAIHLPKRVAIIHCPGHQKGNDPVATGNRRADEAAKQAALSTRVLAETTKPAGKRTADGSEFEKRTADGSEFESPKKKAKVE

SEQ ID NO: 934 - protein, 2091 aa, synthetic construct
MPAAKRVKLDGGDKKYSIGLDIGTNSVGWAVITDEYKVPSKKFKVLGNTDRHSIKKNLIGALLFDSGETAEATRLKRTARRRYTRRKNRICYLQEIFSNEMAKVDDSFFHRLEESFLVEEDKKHERHPIFGNIVDEVAYHEKYPTIYHLRKKLVDSTDKADLRLIYLALAHMIKFRGHFLIEGDLNPDNSDVDKLFIQLVQTYNQLFEENPINASGVDAKAILSARLSKSRRLENLIAQLPGEKKNGLFGNLIALSLGLTPNFKSNFDLAEDAKLQLSKDTYDDDLDNLLAQIGDQYADLFLAAKNLSDAILLSDILRVNTEITKAPLSASMIKRYDEHHQDLTLLKALVRQQLPEKYKEIFFDQSKNGYAGYIDGGASQEEFYKFIKPILEKMDGTEELLVKLNREDLLRKQRTFDNGSIPHQIHLGELHAILRRQEDFYPFLKDNREKIEKILTFRIPYYVGPLARGNSRFAWMTRKSEETITPWNFEEVVDKGASAQSFIERMTNFDKNLPNEKVLPKHSLLYEYFTVYNELTKVKYVTEGMRKPAFLSGEQKKAIVDLLFKTNRKVTVKQLKEDYFKKIECFDSVEISGVEDRFNASLGTYHDLLKIIKDKDFLDNEENEDILEDIVLTLTLFEDREMIEERLKTYAHLFDDKVMKQLKRRRYTGWGRLSRKLINGIRDKQSGKTILDFLKSDGFANRNFMQLIHDDSLTFKEDIQKAQVSGQGDSLHEHIANLAGSPAIKKGILQTVKVVDELVKVMGRHKPENIVIEMARENQTTQKGQKNSRERMKRIEEGIKELGSQILKEHPVENTQLQNEKLYLYYLQNGRDMYVDQELDINRLSDYDVDHIVPQSFLKDDSIDNKVLTRSDKARGKSDNVPSEEVVKKMKNYWRQLLNAKLITQRKFDNLTKAERGGLSELDKAGFIKRQLVETRQITKHVAQILDSRMNTKYDENDKLIREVKVITLKSKLVSDFRKDFQFYKVREINNYHHAHDAYLNAVVGTALIKKYPKLESEFVYGDYKVYDVRKMIAKSEQEIGKATAKYFFYSNIMNFFKTEITLANGEIRKRPLIETNGETGEIVWDKGRDFATVRKVLSMPQVNIVKKTEVQTGGFSKESILPKRNSDKLIARKKDWDPKKYGGFDSPTVAYSVLVVAKVEKGKSKKLKSVKELLGITIMERSSFEKNPIDFLEAKGYKEVKKDLIIKLPKYSLFELENGRKRMLASAGELQKGNELALPSKYVNFLYLASHYEKLKGSPEDNEQKQLFVEQHKHYLDEIIEQISEFSKRVILADANLDKVLSAYNKHRDKPIREQAENIIHLFTLTNLGAPAAFKYFDTTIDRKRYTSTKEVLDATLIHQSITGLYETRIDLSQLGGDGGGGGEAAAKGGVLNLEEEYRLHEKPVPSSIDPSWLQLFPTVWAERAGMGLANQVPPVVVELRSGASPVAVRQYPMSKEAREGIRPHIQRFLDLGVLVPCQSPWNTPLLPVKKPGTNDYRPVQDLREINKRVQDIHPTVPNPYNLLSSLPPSHTWYSVLDLKDAFFCLKLHPNSQPLFAFEWRDPEKGNTGQLTWTRLPQGFKNSPTLFNEALHRDLAPFRALNPQVVLLQYVDDLLVAAPTYRDCKEGTQKLLQELSKLGYRVSAKKAQLCQKEVTYLGYLLKEGKRWLTPARKATVMKIPPPTTPRQVREFLGKAGFCRLFIPGFASLAAPLYPLTKPSIPFIWTEEHQKAFDRIKEALLSAPALALPDLTKPFTLYVDERAGVARGVLTQTLGPWRRPVAYLSKKLDPVASGWPTCLKAVAAVALLLKDADKLTLGQNVTVIASHSLESIVRQPPDRWMTNARMTHYQSLLLNERVSFAPPAVLNPATLLPVESEATPVHRCSEILAEETGTRRDLKDQPLPGVPAWYTDGSSFIAEGKRRAGAAIVDGKRTVWASSLPEGTSAQKAELVALTQALRLAEGKDINIYTDSRYAFATAHIHGAIYKQRGWLTSAGKDIKNKEEILALLEAIHLPKRVAIIHCPGHQKGNDPVATGNRRADEAAKQAALSTRVLAETTKPAGKRTADGSEFEKRTADGSEFESPKKKAKVE

SEQ ID NO: 935 - protein, 2103 aa, synthetic construct
MPAAKRVKLDGGDKKYSIGLDIGTNSVGWAVITDEYKVPSKKFKVLGNTDRHSIKKNLIGALLFDSGETAEATRLKRTARRRYTRRKNRICYLQEIFSNEMAKVDDSFFHRLEESFLVEEDKKHERHPIFGNIVDEVAYHEKYPTIYHLRKKLVDSTDKADLRLIYLALAHMIKFRGHFLIEGDLNPDNSDVDKLFIQLVQTYNQLFEENPINASGVDAKAILSARLSKSRRLENLIAQLPGEKKNGLFGNLIALSLGLTPNFKSNFDLAEDAKLQLSKDTYDDDLDNLLAQIGDQYADLFLAAKNLSDAILLSDILRVNTEITKAPLSASMIKRYDEHHQDLTLLKALVRQQLPEKYKEIFFDQSKNGYAGYIDGGASQEEFYKFIKPILEKMDGTEELLVKLNREDLLRKQRTFDNGSIPHQIHLGELHAILRRQEDFYPFLKDNREKIEKILTFRIPYYVGPLARGNSRFAWMTRKSEETITPWNFEEVVDKGASAQSFIERMTNFDKNLPNEKVLPKHSLLYEYFTVYNELTKVKYVTEGMRKPAFLSGEQKKAIVDLLFKTNRKVTVKQLKEDYFKKIECFDSVEISGVEDRFNASLGTYHDLLKIIKDKDFLDNEENEDILEDIVLTLTLFEDREMIEERLKTYAHLFDDKVMKQLKRRRYTGWGRLSRKLINGIRDKQSGKTILDFLKSDGFANRNFMQLIHDDSLTFKEDIQKAQVSGQGDSLHEHIANLAGSPAIKKGILQTVKVVDELVKVMGRHKPENIVIEMARENQTTQKGQKNSRERMKRIEEGIKELGSQILKEHPVENTQLQNEKLYLYYLQNGRDMYVDQELDINRLSDYDVDHIVPQSFLKDDSIDNKVLTRSDKARGKSDNVPSEEVVKKMKNYWRQLLNAKLITQRKFDNLTKAERGGLSELDKAGFIKRQLVETRQITKHVAQILDSRMNTKYDENDKLIREVKVITLKSKLVSDFRKDFQFYKVREINNYHHAHDAYLNAVVGTALIKKYPKLESEFVYGDYKVYDVRKMIAKSEQEIGKATAKYFFYSNIMNFFKTEITLANGEIRKRPLIETNGETGEIVWDKGRDFATVRKVLSMPQVNIVKKTEVQTGGFSKESILPKRNSDKLIARKKDWDPKKYGGFDSPTVAYSVLVVAKVEKGKSKKLKSVKELLGITIMERSSFEKNPIDFLEAKGYKEVKKDLIIKLPKYSLFELENGRKRMLASAGELQKGNELALPSKYVNFLYLASHYEKLKGSPEDNEQKQLFVEQHKHYLDEIIEQISEFSKRVILADANLDKVLSAYNKHRDKPIREQAENIIHLFTLTNLGAPAAFKYFDTTIDRKRYTSTKEVLDATLIHQSITGLYETRIDLSQLGGDGGEAAAKEAAAKEAAAKEAAAKGGVLNLEEEYRLHEKPVPSSIDPSWLQLFPTVWAERAGMGLANQVPPVVVELRSGASPVAVRQYPMSKEAREGIRPHIQRFLDLGVLVPCQSPWNTPLLPVKKPGTNDYRPVQDLREINKRVQDIHPTVPNPYNLLSSLPPSHTWYSVLDLKDAFFCLKLHPNSQPLFAFEWRDPEKGNTGQLTWTRLPQGFKNSPTLFNEALHRDLAPFRALNPQVVLLQYVDDLLVAAPTYRDCKEGTQKLLQELSKLGYRVSAKKAQLCQKEVTYLGYLLKEGKRWLTPARKATVMKIPPPTTPRQVREFLGKAGFCRLFIPGFASLAAPLYPLTKPSIPFIWTEEHQKAFDRIKEALLSAPALALPDLTKPFTLYVDERAGVARGVLTQTLGPWRRPVAYLSKKLDPVASGWPTCLKAVAAVALLLKDADKLTLGQNVTVIASHSLESIVRQPPDRWMTNARMTHYQSLLLNERVSFAPPAVLNPATLLPVESEATPVHRCSEILAEETGTRRDLKDQPLPGVPAWYTDGSSFIAEGKRRAGAAIVDGKRTVWASSLPEGTSAQKAELVALTQALRLAEGKDINIYTDSRYAFATAHIHGAIYKQRGWLTSAGKDIKNKEEILALLEAIHLPKRVAIIHCPGHQKGNDPVATGNRRADEAAKQAALSTRVLAETTKPAGKRTADGSEFEKRTADGSEFESPKKKAKVE

SEQ ID NO: 936 - protein, 2094 aa, synthetic construct
MPAAKRVKLDGGDKKYSIGLDIGTNSVGWAVITDEYKVPSKKFKVLGNTDRHSIKKNLIGALLFDSGETAEATRLKRTARRRYTRRKNRICYLQEIFSNEMAKVDDSFFHRLEESFLVEEDKKHERHPIFGNIVDEVAYHEKYPTIYHLRKKLVDSTDKADLRLIYLALAHMIKFRGHFLIEGDLNPDNSDVDKLFIQLVQTYNQLFEENPINASGVDAKAILSARLSKSRRLENLIAQLPGEKKNGLFGNLIALSLGLTPNFKSNFDLAEDAKLQLSKDTYDDDLDNLLAQIGDQYADLFLAAKNLSDAILLSDILRVNTEITKAPLSASMIKRYDEHHQDLTLLKALVRQQLPEKYKEIFFDQSKNGYAGYIDGGASQEEFYKFIKPILEKMDGTEELLVKLNREDLLRKQRTFDNGSIPHQIHLGELHAILRRQEDFYPFLKDNREKIEKILTFRIPYYVGPLARGNSRFAWMTRKSEETITPWNFEEVVDKGASAQSFIERMTNFDKNLPNEKVLPKHSLLYEYFTVYNELTKVKYVTEGMRKPAFLSGEQKKAIVDLLFKTNRKVTVKQLKEDYFKKIECFDSVEISGVEDRFNASLGTYHDLLKIIKDKDFLDNEENEDILEDIVLTLTLFEDREMIEERLKTYAHLFDDKVMKQLKRRRYTGWGRLSRKLINGIRDKQSGKTILDFLKSDGFANRNFMQLIHDDSLTFKEDIQKAQVSGQGDSLHEHIANLAGSPAIKKGILQTVKVVDELVKVMGRHKPENIVIEMARENQTTQKGQKNSRERMKRIEEGIKELGSQILKEHPVENTQLQNEKLYLYYLQNGRDMYVDQELDINRLSDYDVDHIVPQSFLKDDSIDNKVLTRSDKARGKSDNVPSEEVVKKMKNYWRQLLNAKLITQRKFDNLTKAERGGLSELDKAGFIKRQLVETRQITKHVAQILDSRMNTKYDENDKLIREVKVITLKSKLVSDFRKDFQFYKVREINNYHHAHDAYLNAVVGTALIKKYPKLESEFVYGDYKVYDVRKMIAKSEQEIGKATAKYFFYSNIMNFFKTEITLANGEIRKRPLIETNGETGEIVWDKGRDFATVRKVLSMPQVNIVKKTEVQTGGFSKESILPKRNSDKLIARKKDWDPKKYGGFDSPTVAYSVLVVAKVEKGKSKKLKSVKELLGITIMERSSFEKNPIDFLEAKGYKEVKKDLIIKLPKYSLFELENGRKRMLASAGELQKGNELALPSKYVNFLYLASHYEKLKGSPEDNEQKQLFVEQHKHYLDEIIEQISEFSKRVILADANLDKVLSAYNKHRDKPIREQAENIIHLFTLTNLGAPAAFKYFDTTIDRKRYTSTKEVLDATLIHQSITGLYETRIDLSQLGGDGGGGSGSSEAAAKGGVLNLEEEYRLHEKPVPSSIDPSWLQLFPTVWAERAGMGLANQVPPVVVELRSGASPVAVRQYPMSKEAREGIRPHIQRFLDLGVLVPCQSPWNTPLLPVKKPGTNDYRPVQDLREINKRVQDIHPTVPNPYNLLSSLPPSHTWYSVLDLKDAFFCLKLHPNSQPLFAFEWRDPEKGNTGQLTWTRLPQGFKNSPTLFNEALHRDLAPFRALNPQVVLLQYVDDLLVAAPTYRDCKEGTQKLLQELSKLGYRVSAKKAQLCQKEVTYLGYLLKEGKRWLTPARKATVMKIPPPTTPRQVREFLGKAGFCRLFIPGFASLAAPLYPLTKPSIPFIWTEEHQKAFDRIKEALLSAPALALPDLTKPFTLYVDERAGVARGVLTQTLGPWRRPVAYLSKKLDPVASGWPTCLKAVAAVALLLKDADKLTLGQNVTVIASHSLESIVRQPPDRWMTNARMTHYQSLLLNERVSFAPPAVLNPATLLPVESEATPVHRCSEILAEETGTRRDLKDQPLPGVPAWYTDGSSFIAEGKRRAGAAIVDGKRTVWASSLPEGTSAQKAELVALTQALRLAEGKDINIYTDSRYAFATAHIHGAIYKQRGWLTSAGKDIKNKEEILALLEAIHLPKRVAIIHCPGHQKGNDPVATGNRRADEAAKQAALSTRVLAETTKPAGKRTADGSEFEKRTADGSEFESPKKKAKVE

SEQ ID NO: 937 - protein, 2092 aa, synthetic construct
MPAAKRVKLDGGDKKYSIGLDIGTNSVGWAVITDEYKVPSKKFKVLGNTDRHSIKKNLIGALLFDSGETAEATRLKRTARRRYTRRKNRICYLQEIFSNEMAKVDDSFFHRLEESFLVEEDKKHERHPIFGNIVDEVAYHEKYPTIYHLRKKLVDSTDKADLRLIYLALAHMIKFRGHFLIEGDLNPDNSDVDKLFIQLVQTYNQLFEENPINASGVDAKAILSARLSKSRRLENLIAQLPGEKKNGLFGNLIALSLGLTPNFKSNFDLAEDAKLQLSKDTYDDDLDNLLAQIGDQYADLFLAAKNLSDAILLSDILRVNTEITKAPLSASMIKRYDEHHQDLTLLKALVRQQLPEKYKEIFFDQSKNGYAGYIDGGASQEEFYKFIKPILEKMDGTEELLVKLNREDLLRKQRTFDNGSIPHQIHLGELHAILRRQEDFYPFLKDNREKIEKILTFRIPYYVGPLARGNSRFAWMTRKSEETITPWNFEEVVDKGASAQSFIERMTNFDKNLPNEKVLPKHSLLYEYFTVYNELTKVKYVTEGMRKPAFLSGEQKKAIVDLLFKTNRKVTVKQLKEDYFKKIECFDSVEISGVEDRFNASLGTYHDLLKIIKDKDFLDNEENEDILEDIVLTLTLFEDREMIEERLKTYAHLFDDKVMKQLKRRRYTGWGRLSRKLINGIRDKQSGKTILDFLKSDGFANRNFMQLIHDDSLTFKEDIQKAQVSGQGDSLHEHIANLAGSPAIKKGILQTVKVVDELVKVMGRHKPENIVIEMARENQTTQKGQKNSRERMKRIEEGIKELGSQILKEHPVENTQLQNEKLYLYYLQNGRDMYVDQELDINRLSDYDVDHIVPQSFLKDDSIDNKVLTRSDKARGKSDNVPSEEVVKKMKNYWRQLLNAKLITQRKFDNLTKAERGGLSELDKAGFIKRQLVETRQITKHVAQILDSRMNTKYDENDKLIREVKVITLKSKLVSDFRKDFQFYKVREINNYHHAHDAYLNAVVGTALIKKYPKLESEFVYGDYKVYDVRKMIAKSEQEIGKATAKYFFYSNIMNFFKTEITLANGEIRKRPLIETNGETGEIVWDKGRDFATVRKVLSMPQVNIVKKTEVQTGGFSKESILPKRNSDKLIARKKDWDPKKYGGFDSPTVAYSVLVVAKVEKGKSKKLKSVKELLGITIMERSSFEKNPIDFLEAKGYKEVKKDLIIKLPKYSLFELENGRKRMLASAGELQKGNELALPSKYVNFLYLASHYEKLKGSPEDNEQKQLFVEQHKHYLDEIIEQISEFSKRVILADANLDKVLSAYNKHRDKPIREQAENIIHLFTLTNLGAPAAFKYFDTTIDRKRYTSTKEVLDATLIHQSITGLYETRIDLSQLGGDGGGGGGGSGSSGGVLNLEEEYRLHEKPVPSSIDPSWLQLFPTVWAERAGMGLANQVPPVVVELRSGASPVAVRQYPMSKEAREGIRPHIQRFLDLGVLVPCQSPWNTPLLPVKKPGTNDYRPVQDLREINKRVQDIHPTVPNPYNLLSSLPPSHTWYSVLDLKDAFFCLKLHPNSQPLFAFEWRDPEKGNTGQLTWTRLPQGFKNSPTLFNEALHRDLAPFRALNPQVVLLQYVDDLLVAAPTYRDCKEGTQKLLQELSKLGYRVSAKKAQLCQKEVTYLGYLLKEGKRWLTPARKATVMKIPPPTTPRQVREFLGKAGFCRLFIPGFASLAAPLYPLTKPSIPFIWTEEHQKAFDRIKEALLSAPALALPDLTKPFTLYVDERAGVARGVLTQTLGPWRRPVAYLSKKLDPVASGWPTCLKAVAAVALLLKDADKLTLGQNVTVIASHSLESIVRQPPDRWMTNARMTHYQSLLLNERVSFAPPAVLNPATLLPVESEATPVHRCSEILAEETGTRRDLKDQPLPGVPAWYTDGSSFIAEGKRRAGAAIVDGKRTVWASSLPEGTSAQKAELVALTQALRLAEGKDINIYTDSRYAFATAHIHGAIYKQRGWLTSAGKDIKNKEEILALLEAIHLPKRVAIIHCPGHQKGNDPVATGNRRADEAAKQAALSTRVLAETTKPAGKRTADGSEFEKRTADGSEFESPKKKAKVE

SEQ ID NO: 938 - protein, 2098 aa, synthetic construct
MPAAKRVKLDGGDKKYSIGLDIGTNSVGWAVITDEYKVPSKKFKVLGNTDRHSIKKNLIGALLFDSGETAEATRLKRTARRRYTRRKNRICYLQEIFSNEMAKVDDSFFHRLEESFLVEEDKKHERHPIFGNIVDEVAYHEKYPTIYHLRKKLVDSTDKADLRLIYLALAHMIKFRGHFLIEGDLNPDNSDVDKLFIQLVQTYNQLFEENPINASGVDAKAILSARLSKSRRLENLIAQLPGEKKNGLFGNLIALSLGLTPNFKSNFDLAEDAKLQLSKDTYDDDLDNLLAQIGDQYADLFLAAKNLSDAILLSDILRVNTEITKAPLSASMIKRYDEHHQDLTLLKALVRQQLPEKYKEIFFDQSKNGYAGYIDGGASQEEFYKFIKPILEKMDGTEELLVKLNREDLLRKQRTFDNGSIPHQIHLGELHAILRRQEDFYPFLKDNREKIEKILTFRIPYYVGPLARGNSRFAWMTRKSEETITPWNFEEVVDKGASAQSFIERMTNFDKNLPNEKVLPKHSLLYEYFTVYNELTKVKYVTEGMRKPAFLSGEQKKAIVDLLFKTNRKVTVKQLKEDYFKKIECFDSVEISGVEDRFNASLGTYHDLLKIIKDKDFLDNEENEDILEDIVLTLTLFEDREMIEERLKTYAHLFDDKVMKQLKRRRYTGWGRLSRKLINGIRDKQSGKTILDFLKSDGFANRNFMQLIHDDSLTFKEDIQKAQVSGQGDSLHEHIANLAGSPAIKKGILQTVKVVDELVKVMGRHKPENIVIEMARENQTTQKGQKNSRERMKRIEEGIKELGSQILKEHPVENTQLQNEKLYLYYLQNGRDMYVDQELDINRLSDYDVDHIVPQSFLKDDSIDNKVLTRSDKARGKSDNVPSEEVVKKMKNYWRQLLNAKLITQRKFDNLTKAERGGLSELDKAGFIKRQLVETRQITKHVAQILDSRMNTKYDENDKLIREVKVITLKSKLVSDFRKDFQFYKVREINNYHHAHDAYLNAVVGTALIKKYPKLESEFVYGDYKVYDVRKMIAKSEQEIGKATAKYFFYSNIMNFFKTEITLANGEIRKRPLIETNGETGEIVWDKGRDFATVRKVLSMPQVNIVKKTEVQTGGFSKESILPKRNSDKLIARKKDWDPKKYGGFDSPTVAYSVLVVAKVEKGKSKKLKSVKELLGITIMERSSFEKNPIDFLEAKGYKEVKKDLIIKLPKYSLFELENGRKRMLASAGELQKGNELALPSKYVNFLYLASHYEKLKGSPEDNEQKQLFVEQHKHYLDEIIEQISEFSKRVILADANLDKVLSAYNKHRDKPIREQAENIIHLFTLTNLGAPAAFKYFDTTIDRKRYTSTKEVLDATLIHQSITGLYETRIDLSQLGGDGGGSSGSSGSSGSSGSSGGVLNLEEEYRLHEKPVPSSIDPSWLQLFPTVWAERAGMGLANQVPPVVVELRSGASPVAVRQYPMSKEAREGIRPHIQRFLDLGVLVPCQSPWNTPLLPVKKPGTNDYRPVQDLREINKRVQDIHPTVPNPYNLLSSLPPSHTWYSVLDLKDAFFCLKLHPNSQPLFAFEWRDPEKGNTGQLTWTRLPQGFKNSPTLFNEALHRDLAPFRALNPQVVLLQYVDDLLVAAPTYRDCKEGTQKLLQELSKLGYRVSAKKAQLCQKEVTYLGYLLKEGKRWLTPARKATVMKIPPPTTPRQVREFLGKAGFCRLFIPGFASLAAPLYPLTKPSIPFIWTEEHQKAFDRIKEALLSAPALALPDLTKPFTLYVDERAGVARGVLTQTLGPWRRPVAYLSKKLDPVASGWPTCLKAVAAVALLLKDADKLTLGQNVTVIASHSLESIVRQPPDRWMTNARMTHYQSLLLNERVSFAPPAVLNPATLLPVESEATPVHRCSEILAEETGTRRDLKDQPLPGVPAWYTDGSSFIAEGKRRAGAAIVDGKRTVWASSLPEGTSAQKAELVALTQALRLAEGKDINIYTDSRYAFATAHIHGAIYKQRGWLTSAGKDIKNKEEILALLEAIHLPKRVAIIHCPGHQKGNDPVATGNRRADEAAKQAALSTRVLAETTKPAGKRTADGSEFEKRTADGSEFESPKKKAKVE

SEQ ID NO: 939 - protein, 2094 aa, synthetic construct
MPAAKRVKLDGGDKKYSIGLDIGTNSVGWAVITDEYKVPSKKFKVLGNTDRHSIKKNLIGALLFDSGETAEATRLKRTARRRYTRRKNRICYLQEIFSNEMAKVDDSFFHRLEESFLVEEDKKHERHPIFGNIVDEVAYHEKYPTIYHLRKKLVDSTDKADLRLIYLALAHMIKFRGHFLIEGDLNPDNSDVDKLFIQLVQTYNQLFEENPINASGVDAKAILSARLSKSRRLENLIAQLPGEKKNGLFGNLIALSLGLTPNFKSNFDLAEDAKLQLSKDTYDDDLDNLLAQIGDQYADLFLAAKNLSDAILLSDILRVNTEITKAPLSASMIKRYDEHHQDLTLLKALVRQQLPEKYKEIFFDQSKNGYAGYIDGGASQEEFYKFIKPILEKMDGTEELLVKLNREDLLRKQRTFDNGSIPHQIHLGELHAILRRQEDFYPFLKDNREKIEKILTFRIPYYVGPLARGNSRFAWMTRKSEETITPWNFEEVVDKGASAQSFIERMTNFDKNLPNEKVLPKHSLLYEYFTVYNELTKVKYVTEGMRKPAFLSGEQKKAIVDLLFKTNRKVTVKQLKEDYFKKIECFDSVEISGVEDRFNASLGTYHDLLKIIKDKDFLDNEENEDILEDIVLTLTLFEDREMIEERLKTYAHLFDDKVMKQLKRRRYTGWGRLSRKLINGIRDKQSGKTILDFLKSDGFANRNFMQLIHDDSLTFKEDIQKAQVSGQGDSLHEHIANLAGSPAIKKGILQTVKVVDELVKVMGRHKPENIVIEMARENQTTQKGQKNSRERMKRIEEGIKELGSQILKEHPVENTQLQNEKLYLYYLQNGRDMYVDQELDINRLSDYDVDHIVPQSFLKDDSIDNKVLTRSDKARGKSDNVPSEEVVKKMKNYWRQLLNAKLITQRKFDNLTKAERGGLSELDKAGFIKRQLVETRQITKHVAQILDSRMNTKYDENDKLIREVKVITLKSKLVSDFRKDFQFYKVREINNYHHAHDAYLNAVVGTALIKKYPKLESEFVYGDYKVYDVRKMIAKSEQEIGKATAKYFFYSNIMNFFKTEITLANGEIRKRPLIETNGETGEIVWDKGRDFATVRKVLSMPQVNIVKKTEVQTGGFSKESILPKRNSDKLIARKKDWDPKKYGGFDSPTVAYSVLVVAKVEKGKSKKLKSVKELLGITIMERSSFEKNPIDFLEAKGYKEVKKDLIIKLPKYSLFELENGRKRMLASAGELQKGNELALPSKYVNFLYLASHYEKLKGSPEDNEQKQLFVEQHKHYLDEIIEQISEFSKRVILADANLDKVLSAYNKHRDKPIREQAENIIHLFTLTNLGAPAAFKYFDTTIDRKRYTSTKEVLDATLIHQSITGLYETRIDLSQLGGDGGPAPEAAAKGGSGGVLNLEEEYRLHEKPVPSSIDPSWLQLFPTVWAERAGMGLANQVPPVVVELRSGASPVAVRQYPMSKEAREGIRPHIQRFLDLGVLVPCQSPWNTPLLPVKKPGTNDYRPVQDLREINKRVQDIHPTVPNPYNLLSSLPPSHTWYSVLDLKDAFFCLKLHPNSQPLFAFEWRDPEKGNTGQLTWTRLPQGFKNSPTLFNEALHRDLAPFRALNPQVVLLQYVDDLLVAAPTYRDCKEGTQKLLQELSKLGYRVSAKKAQLCQKEVTYLGYLLKEGKRWLTPARKATVMKIPPPTTPRQVREFLGKAGFCRLFIPGFASLAAPLYPLTKPSIPFIWTEEHQKAFDRIKEALLSAPALALPDLTKPFTLYVDERAGVARGVLTQTLGPWRRPVAYLSKKLDPVASGWPTCLKAVAAVALLLKDADKLTLGQNVTVIASHSLESIVRQPPDRWMTNARMTHYQSLLLNERVSFAPPAVLNPATLLPVESEATPVHRCSEILAEETGTRRDLKDQPLPGVPAWYTDGSSFIAEGKRRAGAAIVDGKRTVWASSLPEGTSAQKAELVALTQALRLAEGKDINIYTDSRYAFATAHIHGAIYKQRGWLTSAGKDIKNKEEILALLEAIHLPKRVAIIHCPGHQKGNDPVATGNRRADEAAKQAALSTRVLAETTKPAGKRTADGSEFEKRTADGSEFESPKKKAKVE

SEQ ID NO: 940 - protein, 2089 aa, synthetic construct
MPAAKRVKLDGGDKKYSIGLDIGTNSVGWAVITDEYKVPSKKFKVLGNTDRHSIKKNLIGALLFDSGETAEATRLKRTARRRYTRRKNRICYLQEIFSNEMAKVDDSFFHRLEESFLVEEDKKHERHPIFGNIVDEVAYHEKYPTIYHLRKKLVDSTDKADLRLIYLALAHMIKFRGHFLIEGDLNPDNSDVDKLFIQLVQTYNQLFEENPINASGVDAKAILSARLSKSRRLENLIAQLPGEKKNGLFGNLIALSLGLTPNFKSNFDLAEDAKLQLSKDTYDDDLDNLLAQIGDQYADLFLAAKNLSDAILLSDILRVNTEITKAPLSASMIKRYDEHHQDLTLLKALVRQQLPEKYKEIFFDQSKNGYAGYIDGGASQEEFYKFIKPILEKMDGTEELLVKLNREDLLRKQRTFDNGSIPHQIHLGELHAILRRQEDFYPFLKDNREKIEKILTFRIPYYVGPLARGNSRFAWMTRKSEETITPWNFEEVVDKGASAQSFIERMTNFDKNLPNEKVLPKHSLLYEYFTVYNELTKVKYVTEGMRKPAFLSGEQKKAIVDLLFKTNRKVTVKQLKEDYFKKIECFDSVEISGVEDRFNASLGTYHDLLKIIKDKDFLDNEENEDILEDIVLTLTLFEDREMIEERLKTYAHLFDDKVMKQLKRRRYTGWGRLSRKLINGIRDKQSGKTILDFLKSDGFANRNFMQLIHDDSLTFKEDIQKAQVSGQGDSLHEHIANLAGSPAIKKGILQTVKVVDELVKVMGRHKPENIVIEMARENQTTQKGQKNSRERMKRIEEGIKELGSQILKEHPVENTQLQNEKLYLYYLQNGRDMYVDQELDINRLSDYDVDHIVPQSFLKDDSIDNKVLTRSDKARGKSDNVPSEEVVKKMKNYWRQLLNAKLITQRKFDNLTKAERGGLSELDKAGFIKRQLVETRQITKHVAQILDSRMNTKYDENDKLIREVKVITLKSKLVSDFRKDFQFYKVREINNYHHAHDAYLNAVVGTALIKKYPKLESEFVYGDYKVYDVRKMIAKSEQEIGKATAKYFFYSNIMNFFKTEITLANGEIRKRPLIETNGETGEIVWDKGRDFATVRKVLSMPQVNIVKKTEVQTGGFSKESILPKRNSDKLIARKKDWDPKKYGGFDSPTVAYSVLVVAKVEKGKSKKLKSVKELLGITIMERSSFEKNPIDFLEAKGYKEVKKDLIIKLPKYSLFELENGRKRMLASAGELQKGNELALPSKYVNFLYLASHYEKLKGSPEDNEQKQLFVEQHKHYLDEIIEQISEFSKRVILADANLDKVLSAYNKHRDKPIREQAENIIHLFTLTNLGAPAAFKYFDTTIDRKRYTSTKEVLDATLIHQSITGLYETRIDLSQLGGDGGGGGPAPGGVLNLEEEYRLHEKPVPSSIDPSWLQLFPTVWAERAGMGLANQVPPVVVELRSGASPVAVRQYPMSKEAREGIRPHIQRFLDLGVLVPCQSPWNTPLLPVKKPGTNDYRPVQDLREINKRVQDIHPTVPNPYNLLSSLPPSHTWYSVLDLKDAFFCLKLHPNSQPLFAFEWRDPEKGNTGQLTWTRLPQGFKNSPTLFNEALHRDLAPFRALNPQVVLLQYVDDLLVAAPTYRDCKEGTQKLLQELSKLGYRVSAKKAQLCQKEVTYLGYLLKEGKRWLTPARKATVMKIPPPTTPRQVREFLGKAGFCRLFIPGFASLAAPLYPLTKPSIPFIWTEEHQKAFDRIKEALLSAPALALPDLTKPFTLYVDERAGVARGVLTQTLGPWRRPVAYLSKKLDPVASGWPTCLKAVAAVALLLKDADKLTLGQNVTVIASHSLESIVRQPPDRWMTNARMTHYQSLLLNERVSFAPPAVLNPATLLPVESEATPVHRCSEILAEETGTRRDLKDQPLPGVPAWYTDGSSFIAEGKRRAGAAIVDGKRTVWASSLPEGTSAQKAELVALTQALRLAEGKDINIYTDSRYAFATAHIHGAIYKQRGWLTSAGKDIKNKEEILALLEAIHLPKRVAIIHCPGHQKGNDPVATGNRRADEAAKQAALSTRVLAETTKPAGKRTADGSEFEKRTADGSEFESPKKKAKVE

SEQ ID NO: 941 - protein, 2089 aa, synthetic construct
MPAAKRVKLDGGDKKYSIGLDIGTNSVGWAVITDEYKVPSKKFKVLGNTDRHSIKKNLIGALLFDSGETAEATRLKRTARRRYTRRKNRICYLQEIFSNEMAKVDDSFFHRLEESFLVEEDKKHERHPIFGNIVDEVAYHEKYPTIYHLRKKLVDSTDKADLRLIYLALAHMIKFRGHFLIEGDLNPDNSDVDKLFIQLVQTYNQLFEENPINASGVDAKAILSARLSKSRRLENLIAQLPGEKKNGLFGNLIALSLGLTPNFKSNFDLAEDAKLQLSKDTYDDDLDNLLAQIGDQYADLFLAAKNLSDAILLSDILRVNTEITKAPLSASMIKRYDEHHQDLTLLKALVRQQLPEKYKEIFFDQSKNGYAGYIDGGASQEEFYKFIKPILEKMDGTEELLVKLNREDLLRKQRTFDNGSIPHQIHLGELHAILRRQEDFYPFLKDNREKIEKILTFRIPYYVGPLARGNSRFAWMTRKSEETITPWNFEEVVDKGASAQSFIERMTNFDKNLPNEKVLPKHSLLYEYFTVYNELTKVKYVTEGMRKPAFLSGEQKKAIVDLLFKTNRKVTVKQLKEDYFKKIECFDSVEISGVEDRFNASLGTYHDLLKIIKDKDFLDNEENEDILEDIVLTLTLFEDREMIEERLKTYAHLFDDKVMKQLKRRRYTGWGRLSRKLINGIRDKQSGKTILDFLKSDGFANRNFMQLIHDDSLTFKEDIQKAQVSGQGDSLHEHIANLAGSPAIKKGILQTVKVVDELVKVMGRHKPENIVIEMARENQTTQKGQKNSRERMKRIEEGIKELGSQILKEHPVENTQLQNEKLYLYYLQNGRDMYVDQELDINRLSDYDVDHIVPQSFLKDDSIDNKVLTRSDKARGKSDNVPSEEVVKKMKNYWRQLLNAKLITQRKFDNLTKAERGGLSELDKAGFIKRQLVETRQITKHVAQILDSRMNTKYDENDKLIREVKVITLKSKLVSDFRKDFQFYKVREINNYHHAHDAYLNAVVGTALIKKYPKLESEFVYGDYKVYDVRKMIAKSEQEIGKATAKYFFYSNIMNFFKTEITLANGEIRKRPLIETNGETGEIVWDKGRDFATVRKVLSMPQVNIVKKTEVQTGGFSKESILPKRNSDKLIARKKDWDPKKYGGFDSPTVAYSVLVVAKVEKGKSKKLKSVKELLGITIMERSSFEKNPIDFLEAKGYKEVKKDLIIKLPKYSLFELENGRKRMLASAGELQKGNELALPSKYVNFLYLASHYEKLKGSPEDNEQKQLFVEQHKHYLDEIIEQISEFSKRVILADANLDKVLSAYNKHRDKPIREQAENIIHLFTLTNLGAPAAFKYFDTTIDRKRYTSTKEVLDATLIHQSITGLYETRIDLSQLGGDGGPAPGSSGGVLNLEEEYRLHEKPVPSSIDPSWLQLFPTVWAERAGMGLANQVPPVVVELRSGASPVAVRQYPMSKEAREGIRPHIQRFLDLGVLVPCQSPWNTPLLPVKKPGTNDYRPVQDLREINKRVQDIHPTVPNPYNLLSSLPPSHTWYSVLDLKDAFFCLKLHPNSQPLFAFEWRDPEKGNTGQLTWTRLPQGFKNSPTLFNEALHRDLAPFRALNPQVVLLQYVDDLLVAAPTYRDCKEGTQKLLQELSKLGYRVSAKKAQLCQKEVTYLGYLLKEGKRWLTPARKATVMKIPPPTTPRQVREFLGKAGFCRLFIPGFASLAAPLYPLTKPSIPFIWTEEHQKAFDRIKEALLSAPALALPDLTKPFTLYVDERAGVARGVLTQTLGPWRRPVAYLSKKLDPVASGWPTCLKAVAAVALLLKDADKLTLGQNVTVIASHSLESIVRQPPDRWMTNARMTHYQSLLLNERVSFAPPAVLNPATLLPVESEATPVHRCSEILAEETGTRRDLKDQPLPGVPAWYTDGSSFIAEGKRRAGAAIVDGKRTVWASSLPEGTSAQKAELVALTQALRLAEGKDINIYTDSRYAFATAHIHGAIYKQRGWLTSAGKDIKNKEEILALLEAIHLPKRVAIIHCPGHQKGNDPVATGNRRADEAAKQAALSTRVLAETTKPAGKRTADGSEFEKRTADGSEFESPKKKAKVE

SEQ ID NO: 942 - protein, 2091 aa, synthetic construct
MPAAKRVKLDGGDKKYSIGLDIGTNSVGWAVITDEYKVPSKKFKVLGNTDRHSIKKNLIGALLFDSGETAEATRLKRTARRRYTRRKNRICYLQEIFSNEMAKVDDSFFHRLEESFLVEEDKKHERHPIFGNIVDEVAYHEKYPTIYHLRKKLVDSTDKADLRLIYLALAHMIKFRGHFLIEGDLNPDNSDVDKLFIQLVQTYNQLFEENPINASGVDAKAILSARLSKSRRLENLIAQLPGEKKNGLFGNLIALSLGLTPNFKSNFDLAEDAKLQLSKDTYDDDLDNLLAQIGDQYADLFLAAKNLSDAILLSDILRVNTEITKAPLSASMIKRYDEHHQDLTLLKALVRQQLPEKYKEIFFDQSKNGYAGYIDGGASQEEFYKFIKPILEKMDGTEELLVKLNREDLLRKQRTFDNGSIPHQIHLGELHAILRRQEDFYPFLKDNREKIEKILTFRIPYYVGPLARGNSRFAWMTRKSEETITPWNFEEVVDKGASAQSFIERMTNFDKNLPNEKVLPKHSLLYEYFTVYNELTKVKYVTEGMRKPAFLSGEQKKAIVDLLFKTNRKVTVKQLKEDYFKKIECFDSVEISGVEDRFNASLGTYHDLLKIIKDKDFLDNEENEDILEDIVLTLTLFEDREMIEERLKTYAHLFDDKVMKQLKRRRYTGWGRLSRKLINGIRDKQSGKTILDFLKSDGFANRNFMQLIHDDSLTFKEDIQKAQVSGQGDSLHEHIANLAGSPAIKKGILQTVKVVDELVKVMGRHKPENIVIEMARENQTTQKGQKNSRERMKRIEEGIKELGSQILKEHPVENTQLQNEKLYLYYLQNGRDMYVDQELDINRLSDYDVDHIVPQSFLKDDSIDNKVLTRSDKARGKSDNVPSEEVVKKMKNYWRQLLNAKLITQRKFDNLTKAERGGLSELDKAGFIKRQLVETRQITKHVAQILDSRMNTKYDENDKLIREVKVITLKSKLVSDFRKDFQFYKVREINNYHHAHDAYLNAVVGTALIKKYPKLESEFVYGDYKVYDVRKMIAKSEQEIGKATAKYFFYSNIMNFFKTEITLANGEIRKRPLIETNGETGEIVWDKGRDFATVRKVLSMPQVNIVKKTEVQTGGFSKESILPKRNSDKLIARKKDWDPKKYGGFDSPTVAYSVLVVAKVEKGKSKKLKSVKELLGITIMERSSFEKNPIDFLEAKGYKEVKKDLIIKLPKYSLFELENGRKRMLASAGELQKGNELALPSKYVNFLYLASHYEKLKGSPEDNEQKQLFVEQHKHYLDEIIEQISEFSKRVILADANLDKVLSAYNKHRDKPIREQAENIIHLFTLTNLGAPAAFKYFDTTIDRKRYTSTKEVLDATLIHQSITGLYETRIDLSQLGGDGGEAAAKGSSGGVLNLEEEYRLHEKPVPSSIDPSWLQLFPTVWAERAGMGLANQVPPVVVELRSGASPVAVRQYPMSKEAREGIRPHIQRFLDLGVLVPCQSPWNTPLLPVKKPGTNDYRPVQDLREINKRVQDIHPTVPNPYNLLSSLPPSHTWYSVLDLKDAFFCLKLHPNSQPLFAFEWRDPEKGNTGQLTWTRLPQGFKNSPTLFNEALHRDLAPFRALNPQVVLLQYVDDLLVAAPTYRDCKEGTQKLLQELSKLGYRVSAKKAQLCQKEVTYLGYLLKEGKRWLTPARKATVMKIPPPTTPRQVREFLGKAGFCRLFIPGFASLAAPLYPLTKPSIPFIWTEEHQKAFDRIKEALLSAPALALPDLTKPFTLYVDERAGVARGVLTQTLGPWRRPVAYLSKKLDPVASGWPTCLKAVAAVALLLKDADKLTLGQNVTVIASHSLESIVRQPPDRWMTNARMTHYQSLLLNERVSFAPPAVLNPATLLPVESEATPVHRCSEILAEETGTRRDLKDQPLPGVPAWYTDGSSFIAEGKRRAGAAIVDGKRTVWASSLPEGTSAQKAELVALTQALRLAEGKDINIYTDSRYAFATAHIHGAIYKQRGWLTSAGKDIKNKEEILALLEAIHLPKRVAIIHCPGHQKGNDPVATGNRRADEAAKQAALSTRVLAETTKPAGKRTADGSEFEKRTADGSEFESPKKKAKVE

SEQ ID NO: 943 - protein, 2089 aa, synthetic construct
MPAAKRVKLDGGDKKYSIGLDIGTNSVGWAVITDEYKVPSKKFKVLGNTDRHSIKKNLIGALLFDSGETAEATRLKRTARRRYTRRKNRICYLQEIFSNEMAKVDDSFFHRLEESFLVEEDKKHERHPIFGNIVDEVAYHEKYPTIYHLRKKLVDSTDKADLRLIYLALAHMIKFRGHFLIEGDLNPDNSDVDKLFIQLVQTYNQLFEENPINASGVDAKAILSARLSKSRRLENLIAQLPGEKKNGLFGNLIALSLGLTPNFKSNFDLAEDAKLQLSKDTYDDDLDNLLAQIGDQYADLFLAAKNLSDAILLSDILRVNTEITKAPLSASMIKRYDEHHQDLTLLKALVRQQLPEKYKEIFFDQSKNGYAGYIDGGASQEEFYKFIKPILEKMDGTEELLVKLNREDLLRKQRTFDNGSIPHQIHLGELHAILRRQEDFYPFLKDNREKIEKILTFRIPYYVGPLARGNSRFAWMTRKSEETITPWNFEEVVDKGASAQSFIERMTNFDKNLPNEKVLPKHSLLYEYFTVYNELTKVKYVTEGMRKPAFLSGEQKKAIVDLLFKTNRKVTVKQLKEDYFKKIECFDSVEISGVEDRFNASLGTYHDLLKIIKDKDFLDNEENEDILEDIVLTLTLFEDREMIEERLKTYAHLFDDKVMKQLKRRRYTGWGRLSRKLINGIRDKQSGKTILDFLKSDGFANRNFMQLIHDDSLTFKEDIQKAQVSGQGDSLHEHIANLAGSPAIKKGILQTVKVVDELVKVMGRHKPENIVIEMARENQTTQKGQKNSRERMKRIEEGIKELGSQILKEHPVENTQLQNEKLYLYYLQNGRDMYVDQELDINRLSDYDVDHIVPQSFLKDDSIDNKVLTRSDKARGKSDNVPSEEVVKKMKNYWRQLLNAKLITQRKFDNLTKAERGGLSELDKAGFIKRQLVETRQITKHVAQILDSRMNTKYDENDKLIREVKVITLKSKLVSDFRKDFQFYKVREINNYHHAHDAYLNAVVGTALIKKYPKLESEFVYGDYKVYDVRKMIAKSEQEIGKATAKYFFYSNIMNFFKTEITLANGEIRKRPLIETNGETGEIVWDKGRDFATVRKVLSMPQVNIVKKTEVQTGGFSKESILPKRNSDKLIARKKDWDPKKYGGFDSPTVAYSVLVVAKVEKGKSKKLKSVKELLGITIMERSSFEKNPIDFLEAKGYKEVKKDLIIKLPKYSLFELENGRKRMLASAGELQKGNELALPSKYVNFLYLASHYEKLKGSPEDNEQKQLFVEQHKHYLDEIIEQISEFSKRVILADANLDKVLSAYNKHRDKPIREQAENIIHLFTLTNLGAPAAFKYFDTTIDRKRYTSTKEVLDATLIHQSITGLYETRIDLSQLGGDGGPAPGGSGGVLNLEEEYRLHEKPVPSSIDPSWLQLFPTVWAERAGMGLANQVPPVVVELRSGASPVAVRQYPMSKEAREGIRPHIQRFLDLGVLVPCQSPWNTPLLPVKKPGTNDYRPVQDLREINKRVQDIHPTVPNPYNLLSSLPPSHTWYSVLDLKDAFFCLKLHPNSQPLFAFEWRDPEKGNTGQLTWTRLPQGFKNSPTLFNEALHRDLAPFRALNPQVVLLQYVDDLLVAAPTYRDCKEGTQKLLQELSKLGYRVSAKKAQLCQKEVTYLGYLLKEGKRWLTPARKATVMKIPPPTTPRQVREFLGKAGFCRLFIPGFASLAAPLYPLTKPSIPFIWTEEHQKAFDRIKEALLSAPALALPDLTKPFTLYVDERAGVARGVLTQTLGPWRRPVAYLSKKLDPVASGWPTCLKAVAAVALLLKDADKLTLGQNVTVIASHSLESIVRQPPDRWMTNARMTHYQSLLLNERVSFAPPAVLNPATLLPVESEATPVHRCSEILAEETGTRRDLKDQPLPGVPAWYTDGSSFIAEGKRRAGAAIVDGKRTVWASSLPEGTSAQKAELVALTQALRLAEGKDINIYTDSRYAFATAHIHGAIYKQRGWLTSAGKDIKNKEEILALLEAIHLPKRVAIIHCPGHQKGNDPVATGNRRADEAAKQAALSTRVLAETTKPAGKRTADGSEFEKRTADGSEFESPKKKAKVE

SEQ ID NO: 944 - protein, 2094 aa, synthetic construct
MPAAKRVKLDGGDKKYSIGLDIGTNSVGWAVITDEYKVPSKKFKVLGNTDRHSIKKNLIGALLFDSGETAEATRLKRTARRRYTRRKNRICYLQEIFSNEMAKVDDSFFHRLEESFLVEEDKKHERHPIFGNIVDEVAYHEKYPTIYHLRKKLVDSTDKADLRLIYLALAHMIKFRGHFLIEGDLNPDNSDVDKLFIQLVQTYNQLFEENPINASGVDAKAILSARLSKSRRLENLIAQLPGEKKNGLFGNLIALSLGLTPNFKSNFDLAEDAKLQLSKDTYDDDLDNLLAQIGDQYADLFLAAKNLSDAILLSDILRVNTEITKAPLSASMIKRYDEHHQDLTLLKALVRQQLPEKYKEIFFDQSKNGYAGYIDGGASQEEFYKFIKPILEKMDGTEELLVKLNREDLLRKQRTFDNGSIPHQIHLGELHAILRRQEDFYPFLKDNREKIEKILTFRIPYYVGPLARGNSRFAWMTRKSEETITPWNFEEVVDKGASAQSFIERMTNFDKNLPNEKVLPKHSLLYEYFTVYNELTKVKYVTEGMRKPAFLSGEQKKAIVDLLFKTNRKVTVKQLKEDYFKKIECFDSVEISGVEDRFNASLGTYHDLLKIIKDKDFLDNEENEDILEDIVLTLTLFEDREMIEERLKTYAHLFDDKVMKQLKRRRYTGWGRLSRKLINGIRDKQSGKTILDFLKSDGFANRNFMQLIHDDSLTFKEDIQKAQVSGQGDSLHEHIANLAGSPAIKKGILQTVKVVDELVKVMGRHKPENIVIEMARENQTTQKGQKNSRERMKRIEEGIKELGSQILKEHPVENTQLQNEKLYLYYLQNGRDMYVDQELDINRLSDYDVDHIVPQSFLKDDSIDNKVLTRSDKARGKSDNVPSEEVVKKMKNYWRQLLNAKLITQRKFDNLTKAERGGLSELDKAGFIKRQLVETRQITKHVAQILDSRMNTKYDENDKLIREVKVITLKSKLVSDFRKDFQFYKVREINNYHHAHDAYLNAVVGTALIKKYPKLESEFVYGDYKVYDVRKMIAKSEQEIGKATAKYFFYSNIMNFFKTEITLANGEIRKRPLIETNGETGEIVWDKGRDFATVRKVLSMPQVNIVKKTEVQTGGFSKESILPKRNSDKLIARKKDWDPKKYGGFDSPTVAYSVLVVAKVEKGKSKKLKSVKELLGITIMERSSFEKNPIDFLEAKGYKEVKKDLIIKLPKYSLFELENGRKRMLASAGELQKGNELALPSKYVNFLYLASHYEKLKGSPEDNEQKQLFVEQHKHYLDEIIEQISEFSKRVILADANLDKVLSAYNKHRDKPIREQAENIIHLFTLTNLGAPAAFKYFDTTIDRKRYTSTKEVLDATLIHQSITGLYETRIDLSQLGGDGGGSSPAPEAAAKGGVLNLEEEYRLHEKPVPSSIDPSWLQLFPTVWAERAGMGLANQVPPVVVELRSGASPVAVRQYPMSKEAREGIRPHIQRFLDLGVLVPCQSPWNTPLLPVKKPGTNDYRPVQDLREINKRVQDIHPTVPNPYNLLSSLPPSHTWYSVLDLKDAFFCLKLHPNSQPLFAFEWRDPEKGNTGQLTWTRLPQGFKNSPTLFNEALHRDLAPFRALNPQVVLLQYVDDLLVAAPTYRDCKEGTQKLLQELSKLGYRVSAKKAQLCQKEVTYLGYLLKEGKRWLTPARKATVMKIPPPTTPRQVREFLGKAGFCRLFIPGFASLAAPLYPLTKPSIPFIWTEEHQKAFDRIKEALLSAPALALPDLTKPFTLYVDERAGVARGVLTQTLGPWRRPVAYLSKKLDPVASGWPTCLKAVAAVALLLKDADKLTLGQNVTVIASHSLESIVRQPPDRWMTNARMTHYQSLLLNERVSFAPPAVLNPATLLPVESEATPVHRCSEILAEETGTRRDLKDQPLPGVPAWYTDGSSFIAEGKRRAGAAIVDGKRTVWASSLPEGTSAQKAELVALTQALRLAEGKDINIYTDSRYAFATAHIHGAIYKQRGWLTSAGKDIKNKEEILALLEAIHLPKRVAIIHCPGHQKGNDPVATGNRRADEAAKQAALSTRVLAETTKPAGKRTADGSEFEKRTADGSEFESPKKKAKVE

SEQ ID NO: 945 - protein, 2093 aa, synthetic construct
MPAAKRVKLDGGDKKYSIGLDIGTNSVGWAVITDEYKVPSKKFKVLGNTDRHSIKKNLIGALLFDSGETAEATRLKRTARRRYTRRKNRICYLQEIFSNEMAKVDDSFFHRLEESFLVEEDKKHERHPIFGNIVDEVAYHEKYPTIYHLRKKLVDSTDKADLRLIYLALAHMIKFRGHFLIEGDLNPDNSDVDKLFIQLVQTYNQLFEENPINASGVDAKAILSARLSKSRRLENLIAQLPGEKKNGLFGNLIALSLGLTPNFKSNFDLAEDAKLQLSKDTYDDDLDNLLAQIGDQYADLFLAAKNLSDAILLSDILRVNTEITKAPLSASMIKRYDEHHQDLTLLKALVRQQLPEKYKEIFFDQSKNGYAGYIDGGASQEEFYKFIKPILEKMDGTEELLVKLNREDLLRKQRTFDNGSIPHQIHLGELHAILRRQEDFYPFLKDNREKIEKILTFRIPYYVGPLARGNSRFAWMTRKSEETITPWNFEEVVDKGASAQSFIERMTNFDKNLPNEKVLPKHSLLYEYFTVYNELTKVKYVTEGMRKPAFLSGEQKKAIVDLLFKTNRKVTVKQLKEDYFKKIECFDSVEISGVEDRFNASLGTYHDLLKIIKDKDFLDNEENEDILEDIVLTLTLFEDREMIEERLKTYAHLFDDKVMKQLKRRRYTGWGRLSRKLINGIRDKQSGKTILDFLKSDGFANRNFMQLIHDDSLTFKEDIQKAQVSGQGDSLHEHIANLAGSPAIKKGILQTVKVVDELVKVMGRHKPENIVIEMARENQTTQKGQKNSRERMKRIEEGIKELGSQILKEHPVENTQLQNEKLYLYYLQNGRDMYVDQELDINRLSDYDVDHIVPQSFLKDDSIDNKVLTRSDKARGKSDNVPSEEVVKKMKNYWRQLLNAKLITQRKFDNLTKAERGGLSELDKAGFIKRQLVETRQITKHVAQILDSRMNTKYDENDKLIREVKVITLKSKLVSDFRKDFQFYKVREINNYHHAHDAYLNAVVGTALIKKYPKLESEFVYGDYKVYDVRKMIAKSEQEIGKATAKYFFYSNIMNFFKTEITLANGEIRKRPLIETNGETGEIVWDKGRDFATVRKVLSMPQVNIVKKTEVQTGGFSKESILPKRNSDKLIARKKDWDPKKYGGFDSPTVAYSVLVVAKVEKGKSKKLKSVKELLGITIMERSSFEKNPIDFLEAKGYKEVKKDLIIKLPKYSLFELENGRKRMLASAGELQKGNELALPSKYVNFLYLASHYEKLKGSPEDNEQKQLFVEQHKHYLDEIIEQISEFSKRVILADANLDKVLSAYNKHRDKPIREQAENIIHLFTLTNLGAPAAFKYFDTTIDRKRYTSTKEVLDATLIHQSITGLYETRIDLSQLGGDGGGGGGSGGGGSGGVLNLEEEYRLHEKPVPSSIDPSWLQLFPTVWAERAGMGLANQVPPVVVELRSGASPVAVRQYPMSKEAREGIRPHIQRFLDLGVLVPCQSPWNTPLLPVKKPGTNDYRPVQDLREINKRVQDIHPTVPNPYNLLSSLPPSHTWYSVLDLKDAFFCLKLHPNSQPLFAFEWRDPEKGNTGQLTWTRLPQGFKNSPTLFNEALHRDLAPFRALNPQVVLLQYVDDLLVAAPTYRDCKEGTQKLLQELSKLGYRVSAKKAQLCQKEVTYLGYLLKEGKRWLTPARKATVMKIPPPTTPRQVREFLGKAGFCRLFIPGFASLAAPLYPLTKPSIPFIWTEEHQKAFDRIKEALLSAPALALPDLTKPFTLYVDERAGVARGVLTQTLGPWRRPVAYLSKKLDPVASGWPTCLKAVAAVALLLKDADKLTLGQNVTVIASHSLESIVRQPPDRWMTNARMTHYQSLLLNERVSFAPPAVLNPATLLPVESEATPVHRCSEILAEETGTRRDLKDQPLPGVPAWYTDGSSFIAEGKRRAGAAIVDGKRTVWASSLPEGTSAQKAELVALTQALRLAEGKDINIYTDSRYAFATAHIHGAIYKQRGWLTSAGKDIKNKEEILALLEAIHLPKRVAIIHCPGHQKGNDPVATGNRRADEAAKQAALSTRVLAETTKPAGKRTADGSEFEKRTADGSEFESPKKKAKVE

SEQ ID NO: 946 - protein, 2092 aa, synthetic construct
MPAAKRVKLDGGDKKYSIGLDIGTNSVGWAVITDEYKVPSKKFKVLGNTDRHSIKKNLIGALLFDSGETAEATRLKRTARRRYTRRKNRICYLQEIFSNEMAKVDDSFFHRLEESFLVEEDKKHERHPIFGNIVDEVAYHEKYPTIYHLRKKLVDSTDKADLRLIYLALAHMIKFRGHFLIEGDLNPDNSDVDKLFIQLVQTYNQLFEENPINASGVDAKAILSARLSKSRRLENLIAQLPGEKKNGLFGNLIALSLGLTPNFKSNFDLAEDAKLQLSKDTYDDDLDNLLAQIGDQYADLFLAAKNLSDAILLSDILRVNTEITKAPLSASMIKRYDEHHQDLTLLKALVRQQLPEKYKEIFFDQSKNGYAGYIDGGASQEEFYKFIKPILEKMDGTEELLVKLNREDLLRKQRTFDNGSIPHQIHLGELHAILRRQEDFYPFLKDNREKIEKILTFRIPYYVGPLARGNSRFAWMTRKSEETITPWNFEEVVDKGASAQSFIERMTNFDKNLPNEKVLPKHSLLYEYFTVYNELTKVKYVTEGMRKPAFLSGEQKKAIVDLLFKTNRKVTVKQLKEDYFKKIECFDSVEISGVEDRFNASLGTYHDLLKIIKDKDFLDNEENEDILEDIVLTLTLFEDREMIEERLKTYAHLFDDKVMKQLKRRRYTGWGRLSRKLINGIRDKQSGKTILDFLKSDGFANRNFMQLIHDDSLTFKEDIQKAQVSGQGDSLHEHIANLAGSPAIKKGILQTVKVVDELVKVMGRHKPENIVIEMARENQTTQKGQKNSRERMKRIEEGIKELGSQILKEHPVENTQLQNEKLYLYYLQNGRDMYVDQELDINRLSDYDVDHIVPQSFLKDDSIDNKVLTRSDKARGKSDNVPSEEVVKKMKNYWRQLLNAKLITQRKFDNLTKAERGGLSELDKAGFIKRQLVETRQITKHVAQILDSRMNTKYDENDKLIREVKVITLKSKLVSDFRKDFQFYKVREINNYHHAHDAYLNAVVGTALIKKYPKLESEFVYGDYKVYDVRKMIAKSEQEIGKATAKYFFYSNIMNFFKTEITLANGEIRKRPLIETNGETGEIVWDKGRDFATVRKVLSMPQVNIVKKTEVQTGGFSKESILPKRNSDKLIARKKDWDPKKYGGFDSPTVAYSVLVVAKVEKGKSKKLKSVKELLGITIMERSSFEKNPIDFLEAKGYKEVKKDLIIKLPKYSLFELENGRKRMLASAGELQKGNELALPSKYVNFLYLASHYEKLKGSPEDNEQKQLFVEQHKHYLDEIIEQISEFSKRVILADANLDKVLSAYNKHRDKPIREQAENIIHLFTLTNLGAPAAFKYFDTTIDRKRYTSTKEVLDATLIHQSITGLYETRIDLSQLGGDGGGGGGSSGGSGGVLNLEEEYRLHEKPVPSSIDPSWLQLFPTVWAERAGMGLANQVPPVVVELRSGASPVAVRQYPMSKEAREGIRPHIQRFLDLGVLVPCQSPWNTPLLPVKKPGTNDYRPVQDLREINKRVQDIHPTVPNPYNLLSSLPPSHTWYSVLDLKDAFFCLKLHPNSQPLFAFEWRDPEKGNTGQLTWTRLPQGFKNSPTLFNEALHRDLAPFRALNPQVVLLQYVDDLLVAAPTYRDCKEGTQKLLQELSKLGYRVSAKKAQLCQKEVTYLGYLLKEGKRWLTPARKATVMKIPPPTTPRQVREFLGKAGFCRLFIPGFASLAAPLYPLTKPSIPFIWTEEHQKAFDRIKEALLSAPALALPDLTKPFTLYVDERAGVARGVLTQTLGPWRRPVAYLSKKLDPVASGWPTCLKAVAAVALLLKDADKLTLGQNVTVIASHSLESIVRQPPDRWMTNARMTHYQSLLLNERVSFAPPAVLNPATLLPVESEATPVHRCSEILAEETGTRRDLKDQPLPGVPAWYTDGSSFIAEGKRRAGAAIVDGKRTVWASSLPEGTSAQKAELVALTQALRLAEGKDINIYTDSRYAFATAHIHGAIYKQRGWLTSAGKDIKNKEEILALLEAIHLPKRVAIIHCPGHQKGNDPVATGNRRADEAAKQAALSTRVLAETTKPAGKRTADGSEFEKRTADGSEFESPKKKAKVE

SEQ ID NO: 947 - protein, 2091 aa, synthetic construct
MPAAKRVKLDGGDKKYSIGLDIGTNSVGWAVITDEYKVPSKKFKVLGNTDRHSIKKNLIGALLFDSGETAEATRLKRTARRRYTRRKNRICYLQEIFSNEMAKVDDSFFHRLEESFLVEEDKKHERHPIFGNIVDEVAYHEKYPTIYHLRKKLVDSTDKADLRLIYLALAHMIKFRGHFLIEGDLNPDNSDVDKLFIQLVQTYNQLFEENPINASGVDAKAILSARLSKSRRLENLIAQLPGEKKNGLFGNLIALSLGLTPNFKSNFDLAEDAKLQLSKDTYDDDLDNLLAQIGDQYADLFLAAKNLSDAILLSDILRVNTEITKAPLSASMIKRYDEHHQDLTLLKALVRQQLPEKYKEIFFDQSKNGYAGYIDGGASQEEFYKFIKPILEKMDGTEELLVKLNREDLLRKQRTFDNGSIPHQIHLGELHAILRRQEDFYPFLKDNREKIEKILTFRIPYYVGPLARGNSRFAWMTRKSEETITPWNFEEVVDKGASAQSFIERMTNFDKNLPNEKVLPKHSLLYEYFTVYNELTKVKYVTEGMRKPAFLSGEQKKAIVDLLFKTNRKVTVKQLKEDYFKKIECFDSVEISGVEDRFNASLGTYHDLLKIIKDKDFLDNEENEDILEDIVLTLTLFEDREMIEERLKTYAHLFDDKVMKQLKRRRYTGWGRLSRKLINGIRDKQSGKTILDFLKSDGFANRNFMQLIHDDSLTFKEDIQKAQVSGQGDSLHEHIANLAGSPAIKKGILQTVKVVDELVKVMGRHKPENIVIEMARENQTTQKGQKNSRERMKRIEEGIKELGSQILKEHPVENTQLQNEKLYLYYLQNGRDMYVDQELDINRLSDYDVDHIVPQSFLKDDSIDNKVLTRSDKARGKSDNVPSEEVVKKMKNYWRQLLNAKLITQRKFDNLTKAERGGLSELDKAGFIKRQLVETRQITKHVAQILDSRMNTKYDENDKLIREVKVITLKSKLVSDFRKDFQFYKVREINNYHHAHDAYLNAVVGTALIKKYPKLESEFVYGDYKVYDVRKMIAKSEQEIGKATAKYFFYSNIMNFFKTEITLANGEIRKRPLIETNGETGEIVWDKGRDFATVRKVLSMPQVNIVKKTEVQTGGFSKESILPKRNSDKLIARKKDWDPKKYGGFDSPTVAYSVLVVAKVEKGKSKKLKSVKELLGITIMERSSFEKNPIDFLEAKGYKEVKKDLIIKLPKYSLFELENGRKRMLASAGELQKGNELALPSKYVNFLYLASHYEKLKGSPEDNEQKQLFVEQHKHYLDEIIEQISEFSKRVILADANLDKVLSAYNKHRDKPIREQAENIIHLFTLTNLGAPAAFKYFDTTIDRKRYTSTKEVLDATLIHQSITGLYETRIDLSQLGGDGGPAPEAAAKGGVLNLEEEYRLHEKPVPSSIDPSWLQLFPTVWAERAGMGLANQVPPVVVELRSGASPVAVRQYPMSKEAREGIRPHIQRFLDLGVLVPCQSPWNTPLLPVKKPGTNDYRPVQDLREINKRVQDIHPTVPNPYNLLSSLPPSHTWYSVLDLKDAFFCLKLHPNSQPLFAFEWRDPEKGNTGQLTWTRLPQGFKNSPTLFNEALHRDLAPFRALNPQVVLLQYVDDLLVAAPTYRDCKEGTQKLLQELSKLGYRVSAKKAQLCQKEVTYLGYLLKEGKRWLTPARKATVMKIPPPTTPRQVREFLGKAGFCRLFIPGFASLAAPLYPLTKPSIPFIWTEEHQKAFDRIKEALLSAPALALPDLTKPFTLYVDERAGVARGVLTQTLGPWRRPVAYLSKKLDPVASGWPTCLKAVAAVALLLKDADKLTLGQNVTVIASHSLESIVRQPPDRWMTNARMTHYQSLLLNERVSFAPPAVLNPATLLPVESEATPVHRCSEILAEETGTRRDLKDQPLPGVPAWYTDGSSFIAEGKRRAGAAIVDGKRTVWASSLPEGTSAQKAELVALTQALRLAEGKDINIYTDSRYAFATAHIHGAIYKQRGWLTSAGKDIKNKEEILALLEAIHLPKRVAIIHCPGHQKGNDPVATGNRRADEAAKQAALSTRVLAETTKPAGKRTADGSEFEKRTADGSEFESPKKKAKVE

SEQ ID NO: 948 - protein, 2094 aa, synthetic construct
MPAAKRVKLDGGDKKYSIGLDIGTNSVGWAVITDEYKVPSKKFKVLGNTDRHSIKKNLIGALLFDSGETAEATRLKRTARRRYTRRKNRICYLQEIFSNEMAKVDDSFFHRLEESFLVEEDKKHERHPIFGNIVDEVAYHEKYPTIYHLRKKLVDSTDKADLRLIYLALAHMIKFRGHFLIEGDLNPDNSDVDKLFIQLVQTYNQLFEENPINASGVDAKAILSARLSKSRRLENLIAQLPGEKKNGLFGNLIALSLGLTPNFKSNFDLAEDAKLQLSKDTYDDDLDNLLAQIGDQYADLFLAAKNLSDAILLSDILRVNTEITKAPLSASMIKRYDEHHQDLTLLKALVRQQLPEKYKEIFFDQSKNGYAGYIDGGASQEEFYKFIKPILEKMDGTEELLVKLNREDLLRKQRTFDNGSIPHQIHLGELHAILRRQEDFYPFLKDNREKIEKILTFRIPYYVGPLARGNSRFAWMTRKSEETITPWNFEEVVDKGASAQSFIERMTNFDKNLPNEKVLPKHSLLYEYFTVYNELTKVKYVTEGMRKPAFLSGEQKKAIVDLLFKTNRKVTVKQLKEDYFKKIECFDSVEISGVEDRFNASLGTYHDLLKIIKDKDFLDNEENEDILEDIVLTLTLFEDREMIEERLKTYAHLFDDKVMKQLKRRRYTGWGRLSRKLINGIRDKQSGKTILDFLKSDGFANRNFMQLIHDDSLTFKEDIQKAQVSGQGDSLHEHIANLAGSPAIKKGILQTVKVVDELVKVMGRHKPENIVIEMARENQTTQKGQKNSRERMKRIEEGIKELGSQILKEHPVENTQLQNEKLYLYYLQNGRDMYVDQELDINRLSDYDVDHIVPQSFLKDDSIDNKVLTRSDKARGKSDNVPSEEVVKKMKNYWRQLLNAKLITQRKFDNLTKAERGGLSELDKAGFIKRQLVETRQITKHVAQILDSRMNTKYDENDKLIREVKVITLKSKLVSDFRKDFQFYKVREINNYHHAHDAYLNAVVGTALIKKYPKLESEFVYGDYKVYDVRKMIAKSEQEIGKATAKYFFYSNIMNFFKTEITLANGEIRKRPLIETNGETGEIVWDKGRDFATVRKVLSMPQVNIVKKTEVQTGGFSKESILPKRNSDKLIARKKDWDPKKYGGFDSPTVAYSVLVVAKVEKGKSKKLKSVKELLGITIMERSSFEKNPIDFLEAKGYKEVKKDLIIKLPKYSLFELENGRKRMLASAGELQKGNELALPSKYVNFLYLASHYEKLKGSPEDNEQKQLFVEQHKHYLDEIIEQISEFSKRVILADANLDKVLSAYNKHRDKPIREQAENIIHLFTLTNLGAPAAFKYFDTTIDRKRYTSTKEVLDATLIHQSITGLYETRIDLSQLGGDGGEAAAKGSSGGSGGVLNLEEEYRLHEKPVPSSIDPSWLQLFPTVWAERAGMGLANQVPPVVVELRSGASPVAVRQYPMSKEAREGIRPHIQRFLDLGVLVPCQSPWNTPLLPVKKPGTNDYRPVQDLREINKRVQDIHPTVPNPYNLLSSLPPSHTWYSVLDLKDAFFCLKLHPNSQPLFAFEWRDPEKGNTGQLTWTRLPQGFKNSPTLFNEALHRDLAPFRALNPQVVLLQYVDDLLVAAPTYRDCKEGTQKLLQELSKLGYRVSAKKAQLCQKEVTYLGYLLKEGKRWLTPARKATVMKIPPPTTPRQVREFLGKAGFCRLFIPGFASLAAPLYPLTKPSIPFIWTEEHQKAFDRIKEALLSAPALALPDLTKPFTLYVDERAGVARGVLTQTLGPWRRPVAYLSKKLDPVASGWPTCLKAVAAVALLLKDADKLTLGQNVTVIASHSLESIVRQPPDRWMTNARMTHYQSLLLNERVSFAPPAVLNPATLLPVESEATPVHRCSEILAEETGTRRDLKDQPLPGVPAWYTDGSSFIAEGKRRAGAAIVDGKRTVWASSLPEGTSAQKAELVALTQALRLAEGKDINIYTDSRYAFATAHIHGAIYKQRGWLTSAGKDIKNKEEILALLEAIHLPKRVAIIHCPGHQKGNDPVATGNRRADEAAKQAALSTRVLAETTKPAGKRTADGSEFEKRTADGSEFESPKKKAKVE

SEQ ID NO: 949 - protein, 2090 aa, synthetic construct
MPAAKRVKLDGGDKKYSIGLDIGTNSVGWAVITDEYKVPSKKFKVLGNTDRHSIKKNLIGALLFDSGETAEATRLKRTARRRYTRRKNRICYLQEIFSNEMAKVDDSFFHRLEESFLVEEDKKHERHPIFGNIVDEVAYHEKYPTIYHLRKKLVDSTDKADLRLIYLALAHMIKFRGHFLIEGDLNPDNSDVDKLFIQLVQTYNQLFEENPINASGVDAKAILSARLSKSRRLENLIAQLPGEKKNGLFGNLIALSLGLTPNFKSNFDLAEDAKLQLSKDTYDDDLDNLLAQIGDQYADLFLAAKNLSDAILLSDILRVNTEITKAPLSASMIKRYDEHHQDLTLLKALVRQQLPEKYKEIFFDQSKNGYAGYIDGGASQEEFYKFIKPILEKMDGTEELLVKLNREDLLRKQRTFDNGSIPHQIHLGELHAILRRQEDFYPFLKDNREKIEKILTFRIPYYVGPLARGNSRFAWMTRKSEETITPWNFEEVVDKGASAQSFIERMTNFDKNLPNEKVLPKHSLLYEYFTVYNELTKVKYVTEGMRKPAFLSGEQKKAIVDLLFKTNRKVTVKQLKEDYFKKIECFDSVEISGVEDRFNASLGTYHDLLKIIKDKDFLDNEENEDILEDIVLTLTLFEDREMIEERLKTYAHLFDDKVMKQLKRRRYTGWGRLSRKLINGIRDKQSGKTILDFLKSDGFANRNFMQLIHDDSLTFKEDIQKAQVSGQGDSLHEHIANLAGSPAIKKGILQTVKVVDELVKVMGRHKPENIVIEMARENQTTQKGQKNSRERMKRIEEGIKELGSQILKEHPVENTQLQNEKLYLYYLQNGRDMYVDQELDINRLSDYDVDHIVPQSFLKDDSIDNKVLTRSDKARGKSDNVPSEEVVKKMKNYWRQLLNAKLITQRKFDNLTKAERGGLSELDKAGFIKRQLVETRQITKHVAQILDSRMNTKYDENDKLIREVKVITLKSKLVSDFRKDFQFYKVREINNYHHAHDAYLNAVVGTALIKKYPKLESEFVYGDYKVYDVRKMIAKSEQEIGKATAKYFFYSNIMNFFKTEITLANGEIRKRPLIETNGETGEIVWDKGRDFATVRKVLSMPQVNIVKKTEVQTGGFSKESILPKRNSDKLIARKKDWDPKKYGGFDSPTVAYSVLVVAKVEKGKSKKLKSVKELLGITIMERSSFEKNPIDFLEAKGYKEVKKDLIIKLPKYSLFELENGRKRMLASAGELQKGNELALPSKYVNFLYLASHYEKLKGSPEDNEQKQLFVEQHKHYLDEIIEQISEFSKRVILADANLDKVLSAYNKHRDKPIREQAENIIHLFTLTNLGAPAAFKYFDTTIDRKRYTSTKEVLDATLIHQSITGLYETRIDLSQLGGDGGPAPAPAPGGVLNLEEEYRLHEKPVPSSIDPSWLQLFPTVWAERAGMGLANQVPPVVVELRSGASPVAVRQYPMSKEAREGIRPHIQRFLDLGVLVPCQSPWNTPLLPVKKPGTNDYRPVQDLREINKRVQDIHPTVPNPYNLLSSLPPSHTWYSVLDLKDAFFCLKLHPNSQPLFAFEWRDPEKGNTGQLTWTRLPQGFKNSPTLFNEALHRDLAPFRALNPQVVLLQYVDDLLVAAPTYRDCKEGTQKLLQELSKLGYRVSAKKAQLCQKEVTYLGYLLKEGKRWLTPARKATVMKIPPPTTPRQVREFLGKAGFCRLFIPGFASLAAPLYPLTKPSIPFIWTEEHQKAFDRIKEALLSAPALALPDLTKPFTLYVDERAGVARGVLTQTLGPWRRPVAYLSKKLDPVASGWPTCLKAVAAVALLLKDADKLTLGQNVTVIASHSLESIVRQPPDRWMTNARMTHYQSLLLNERVSFAPPAVLNPATLLPVESEATPVHRCSEILAEETGTRRDLKDQPLPGVPAWYTDGSSFIAEGKRRAGAAIVDGKRTVWASSLPEGTSAQKAELVALTQALRLAEGKDINIYTDSRYAFATAHIHGAIYKQRGWLTSAGKDIKNKEEILALLEAIHLPKRVAIIHCPGHQKGNDPVATGNRRADEAAKQAALSTRVLAETTKPAGKRTADGSEFEKRTADGSEFESPKKKAKVE

SEQ ID NO: 950 - protein, 2089 aa, synthetic construct
MPAAKRVKLDGGDKKYSIGLDIGTNSVGWAVITDEYKVPSKKFKVLGNTDRHSIKKNLIGALLFDSGETAEATRLKRTARRRYTRRKNRICYLQEIFSNEMAKVDDSFFHRLEESFLVEEDKKHERHPIFGNIVDEVAYHEKYPTIYHLRKKLVDSTDKADLRLIYLALAHMIKFRGHFLIEGDLNPDNSDVDKLFIQLVQTYNQLFEENPINASGVDAKAILSARLSKSRRLENLIAQLPGEKKNGLFGNLIALSLGLTPNFKSNFDLAEDAKLQLSKDTYDDDLDNLLAQIGDQYADLFLAAKNLSDAILLSDILRVNTEITKAPLSASMIKRYDEHHQDLTLLKALVRQQLPEKYKEIFFDQSKNGYAGYIDGGASQEEFYKFIKPILEKMDGTEELLVKLNREDLLRKQRTFDNGSIPHQIHLGELHAILRRQEDFYPFLKDNREKIEKILTFRIPYYVGPLARGNSRFAWMTRKSEETITPWNFEEVVDKGASAQSFIERMTNFDKNLPNEKVLPKHSLLYEYFTVYNELTKVKYVTEGMRKPAFLSGEQKKAIVDLLFKTNRKVTVKQLKEDYFKKIECFDSVEISGVEDRFNASLGTYHDLLKIIKDKDFLDNEENEDILEDIVLTLTLFEDREMIEERLKTYAHLFDDKVMKQLKRRRYTGWGRLSRKLINGIRDKQSGKTILDFLKSDGFANRNFMQLIHDDSLTFKEDIQKAQVSGQGDSLHEHIANLAGSPAIKKGILQTVKVVDELVKVMGRHKPENIVIEMARENQTTQKGQKNSRERMKRIEEGIKELGSQILKEHPVENTQLQNEKLYLYYLQNGRDMYVDQELDINRLSDYDVDHIVPQSFLKDDSIDNKVLTRSDKARGKSDNVPSEEVVKKMKNYWRQLLNAKLITQRKFDNLTKAERGGLSELDKAGFIKRQLVETRQITKHVAQILDSRMNTKYDENDKLIREVKVITLKSKLVSDFRKDFQFYKVREINNYHHAHDAYLNAVVGTALIKKYPKLESEFVYGDYKVYDVRKMIAKSEQEIGKATAKYFFYSNIMNFFKTEITLANGEIRKRPLIETNGETGEIVWDKGRDFATVRKVLSMPQVNIVKKTEVQTGGFSKESILPKRNSDKLIARKKDWDPKKYGGFDSPTVAYSVLVVAKVEKGKSKKLKSVKELLGITIMERSSFEKNPIDFLEAKGYKEVKKDLIIKLPKYSLFELENGRKRMLASAGELQKGNELALPSKYVNFLYLASHYEKLKGSPEDNEQKQLFVEQHKHYLDEIIEQISEFSKRVILADANLDKVLSAYNKHRDKPIREQAENIIHLFTLTNLGAPAAFKYFDTTIDRKRYTSTKEVLDATLIHQSITGLYETRIDLSQLGGDGGGSSGGSGGVLNLEEEYRLHEKPVPSSIDPSWLQLFPTVWAERAGMGLANQVPPVVVELRSGASPVAVRQYPMSKEAREGIRPHIQRFLDLGVLVPCQSPWNTPLLPVKKPGTNDYRPVQDLREINKRVQDIHPTVPNPYNLLSSLPPSHTWYSVLDLKDAFFCLKLHPNSQPLFAFEWRDPEKGNTGQLTWTRLPQGFKNSPTLFNEALHRDLAPFRALNPQVVLLQYVDDLLVAAPTYRDCKEGTQKLLQELSKLGYRVSAKKAQLCQKEVTYLGYLLKEGKRWLTPARKATVMKIPPPTTPRQVREFLGKAGFCRLFIPGFASLAAPLYPLTKPSIPFIWTEEHQKAFDRIKEALLSAPALALPDLTKPFTLYVDERAGVARGVLTQTLGPWRRPVAYLSKKLDPVASGWPTCLKAVAAVALLLKDADKLTLGQNVTVIASHSLESIVRQPPDRWMTNARMTHYQSLLLNERVSFAPPAVLNPATLLPVESEATPVHRCSEILAEETGTRRDLKDQPLPGVPAWYTDGSSFIAEGKRRAGAAIVDGKRTVWASSLPEGTSAQKAELVALTQALRLAEGKDINIYTDSRYAFATAHIHGAIYKQRGWLTSAGKDIKNKEEILALLEAIHLPKRVAIIHCPGHQKGNDPVATGNRRADEAAKQAALSTRVLAETTKPAGKRTADGSEFEKRTADGSEFESPKKKAKVE

SEQ ID NO: 951 - protein, 2131 aa, synthetic construct
MPAAKRVKLDGGDKKYSIGLDIGTNSVGWAVITDEYKVPSKKFKVLGNTDRHSIKKNLIGALLFDSGETAEATRLKRTARRRYTRRKNRICYLQEIFSNEMAKVDDSFFHRLEESFLVEEDKKHERHPIFGNIVDEVAYHEKYPTIYHLRKKLVDSTDKADLRLIYLALAHMIKFRGHFLIEGDLNPDNSDVDKLFIQLVQTYNQLFEENPINASGVDAKAILSARLSKSRRLENLIAQLPGEKKNGLFGNLIALSLGLTPNFKSNFDLAEDAKLQLSKDTYDDDLDNLLAQIGDQYADLFLAAKNLSDAILLSDILRVNTEITKAPLSASMIKRYDEHHQDLTLLKALVRQQLPEKYKEIFFDQSKNGYAGYIDGGASQEEFYKFIKPILEKMDGTEELLVKLNREDLLRKQRTFDNGSIPHQIHLGELHAILRRQEDFYPFLKDNREKIEKILTFRIPYYVGPLARGNSRFAWMTRKSEETITPWNFEEVVDKGASAQSFIERMTNFDKNLPNEKVLPKHSLLYEYFTVYNELTKVKYVTEGMRKPAFLSGEQKKAIVDLLFKTNRKVTVKQLKEDYFKKIECFDSVEISGVEDRFNASLGTYHDLLKIIKDKDFLDNEENEDILEDIVLTLTLFEDREMIEERLKTYAHLFDDKVMKQLKRRRYTGWGRLSRKLINGIRDKQSGKTILDFLKSDGFANRNFMQLIHDDSLTFKEDIQKAQVSGQGDSLHEHIANLAGSPAIKKGILQTVKVVDELVKVMGRHKPENIVIEMARENQTTQKGQKNSRERMKRIEEGIKELGSQILKEHPVENTQLQNEKLYLYYLQNGRDMYVDQELDINRLSDYDVDHIVPQSFLKDDSIDNKVLTRSDKARGKSDNVPSEEVVKKMKNYWRQLLNAKLITQRKFDNLTKAERGGLSELDKAGFIKRQLVETRQITKHVAQILDSRMNTKYDENDKLIREVKVITLKSKLVSDFRKDFQFYKVREINNYHHAHDAYLNAVVGTALIKKYPKLESEFVYGDYKVYDVRKMIAKSEQEIGKATAKYFFYSNIMNFFKTEITLANGEIRKRPLIETNGETGEIVWDKGRDFATVRKVLSMPQVNIVKKTEVQTGGFSKESILPKRNSDKLIARKKDWDPKKYGGFDSPTVAYSVLVVAKVEKGKSKKLKSVKELLGITIMERSSFEKNPIDFLEAKGYKEVKKDLIIKLPKYSLFELENGRKRMLASAGELQKGNELALPSKYVNFLYLASHYEKLKGSPEDNEQKQLFVEQHKHYLDEIIEQISEFSKRVILADANLDKVLSAYNKHRDKPIREQAENIIHLFTLTNLGAPAAFKYFDTTIDRKRYTSTKEVLDATLIHQSITGLYETRIDLSQLGGDGGAEAAAKEAAAKEAAAKEAAAKALEAEAAAKEAAAKEAAAKEAAAKAGGTLNIEDEYRLHETSKEPDVPLGSTWLSDFPQAWAETGGMGLAVRQAPLIIPLKATSTPVSIKQYPMSQEARLGIKPHIQRLLDQGILVPCQSPWNTPLLPVKKPGTNDYRPVQDLREVNKRVEDIHPTVPNPYNLLSGLPPSHQWYTVLDLKDAFFCLRLHPTSQPLFAFEWRDPEMGISGQLTWTRLPQGFKNSPTLFDEALHRDLADFRIQHPDLILLQYVDDLLLAATSEQDCQRGTRALLQTLGNLGYRASAKKAQICQKQVKYLGYLLKEGQRWLTEARKETVMGQPTPKTPRQLREFLGTAGFCRLWIPGFAEMAAPLYPLTKTGTLFNWGPDQQKAYQEIKQALLTAPALGLPDLTKPFELFVDEKQGYAKGVLTQKLGPWRRPVAYLSKKLDPVAAGWPPCLRMVAAIAVLTKDAGKLTMGQPLVILAPHAVEALVKQPPDRWLSNARMTHYQAMLLDTDRVQFGPVVALNPATLLPLPEKEAPHDCLEILAETHGTRPDLTDQPIPDADYTWYTDGSSFLQEGQRRAGAAVTTETEVIWARALPAGTSAQRAELIALTQALKMAEGKKLNVYTDSRYAFATAHVHGEIYRRRGLLTSEGREIKNKNEILALLKALFLPKRLSIIHCPGHQKGNSAEARGNRMADQAAREAAMKAVLETSTLLAGKRTADGSEFEKRTADGSEFESPKKKAKVE

SEQ ID NO: 952 - protein, 2118 aa, synthetic construct
MPAAKRVKLDGGDKKYSIGLDIGTNSVGWAVITDEYKVPSKKFKVLGNTDRHSIKKNLIGALLFDSGETAEATRLKRTARRRYTRRKNRICYLQEIFSNEMAKVDDSFFHRLEESFLVEEDKKHERHPIFGNIVDEVAYHEKYPTIYHLRKKLVDSTDKADLRLIYLALAHMIKFRGHFLIEGDLNPDNSDVDKLFIQLVQTYNQLFEENPINASGVDAKAILSARLSKSRRLENLIAQLPGEKKNGLFGNLIALSLGLTPNFKSNFDLAEDAKLQLSKDTYDDDLDNLLAQIGDQYADLFLAAKNLSDAILLSDILRVNTEITKAPLSASMIKRYDEHHQDLTLLKALVRQQLPEKYKEIFFDQSKNGYAGYIDGGASQEEFYKFIKPILEKMDGTEELLVKLNREDLLRKQRTFDNGSIPHQIHLGELHAILRRQEDFYPFLKDNREKIEKILTFRIPYYVGPLARGNSRFAWMTRKSEETITPWNFEEVVDKGASAQSFIERMTNFDKNLPNEKVLPKHSLLYEYFTVYNELTKVKYVTEGMRKPAFLSGEQKKAIVDLLFKTNRKVTVKQLKEDYFKKIECFDSVEISGVEDRFNASLGTYHDLLKIIKDKDFLDNEENEDILEDIVLTLTLFEDREMIEERLKTYAHLFDDKVMKQLKRRRYTGWGRLSRKLINGIRDKQSGKTILDFLKSDGFANRNFMQLIHDDSLTFKEDIQKAQVSGQGDSLHEHIANLAGSPAIKKGILQTVKVVDELVKVMGRHKPENIVIEMARENQTTQKGQKNSRERMKRIEEGIKELGSQILKEHPVENTQLQNEKLYLYYLQNGRDMYVDQELDINRLSDYDVDHIVPQSFLKDDSIDNKVLTRSDKARGKSDNVPSEEVVKKMKNYWRQLLNAKLITQRKFDNLTKAERGGLSELDKAGFIKRQLVETRQITKHVAQILDSRMNTKYDENDKLIREVKVITLKSKLVSDFRKDFQFYKVREINNYHHAHDAYLNAVVGTALIKKYPKLESEFVYGDYKVYDVRKMIAKSEQEIGKATAKYFFYSNIMNFFKTEITLANGEIRKRPLIETNGETGEIVWDKGRDFATVRKVLSMPQVNIVKKTEVQTGGFSKESILPKRNSDKLIARKKDWDPKKYGGFDSPTVAYSVLVVAKVEKGKSKKLKSVKELLGITIMERSSFEKNPIDFLEAKGYKEVKKDLIIKLPKYSLFELENGRKRMLASAGELQKGNELALPSKYVNFLYLASHYEKLKGSPEDNEQKQLFVEQHKHYLDEIIEQISEFSKRVILADANLDKVLSAYNKHRDKPIREQAENIIHLFTLTNLGAPAAFKYFDTTIDRKRYTSTKEVLDATLIHQSITGLYETRIDLSQLGGDGGSGGSSGGSSGSETPGTSESATPESSGGSSGGSSGGTLNIEDEYRLHETSKEPDVPLGSTWLSDFPQAWAETGGMGLAVRQAPLIIPLKATSTPVSIKQYPMSQEARLGIKPHIQRLLDQGILVPCQSPWNTPLLPVKKPGTNDYRPVQDLREVNKRVEDIHPTVPNPYNLLSGLPPSHQWYTVLDLKDAFFCLRLHPTSQPLFAFEWRDPEMGISGQLTWTRLPQGFKNSPTLFDEALHRDLADFRIQHPDLILLQYVDDLLLAATSEQDCQRGTRALLQTLGNLGYRASAKKAQICQKQVKYLGYLLKEGQRWLTEARKETVMGQPTPKTPRQLREFLGTAGFCRLWIPGFAEMAAPLYPLTKTGTLFNWGPDQQKAYQEIKQALLTAPALGLPDLTKPFELFVDEKQGYAKGVLTQKLGPWRRPVAYLSKKLDPVAAGWPPCLRMVAAIAVLTKDAGKLTMGQPLVILAPHAVEALVKQPPDRWLSNARMTHYQAMLLDTDRVQFGPVVALNPATLLPLPEKEAPHDCLEILAETHGTRPDLTDQPIPDADYTWYTDGSSFLQEGQRRAGAAVTTETEVIWARALPAGTSAQRAELIALTQALKMAEGKKLNVYTDSRYAFATAHVHGEIYRRRGLLTSEGREIKNKNEILALLKALFLPKRLSIIHCPGHQKGNSAEARGNRMADQAAREAAMKAVLETSTLLAGKRTADGSEFEKRTADGSEFESPKKKAKVE

SEQ ID NO: 953 - protein, 2105 aa, synthetic construct
MPAAKRVKLDGGDKKYSIGLDIGTNSVGWAVITDEYKVPSKKFKVLGNTDRHSIKKNLIGALLFDSGETAEATRLKRTARRRYTRRKNRICYLQEIFSNEMAKVDDSFFHRLEESFLVEEDKKHERHPIFGNIVDEVAYHEKYPTIYHLRKKLVDSTDKADLRLIYLALAHMIKFRGHFLIEGDLNPDNSDVDKLFIQLVQTYNQLFEENPINASGVDAKAILSARLSKSRRLENLIAQLPGEKKNGLFGNLIALSLGLTPNFKSNFDLAEDAKLQLSKDTYDDDLDNLLAQIGDQYADLFLAAKNLSDAILLSDILRVNTEITKAPLSASMIKRYDEHHQDLTLLKALVRQQLPEKYKEIFFDQSKNGYAGYIDGGASQEEFYKFIKPILEKMDGTEELLVKLNREDLLRKQRTFDNGSIPHQIHLGELHAILRRQEDFYPFLKDNREKIEKILTFRIPYYVGPLARGNSRFAWMTRKSEETITPWNFEEVVDKGASAQSFIERMTNFDKNLPNEKVLPKHSLLYEYFTVYNELTKVKYVTEGMRKPAFLSGEQKKAIVDLLFKTNRKVTVKQLKEDYFKKIECFDSVEISGVEDRFNASLGTYHDLLKIIKDKDFLDNEENEDILEDIVLTLTLFEDREMIEERLKTYAHLFDDKVMKQLKRRRYTGWGRLSRKLINGIRDKQSGKTILDFLKSDGFANRNFMQLIHDDSLTFKEDIQKAQVSGQGDSLHEHIANLAGSPAIKKGILQTVKVVDELVKVMGRHKPENIVIEMARENQTTQKGQKNSRERMKRIEEGIKELGSQILKEHPVENTQLQNEKLYLYYLQNGRDMYVDQELDINRLSDYDVDHIVPQSFLKDDSIDNKVLTRSDKARGKSDNVPSEEVVKKMKNYWRQLLNAKLITQRKFDNLTKAERGGLSELDKAGFIKRQLVETRQITKHVAQILDSRMNTKYDENDKLIREVKVITLKSKLVSDFRKDFQFYKVREINNYHHAHDAYLNAVVGTALIKKYPKLESEFVYGDYKVYDVRKMIAKSEQEIGKATAKYFFYSNIMNFFKTEITLANGEIRKRPLIETNGETGEIVWDKGRDFATVRKVLSMPQVNIVKKTEVQTGGFSKESILPKRNSDKLIARKKDWDPKKYGGFDSPTVAYSVLVVAKVEKGKSKKLKSVKELLGITIMERSSFEKNPIDFLEAKGYKEVKKDLIIKLPKYSLFELENGRKRMLASAGELQKGNELALPSKYVNFLYLASHYEKLKGSPEDNEQKQLFVEQHKHYLDEIIEQISEFSKRVILADANLDKVLSAYNKHRDKPIREQAENIIHLFTLTNLGAPAAFKYFDTTIDRKRYTSTKEVLDATLIHQSITGLYETRIDLSQLGGDGGGGGGSGGGGSGGGGSGGGGSGGTLNIEDEYRLHETSKEPDVPLGSTWLSDFPQAWAETGGMGLAVRQAPLIIPLKATSTPVSIKQYPMSQEARLGIKPHIQRLLDQGILVPCQSPWNTPLLPVKKPGTNDYRPVQDLREVNKRVEDIHPTVPNPYNLLSGLPPSHQWYTVLDLKDAFFCLRLHPTSQPLFAFEWRDPEMGISGQLTWTRLPQGFKNSPTLFDEALHRDLADFRIQHPDLILLQYVDDLLLAATSEQDCQRGTRALLQTLGNLGYRASAKKAQICQKQVKYLGYLLKEGQRWLTEARKETVMGQPTPKTPRQLREFLGTAGFCRLWIPGFAEMAAPLYPLTKTGTLFNWGPDQQKAYQEIKQALLTAPALGLPDLTKPFELFVDEKQGYAKGVLTQKLGPWRRPVAYLSKKLDPVAAGWPPCLRMVAAIAVLTKDAGKLTMGQPLVILAPHAVEALVKQPPDRWLSNARMTHYQAMLLDTDRVQFGPVVALNPATLLPLPEKEAPHDCLEILAETHGTRPDLTDQPIPDADYTWYTDGSSFLQEGQRRAGAAVTTETEVIWARALPAGTSAQRAELIALTQALKMAEGKKLNVYTDSRYAFATAHVHGEIYRRRGLLTSEGREIKNKNEILALLKALFLPKRLSIIHCPGHQKGNSAEARGNRMADQAAREAAMKAVLETSTLLAGKRTADGSEFEKRTADGSEFESPKKKAKVE

SEQ ID NO: 954 - protein, 2093 aa, synthetic construct
MPAAKRVKLDGGDKKYSIGLDIGTNSVGWAVITDEYKVPSKKFKVLGNTDRHSIKKNLIGALLFDSGETAEATRLKRTARRRYTRRKNRICYLQEIFSNEMAKVDDSFFHRLEESFLVEEDKKHERHPIFGNIVDEVAYHEKYPTIYHLRKKLVDSTDKADLRLIYLALAHMIKFRGHFLIEGDLNPDNSDVDKLFIQLVQTYNQLFEENPINASGVDAKAILSARLSKSRRLENLIAQLPGEKKNGLFGNLIALSLGLTPNFKSNFDLAEDAKLQLSKDTYDDDLDNLLAQIGDQYADLFLAAKNLSDAILLSDILRVNTEITKAPLSASMIKRYDEHHQDLTLLKALVRQQLPEKYKEIFFDQSKNGYAGYIDGGASQEEFYKFIKPILEKMDGTEELLVKLNREDLLRKQRTFDNGSIPHQIHLGELHAILRRQEDFYPFLKDNREKIEKILTFRIPYYVGPLARGNSRFAWMTRKSEETITPWNFEEVVDKGASAQSFIERMTNFDKNLPNEKVLPKHSLLYEYFTVYNELTKVKYVTEGMRKPAFLSGEQKKAIVDLLFKTNRKVTVKQLKEDYFKKIECFDSVEISGVEDRFNASLGTYHDLLKIIKDKDFLDNEENEDILEDIVLTLTLFEDREMIEERLKTYAHLFDDKVMKQLKRRRYTGWGRLSRKLINGIRDKQSGKTILDFLKSDGFANRNFMQLIHDDSLTFKEDIQKAQVSGQGDSLHEHIANLAGSPAIKKGILQTVKVVDELVKVMGRHKPENIVIEMARENQTTQKGQKNSRERMKRIEEGIKELGSQILKEHPVENTQLQNEKLYLYYLQNGRDMYVDQELDINRLSDYDVDHIVPQSFLKDDSIDNKVLTRSDKARGKSDNVPSEEVVKKMKNYWRQLLNAKLITQRKFDNLTKAERGGLSELDKAGFIKRQLVETRQITKHVAQILDSRMNTKYDENDKLIREVKVITLKSKLVSDFRKDFQFYKVREINNYHHAHDAYLNAVVGTALIKKYPKLESEFVYGDYKVYDVRKMIAKSEQEIGKATAKYFFYSNIMNFFKTEITLANGEIRKRPLIETNGETGEIVWDKGRDFATVRKVLSMPQVNIVKKTEVQTGGFSKESILPKRNSDKLIARKKDWDPKKYGGFDSPTVAYSVLVVAKVEKGKSKKLKSVKELLGITIMERSSFEKNPIDFLEAKGYKEVKKDLIIKLPKYSLFELENGRKRMLASAGELQKGNELALPSKYVNFLYLASHYEKLKGSPEDNEQKQLFVEQHKHYLDEIIEQISEFSKRVILADANLDKVLSAYNKHRDKPIREQAENIIHLFTLTNLGAPAAFKYFDTTIDRKRYTSTKEVLDATLIHQSITGLYETRIDLSQLGGDGGGSSEAAAKGGTLNIEDEYRLHETSKEPDVPLGSTWLSDFPQAWAETGGMGLAVRQAPLIIPLKATSTPVSIKQYPMSQEARLGIKPHIQRLLDQGILVPCQSPWNTPLLPVKKPGTNDYRPVQDLREVNKRVEDIHPTVPNPYNLLSGLPPSHQWYTVLDLKDAFFCLRLHPTSQPLFAFEWRDPEMGISGQLTWTRLPQGFKNSPTLFDEALHRDLADFRIQHPDLILLQYVDDLLLAATSEQDCQRGTRALLQTLGNLGYRASAKKAQICQKQVKYLGYLLKEGQRWLTEARKETVMGQPTPKTPRQLREFLGTAGFCRLWIPGFAEMAAPLYPLTKTGTLFNWGPDQQKAYQEIKQALLTAPALGLPDLTKPFELFVDEKQGYAKGVLTQKLGPWRRPVAYLSKKLDPVAAGWPPCLRMVAAIAVLTKDAGKLTMGQPLVILAPHAVEALVKQPPDRWLSNARMTHYQAMLLDTDRVQFGPVVALNPATLLPLPEKEAPHDCLEILAETHGTRPDLTDQPIPDADYTWYTDGSSFLQEGQRRAGAAVTTETEVIWARALPAGTSAQRAELIALTQALKMAEGKKLNVYTDSRYAFATAHVHGEIYRRRGLLTSEGREIKNKNEILALLKALFLPKRLSIIHCPGHQKGNSAEARGNRMADQAAREAAMKAVLETSTLLAGKRTADGSEFEKRTADGSEFESPKKKAKVE

SEQ ID NO: 955 - protein, 2096 aa, synthetic construct
MPAAKRVKLDGGDKKYSIGLDIGTNSVGWAVITDEYKVPSKKFKVLGNTDRHSIKKNLIGALLFDSGETAEATRLKRTARRRYTRRKNRICYLQEIFSNEMAKVDDSFFHRLEESFLVEEDKKHERHPIFGNIVDEVAYHEKYPTIYHLRKKLVDSTDKADLRLIYLALAHMIKFRGHFLIEGDLNPDNSDVDKLFIQLVQTYNQLFEENPINASGVDAKAILSARLSKSRRLENLIAQLPGEKKNGLFGNLIALSLGLTPNFKSNFDLAEDAKLQLSKDTYDDDLDNLLAQIGDQYADLFLAAKNLSDAILLSDILRVNTEITKAPLSASMIKRYDEHHQDLTLLKALVRQQLPEKYKEIFFDQSKNGYAGYIDGGASQEEFYKFIKPILEKMDGTEELLVKLNREDLLRKQRTFDNGSIPHQIHLGELHAILRRQEDFYPFLKDNREKIEKILTFRIPYYVGPLARGNSRFAWMTRKSEETITPWNFEEVVDKGASAQSFIERMTNFDKNLPNEKVLPKHSLLYEYFTVYNELTKVKYVTEGMRKPAFLSGEQKKAIVDLLFKTNRKVTVKQLKEDYFKKIECFDSVEISGVEDRFNASLGTYHDLLKIIKDKDFLDNEENEDILEDIVLTLTLFEDREMIEERLKTYAHLFDDKVMKQLKRRRYTGWGRLSRKLINGIRDKQSGKTILDFLKSDGFANRNFMQLIHDDSLTFKEDIQKAQVSGQGDSLHEHIANLAGSPAIKKGILQTVKVVDELVKVMGRHKPENIVIEMARENQTTQKGQKNSRERMKRIEEGIKELGSQILKEHPVENTQLQNEKLYLYYLQNGRDMYVDQELDINRLSDYDVDHIVPQSFLKDDSIDNKVLTRSDKARGKSDNVPSEEVVKKMKNYWRQLLNAKLITQRKFDNLTKAERGGLSELDKAGFIKRQLVETRQITKHVAQILDSRMNTKYDENDKLIREVKVITLKSKLVSDFRKDFQFYKVREINNYHHAHDAYLNAVVGTALIKKYPKLESEFVYGDYKVYDVRKMIAKSEQEIGKATAKYFFYSNIMNFFKTEITLANGEIRKRPLIETNGETGEIVWDKGRDFATVRKVLSMPQVNIVKKTEVQTGGFSKESILPKRNSDKLIARKKDWDPKKYGGFDSPTVAYSVLVVAKVEKGKSKKLKSVKELLGITIMERSSFEKNPIDFLEAKGYKEVKKDLIIKLPKYSLFELENGRKRMLASAGELQKGNELALPSKYVNFLYLASHYEKLKGSPEDNEQKQLFVEQHKHYLDEIIEQISEFSKRVILADANLDKVLSAYNKHRDKPIREQAENIIHLFTLTNLGAPAAFKYFDTTIDRKRYTSTKEVLDATLIHQSITGLYETRIDLSQLGGDGGEAAAKGGGGSSGGTLNIEDEYRLHETSKEPDVPLGSTWLSDFPQAWAETGGMGLAVRQAPLIIPLKATSTPVSIKQYPMSQEARLGIKPHIQRLLDQGILVPCQSPWNTPLLPVKKPGTNDYRPVQDLREVNKRVEDIHPTVPNPYNLLSGLPPSHQWYTVLDLKDAFFCLRLHPTSQPLFAFEWRDPEMGISGQLTWTRLPQGFKNSPTLFDEALHRDLADFRIQHPDLILLQYVDDLLLAATSEQDCQRGTRALLQTLGNLGYRASAKKAQICQKQVKYLGYLLKEGQRWLTEARKETVMGQPTPKTPRQLREFLGTAGFCRLWIPGFAEMAAPLYPLTKTGTLFNWGPDQQKAYQEIKQALLTAPALGLPDLTKPFELFVDEKQGYAKGVLTQKLGPWRRPVAYLSKKLDPVAAGWPPCLRMVAAIAVLTKDAGKLTMGQPLVILAPHAVEALVKQPPDRWLSNARMTHYQAMLLDTDRVQFGPVVALNPATLLPLPEKEAPHDCLEILAETHGTRPDLTDQPIPDADYTWYTDGSSFLQEGQRRAGAAVTTETEVIWARALPAGTSAQRAELIALTQALKMAEGKKLNVYTDSRYAFATAHVHGEIYRRRGLLTSEGREIKNKNEILALLKALFLPKRLSIIHCPGHQKGNSAEARGNRMADQAAREAAMKAVLETSTLLAGKRTADGSEFEKRTADGSEFESPKKKAKVE

SEQ ID NO: 956 - protein, 2092 aa, synthetic construct
MPAAKRVKLDGGDKKYSIGLDIGTNSVGWAVITDEYKVPSKKFKVLGNTDRHSIKKNLIGALLFDSGETAEATRLKRTARRRYTRRKNRICYLQEIFSNEMAKVDDSFFHRLEESFLVEEDKKHERHPIFGNIVDEVAYHEKYPTIYHLRKKLVDSTDKADLRLIYLALAHMIKFRGHFLIEGDLNPDNSDVDKLFIQLVQTYNQLFEENPINASGVDAKAILSARLSKSRRLENLIAQLPGEKKNGLFGNLIALSLGLTPNFKSNFDLAEDAKLQLSKDTYDDDLDNLLAQIGDQYADLFLAAKNLSDAILLSDILRVNTEITKAPLSASMIKRYDEHHQDLTLLKALVRQQLPEKYKEIFFDQSKNGYAGYIDGGASQEEFYKFIKPILEKMDGTEELLVKLNREDLLRKQRTFDNGSIPHQIHLGELHAILRRQEDFYPFLKDNREKIEKILTFRIPYYVGPLARGNSRFAWMTRKSEETITPWNFEEVVDKGASAQSFIERMTNFDKNLPNEKVLPKHSLLYEYFTVYNELTKVKYVTEGMRKPAFLSGEQKKAIVDLLFKTNRKVTVKQLKEDYFKKIECFDSVEISGVEDRFNASLGTYHDLLKIIKDKDFLDNEENEDILEDIVLTLTLFEDREMIEERLKTYAHLFDDKVMKQLKRRRYTGWGRLSRKLINGIRDKQSGKTILDFLKSDGFANRNFMQLIHDDSLTFKEDIQKAQVSGQGDSLHEHIANLAGSPAIKKGILQTVKVVDELVKVMGRHKPENIVIEMARENQTTQKGQKNSRERMKRIEEGIKELGSQILKEHPVENTQLQNEKLYLYYLQNGRDMYVDQELDINRLSDYDVDHIVPQSFLKDDSIDNKVLTRSDKARGKSDNVPSEEVVKKMKNYWRQLLNAKLITQRKFDNLTKAERGGLSELDKAGFIKRQLVETRQITKHVAQILDSRMNTKYDENDKLIREVKVITLKSKLVSDFRKDFQFYKVREINNYHHAHDAYLNAVVGTALIKKYPKLESEFVYGDYKVYDVRKMIAKSEQEIGKATAKYFFYSNIMNFFKTEITLANGEIRKRPLIETNGETGEIVWDKGRDFATVRKVLSMPQVNIVKKTEVQTGGFSKESILPKRNSDKLIARKKDWDPKKYGGFDSPTVAYSVLVVAKVEKGKSKKLKSVKELLGITIMERSSFEKNPIDFLEAKGYKEVKKDLIIKLPKYSLFELENGRKRMLASAGELQKGNELALPSKYVNFLYLASHYEKLKGSPEDNEQKQLFVEQHKHYLDEIIEQISEFSKRVILADANLDKVLSAYNKHRDKPIREQAENIIHLFTLTNLGAPAAFKYFDTTIDRKRYTSTKEVLDATLIHQSITGLYETRIDLSQLGGDGGGGGGGGGGGTLNIEDEYRLHETSKEPDVPLGSTWLSDFPQAWAETGGMGLAVRQAPLIIPLKATSTPVSIKQYPMSQEARLGIKPHIQRLLDQGILVPCQSPWNTPLLPVKKPGTNDYRPVQDLREVNKRVEDIHPTVPNPYNLLSGLPPSHQWYTVLDLKDAFFCLRLHPTSQPLFAFEWRDPEMGISGQLTWTRLPQGFKNSPTLFDEALHRDLADFRIQHPDLILLQYVDDLLLAATSEQDCQRGTRALLQTLGNLGYRASAKKAQICQKQVKYLGYLLKEGQRWLTEARKETVMGQPTPKTPRQLREFLGTAGFCRLWIPGFAEMAAPLYPLTKTGTLFNWGPDQQKAYQEIKQALLTAPALGLPDLTKPFELFVDEKQGYAKGVLTQKLGPWRRPVAYLSKKLDPVAAGWPPCLRMVAAIAVLTKDAGKLTMGQPLVILAPHAVEALVKQPPDRWLSNARMTHYQAMLLDTDRVQFGPVVALNPATLLPLPEKEAPHDCLEILAETHGTRPDLTDQPIPDADYTWYTDGSSFLQEGQRRAGAAVTTETEVIWARALPAGTSAQRAELIALTQALKMAEGKKLNVYTDSRYAFATAHVHGEIYRRRGLLTSEGREIKNKNEILALLKALFLPKRLSIIHCPGHQKGNSAEARGNRMADQAAREAAMKAVLETSTLLAGKRTADGSEFEKRTADGSEFESPKKKAKVE

SEQ ID NO: 957 - protein, 2094 aa, synthetic construct
MPAAKRVKLDGGDKKYSIGLDIGTNSVGWAVITDEYKVPSKKFKVLGNTDRHSIKKNLIGALLFDSGETAEATRLKRTARRRYTRRKNRICYLQEIFSNEMAKVDDSFFHRLEESFLVEEDKKHERHPIFGNIVDEVAYHEKYPTIYHLRKKLVDSTDKADLRLIYLALAHMIKFRGHFLIEGDLNPDNSDVDKLFIQLVQTYNQLFEENPINASGVDAKAILSARLSKSRRLENLIAQLPGEKKNGLFGNLIALSLGLTPNFKSNFDLAEDAKLQLSKDTYDDDLDNLLAQIGDQYADLFLAAKNLSDAILLSDILRVNTEITKAPLSASMIKRYDEHHQDLTLLKALVRQQLPEKYKEIFFDQSKNGYAGYIDGGASQEEFYKFIKPILEKMDGTEELLVKLNREDLLRKQRTFDNGSIPHQIHLGELHAILRRQEDFYPFLKDNREKIEKILTFRIPYYVGPLARGNSRFAWMTRKSEETITPWNFEEVVDKGASAQSFIERMTNFDKNLPNEKVLPKHSLLYEYFTVYNELTKVKYVTEGMRKPAFLSGEQKKAIVDLLFKTNRKVTVKQLKEDYFKKIECFDSVEISGVEDRFNASLGTYHDLLKIIKDKDFLDNEENEDILEDIVLTLTLFEDREMIEERLKTYAHLFDDKVMKQLKRRRYTGWGRLSRKLINGIRDKQSGKTILDFLKSDGFANRNFMQLIHDDSLTFKEDIQKAQVSGQGDSLHEHIANLAGSPAIKKGILQTVKVVDELVKVMGRHKPENIVIEMARENQTTQKGQKNSRERMKRIEEGIKELGSQILKEHPVENTQLQNEKLYLYYLQNGRDMYVDQELDINRLSDYDVDHIVPQSFLKDDSIDNKVLTRSDKARGKSDNVPSEEVVKKMKNYWRQLLNAKLITQRKFDNLTKAERGGLSELDKAGFIKRQLVETRQITKHVAQILDSRMNTKYDENDKLIREVKVITLKSKLVSDFRKDFQFYKVREINNYHHAHDAYLNAVVGTALIKKYPKLESEFVYGDYKVYDVRKMIAKSEQEIGKATAKYFFYSNIMNFFKTEITLANGEIRKRPLIETNGETGEIVWDKGRDFATVRKVLSMPQVNIVKKTEVQTGGFSKESILPKRNSDKLIARKKDWDPKKYGGFDSPTVAYSVLVVAKVEKGKSKKLKSVKELLGITIMERSSFEKNPIDFLEAKGYKEVKKDLIIKLPKYSLFELENGRKRMLASAGELQKGNELALPSKYVNFLYLASHYEKLKGSPEDNEQKQLFVEQHKHYLDEIIEQISEFSKRVILADANLDKVLSAYNKHRDKPIREQAENIIHLFTLTNLGAPAAFKYFDTTIDRKRYTSTKEVLDATLIHQSITGLYETRIDLSQLGGDGGGSSGGSGGGGGTLNIEDEYRLHETSKEPDVPLGSTWLSDFPQAWAETGGMGLAVRQAPLIIPLKATSTPVSIKQYPMSQEARLGIKPHIQRLLDQGILVPCQSPWNTPLLPVKKPGTNDYRPVQDLREVNKRVEDIHPTVPNPYNLLSGLPPSHQWYTVLDLKDAFFCLRLHPTSQPLFAFEWRDPEMGISGQLTWTRLPQGFKNSPTLFDEALHRDLADFRIQHPDLILLQYVDDLLLAATSEQDCQRGTRALLQTLGNLGYRASAKKAQICQKQVKYLGYLLKEGQRWLTEARKETVMGQPTPKTPRQLREFLGTAGFCRLWIPGFAEMAAPLYPLTKTGTLFNWGPDQQKAYQEIKQALLTAPALGLPDLTKPFELFVDEKQGYAKGVLTQKLGPWRRPVAYLSKKLDPVAAGWPPCLRMVAAIAVLTKDAGKLTMGQPLVILAPHAVEALVKQPPDRWLSNARMTHYQAMLLDTDRVQFGPVVALNPATLLPLPEKEAPHDCLEILAETHGTRPDLTDQPIPDADYTWYTDGSSFLQEGQRRAGAAVTTETEVIWARALPAGTSAQRAELIALTQALKMAEGKKLNVYTDSRYAFATAHVHGEIYRRRGLLTSEGREIKNKNEILALLKALFLPKRLSIIHCPGHQKGNSAEARGNRMADQAAREAAMKAVLETSTLLAGKRTADGSEFEKRTADGSEFESPKKKAKVE

SEQ ID NO: 958 - protein, 2103 aa, synthetic construct
MPAAKRVKLDGGDKKYSIGLDIGTNSVGWAVITDEYKVPSKKFKVLGNTDRHSIKKNLIGALLFDSGETAEATRLKRTARRRYTRRKNRICYLQEIFSNEMAKVDDSFFHRLEESFLVEEDKKHERHPIFGNIVDEVAYHEKYPTIYHLRKKLVDSTDKADLRLIYLALAHMIKFRGHFLIEGDLNPDNSDVDKLFIQLVQTYNQLFEENPINASGVDAKAILSARLSKSRRLENLIAQLPGEKKNGLFGNLIALSLGLTPNFKSNFDLAEDAKLQLSKDTYDDDLDNLLAQIGDQYADLFLAAKNLSDAILLSDILRVNTEITKAPLSASMIKRYDEHHQDLTLLKALVRQQLPEKYKEIFFDQSKNGYAGYIDGGASQEEFYKFIKPILEKMDGTEELLVKLNREDLLRKQRTFDNGSIPHQIHLGELHAILRRQEDFYPFLKDNREKIEKILTFRIPYYVGPLARGNSRFAWMTRKSEETITPWNFEEVVDKGASAQSFIERMTNFDKNLPNEKVLPKHSLLYEYFTVYNELTKVKYVTEGMRKPAFLSGEQKKAIVDLLFKTNRKVTVKQLKEDYFKKIECFDSVEISGVEDRFNASLGTYHDLLKIIKDKDFLDNEENEDILEDIVLTLTLFEDREMIEERLKTYAHLFDDKVMKQLKRRRYTGWGRLSRKLINGIRDKQSGKTILDFLKSDGFANRNFMQLIHDDSLTFKEDIQKAQVSGQGDSLHEHIANLAGSPAIKKGILQTVKVVDELVKVMGRHKPENIVIEMARENQTTQKGQKNSRERMKRIEEGIKELGSQILKEHPVENTQLQNEKLYLYYLQNGRDMYVDQELDINRLSDYDVDHIVPQSFLKDDSIDNKVLTRSDKARGKSDNVPSEEVVKKMKNYWRQLLNAKLITQRKFDNLTKAERGGLSELDKAGFIKRQLVETRQITKHVAQILDSRMNTKYDENDKLIREVKVITLKSKLVSDFRKDFQFYKVREINNYHHAHDAYLNAVVGTALIKKYPKLESEFVYGDYKVYDVRKMIAKSEQEIGKATAKYFFYSNIMNFFKTEITLANGEIRKRPLIETNGETGEIVWDKGRDFATVRKVLSMPQVNIVKKTEVQTGGFSKESILPKRNSDKLIARKKDWDPKKYGGFDSPTVAYSVLVVAKVEKGKSKKLKSVKELLGITIMERSSFEKNPIDFLEAKGYKEVKKDLIIKLPKYSLFELENGRKRMLASAGELQKGNELALPSKYVNFLYLASHYEKLKGSPEDNEQKQLFVEQHKHYLDEIIEQISEFSKRVILADANLDKVLSAYNKHRDKPIREQAENIIHLFTLTNLGAPAAFKYFDTTIDRKRYTSTKEVLDATLIHQSITGLYETRIDLSQLGGDGGGGSGGSGGSGGSGGSGGSGGTLNIEDEYRLHETSKEPDVPLGSTWLSDFPQAWAETGGMGLAVRQAPLIIPLKATSTPVSIKQYPMSQEARLGIKPHIQRLLDQGILVPCQSPWNTPLLPVKKPGTNDYRPVQDLREVNKRVEDIHPTVPNPYNLLSGLPPSHQWYTVLDLKDAFFCLRLHPTSQPLFAFEWRDPEMGISGQLTWTRLPQGFKNSPTLFNEALHRDLADFRIQHPDLILLQYVDDLLLAATSEQDCQRGTRALLQTLGNLGYRASAKKAQICQKQVKYLGYLLKEGQRWLTEARKETVMGQPTPKTPRQLREFLGTAGFCRLWIPGFAEMAAPLYPLTKPGTLFNWGPDQQKAYQEIKQALLTAPALGLPDLTKPFELFVDEKQGYAKGVLTQKLGPWRRPVAYLSKKLDPVAAGWPPCLRMVAAIAVLTKDAGKLTMGQPLVILAPHAVEALVKQPPDRWLSNARMTHYQAMLLDTDRVQFGPVVALNPATLLPLPEKEAPHDCLEILAETHGTRPDLTDQPIPDADYTWYTDGSSFLQEGQRRAGAAVTTETEVIWARALPAGTSAQRAELIALTQALKMAEGKKLNVYTDSRYAFATAHVHGEIYRRRGWLTSEGREIKNKNEILALLKALFLPKRLSIIHCPGHQKGNSAEARGNRMADQAAREAAMKAVLETSTLLAGKRTADGSEFEKRTADGSEFESPKKKAKVE

SEQ ID NO: 959 - protein, 2094 aa, synthetic construct
MPAAKRVKLDGGDKKYSIGLDIGTNSVGWAVITDEYKVPSKKFKVLGNTDRHSIKKNLIGALLFDSGETAEATRLKRTARRRYTRRKNRICYLQEIFSNEMAKVDDSFFHRLEESFLVEEDKKHERHPIFGNIVDEVAYHEKYPTIYHLRKKLVDSTDKADLRLIYLALAHMIKFRGHFLIEGDLNPDNSDVDKLFIQLVQTYNQLFEENPINASGVDAKAILSARLSKSRRLENLIAQLPGEKKNGLFGNLIALSLGLTPNFKSNFDLAEDAKLQLSKDTYDDDLDNLLAQIGDQYADLFLAAKNLSDAILLSDILRVNTEITKAPLSASMIKRYDEHHQDLTLLKALVRQQLPEKYKEIFFDQSKNGYAGYIDGGASQEEFYKFIKPILEKMDGTEELLVKLNREDLLRKQRTFDNGSIPHQIHLGELHAILRRQEDFYPFLKDNREKIEKILTFRIPYYVGPLARGNSRFAWMTRKSEETITPWNFEEVVDKGASAQSFIERMTNFDKNLPNEKVLPKHSLLYEYFTVYNELTKVKYVTEGMRKPAFLSGEQKKAIVDLLFKTNRKVTVKQLKEDYFKKIECFDSVEISGVEDRFNASLGTYHDLLKIIKDKDFLDNEENEDILEDIVLTLTLFEDREMIEERLKTYAHLFDDKVMKQLKRRRYTGWGRLSRKLINGIRDKQSGKTILDFLKSDGFANRNFMQLIHDDSLTFKEDIQKAQVSGQGDSLHEHIANLAGSPAIKKGILQTVKVVDELVKVMGRHKPENIVIEMARENQTTQKGQKNSRERMKRIEEGIKELGSQILKEHPVENTQLQNEKLYLYYLQNGRDMYVDQELDINRLSDYDVDHIVPQSFLKDDSIDNKVLTRSDKARGKSDNVPSEEVVKKMKNYWRQLLNAKLITQRKFDNLTKAERGGLSELDKAGFIKRQLVETRQITKHVAQILDSRMNTKYDENDKLIREVKVITLKSKLVSDFRKDFQFYKVREINNYHHAHDAYLNAVVGTALIKKYPKLESEFVYGDYKVYDVRKMIAKSEQEIGKATAKYFFYSNIMNFFKTEITLANGEIRKRPLIETNGETGEIVWDKGRDFATVRKVLSMPQVNIVKKTEVQTGGFSKESILPKRNSDKLIARKKDWDPKKYGGFDSPTVAYSVLVVAKVEKGKSKKLKSVKELLGITIMERSSFEKNPIDFLEAKGYKEVKKDLIIKLPKYSLFELENGRKRMLASAGELQKGNELALPSKYVNFLYLASHYEKLKGSPEDNEQKQLFVEQHKHYLDEIIEQISEFSKRVILADANLDKVLSAYNKHRDKPIREQAENIIHLFTLTNLGAPAAFKYFDTTIDRKRYTSTKEVLDATLIHQSITGLYETRIDLSQLGGDGGGSSGSSGSSGGTLNIEDEYRLHETSKEPDVPLGSTWLSDFPQAWAETGGMGLAVRQAPLIIPLKATSTPVSIKQYPMSQEARLGIKPHIQRLLDQGILVPCQSPWNTPLLPVKKPGTNDYRPVQDLREVNKRVEDIHPTVPNPYNLLSGLPPSHQWYTVLDLKDAFFCLRLHPTSQPLFAFEWRDPEMGISGQLTWTRLPQGFKNSPTLFNEALHRDLADFRIQHPDLILLQYVDDLLLAATSEQDCQRGTRALLQTLGNLGYRASAKKAQICQKQVKYLGYLLKEGQRWLTEARKETVMGQPTPKTPRQLREFLGTAGFCRLWIPGFAEMAAPLYPLTKPGTLFNWGPDQQKAYQEIKQALLTAPALGLPDLTKPFELFVDEKQGYAKGVLTQKLGPWRRPVAYLSKKLDPVAAGWPPCLRMVAAIAVLTKDAGKLTMGQPLVILAPHAVEALVKQPPDRWLSNARMTHYQAMLLDTDRVQFGPVVALNPATLLPLPEKEAPHDCLEILAETHGTRPDLTDQPIPDADYTWYTDGSSFLQEGQRRAGAAVTTETEVIWARALPAGTSAQRAELIALTQALKMAEGKKLNVYTDSRYAFATAHVHGEIYRRRGWLTSEGREIKNKNEILALLKALFLPKRLSIIHCPGHQKGNSAEARGNRMADQAAREAAMKAVLETSTLLAGKRTADGSEFEKRTADGSEFESPKKKAKVE

SEQ ID NO: 960 - protein, 2096 aa, synthetic construct
MPAAKRVKLDGGDKKYSIGLDIGTNSVGWAVITDEYKVPSKKFKVLGNTDRHSIKKNLIGALLFDSGETAEATRLKRTARRRYTRRKNRICYLQEIFSNEMAKVDDSFFHRLEESFLVEEDKKHERHPIFGNIVDEVAYHEKYPTIYHLRKKLVDSTDKADLRLIYLALAHMIKFRGHFLIEGDLNPDNSDVDKLFIQLVQTYNQLFEENPINASGVDAKAILSARLSKSRRLENLIAQLPGEKKNGLFGNLIALSLGLTPNFKSNFDLAEDAKLQLSKDTYDDDLDNLLAQIGDQYADLFLAAKNLSDAILLSDILRVNTEITKAPLSASMIKRYDEHHQDLTLLKALVRQQLPEKYKEIFFDQSKNGYAGYIDGGASQEEFYKFIKPILEKMDGTEELLVKLNREDLLRKQRTFDNGSIPHQIHLGELHAILRRQEDFYPFLKDNREKIEKILTFRIPYYVGPLARGNSRFAWMTRKSEETITPWNFEEVVDKGASAQSFIERMTNFDKNLPNEKVLPKHSLLYEYFTVYNELTKVKYVTEGMRKPAFLSGEQKKAIVDLLFKTNRKVTVKQLKEDYFKKIECFDSVEISGVEDRFNASLGTYHDLLKIIKDKDFLDNEENEDILEDIVLTLTLFEDREMIEERLKTYAHLFDDKVMKQLKRRRYTGWGRLSRKLINGIRDKQSGKTILDFLKSDGFANRNFMQLIHDDSLTFKEDIQKAQVSGQGDSLHEHIANLAGSPAIKKGILQTVKVVDELVKVMGRHKPENIVIEMARENQTTQKGQKNSRERMKRIEEGIKELGSQILKEHPVENTQLQNEKLYLYYLQNGRDMYVDQELDINRLSDYDVDHIVPQSFLKDDSIDNKVLTRSDKARGKSDNVPSEEVVKKMKNYWRQLLNAKLITQRKFDNLTKAERGGLSELDKAGFIKRQLVETRQITKHVAQILDSRMNTKYDENDKLIREVKVITLKSKLVSDFRKDFQFYKVREINNYHHAHDAYLNAVVGTALIKKYPKLESEFVYGDYKVYDVRKMIAKSEQEIGKATAKYFFYSNIMNFFKTEITLANGEIRKRPLIETNGETGEIVWDKGRDFATVRKVLSMPQVNIVKKTEVQTGGFSKESILPKRNSDKLIARKKDWDPKKYGGFDSPTVAYSVLVVAKVEKGKSKKLKSVKELLGITIMERSSFEKNPIDFLEAKGYKEVKKDLIIKLPKYSLFELENGRKRMLASAGELQKGNELALPSKYVNFLYLASHYEKLKGSPEDNEQKQLFVEQHKHYLDEIIEQISEFSKRVILADANLDKVLSAYNKHRDKPIREQAENIIHLFTLTNLGAPAAFKYFDTTIDRKRYTSTKEVLDATLIHQSITGLYETRIDLSQLGGDGGEAAAKGSSPAPGGTLNIEDEYRLHETSKEPDVPLGSTWLSDFPQAWAETGGMGLAVRQAPLIIPLKATSTPVSIKQYPMSQEARLGIKPHIQRLLDQGILVPCQSPWNTPLLPVKKPGTNDYRPVQDLREVNKRVEDIHPTVPNPYNLLSGLPPSHQWYTVLDLKDAFFCLRLHPTSQPLFAFEWRDPEMGISGQLTWTRLPQGFKNSPTLFNEALHRDLADFRIQHPDLILLQYVDDLLLAATSEQDCQRGTRALLQTLGNLGYRASAKKAQICQKQVKYLGYLLKEGQRWLTEARKETVMGQPTPKTPRQLREFLGTAGFCRLWIPGFAEMAAPLYPLTKPGTLFNWGPDQQKAYQEIKQALLTAPALGLPDLTKPFELFVDEKQGYAKGVLTQKLGPWRRPVAYLSKKLDPVAAGWPPCLRMVAAIAVLTKDAGKLTMGQPLVILAPHAVEALVKQPPDRWLSNARMTHYQAMLLDTDRVQFGPVVALNPATLLPLPEKEAPHDCLEILAETHGTRPDLTDQPIPDADYTWYTDGSSFLQEGQRRAGAAVTTETEVIWARALPAGTSAQRAELIALTQALKMAEGKKLNVYTDSRYAFATAHVHGEIYRRRGWLTSEGREIKNKNEILALLKALFLPKRLSIIHCPGHQKGNSAEARGNRMADQAAREAAMKAVLETSTLLAGKRTADGSEFEKRTADGSEFESPKKKAKVE

SEQ ID NO: 961 - protein, 2096 aa, synthetic construct
MPAAKRVKLDGGDKKYSIGLDIGTNSVGWAVITDEYKVPSKKFKVLGNTDRHSIKKNLIGALLFDSGETAEATRLKRTARRRYTRRKNRICYLQEIFSNEMAKVDDSFFHRLEESFLVEEDKKHERHPIFGNIVDEVAYHEKYPTIYHLRKKLVDSTDKADLRLIYLALAHMIKFRGHFLIEGDLNPDNSDVDKLFIQLVQTYNQLFEENPINASGVDAKAILSARLSKSRRLENLIAQLPGEKKNGLFGNLIALSLGLTPNFKSNFDLAEDAKLQLSKDTYDDDLDNLLAQIGDQYADLFLAAKNLSDAILLSDILRVNTEITKAPLSASMIKRYDEHHQDLTLLKALVRQQLPEKYKEIFFDQSKNGYAGYIDGGASQEEFYKFIKPILEKMDGTEELLVKLNREDLLRKQRTFDNGSIPHQIHLGELHAILRRQEDFYPFLKDNREKIEKILTFRIPYYVGPLARGNSRFAWMTRKSEETITPWNFEEVVDKGASAQSFIERMTNFDKNLPNEKVLPKHSLLYEYFTVYNELTKVKYVTEGMRKPAFLSGEQKKAIVDLLFKTNRKVTVKQLKEDYFKKIECFDSVEISGVEDRFNASLGTYHDLLKIIKDKDFLDNEENEDILEDIVLTLTLFEDREMIEERLKTYAHLFDDKVMKQLKRRRYTGWGRLSRKLINGIRDKQSGKTILDFLKSDGFANRNFMQLIHDDSLTFKEDIQKAQVSGQGDSLHEHIANLAGSPAIKKGILQTVKVVDELVKVMGRHKPENIVIEMARENQTTQKGQKNSRERMKRIEEGIKELGSQILKEHPVENTQLQNEKLYLYYLQNGRDMYVDQELDINRLSDYDVDHIVPQSFLKDDSIDNKVLTRSDKARGKSDNVPSEEVVKKMKNYWRQLLNAKLITQRKFDNLTKAERGGLSELDKAGFIKRQLVETRQITKHVAQILDSRMNTKYDENDKLIREVKVITLKSKLVSDFRKDFQFYKVREINNYHHAHDAYLNAVVGTALIKKYPKLESEFVYGDYKVYDVRKMIAKSEQEIGKATAKYFFYSNIMNFFKTEITLANGEIRKRPLIETNGETGEIVWDKGRDFATVRKVLSMPQVNIVKKTEVQTGGFSKESILPKRNSDKLIARKKDWDPKKYGGFDSPTVAYSVLVVAKVEKGKSKKLKSVKELLGITIMERSSFEKNPIDFLEAKGYKEVKKDLIIKLPKYSLFELENGRKRMLASAGELQKGNELALPSKYVNFLYLASHYEKLKGSPEDNEQKQLFVEQHKHYLDEIIEQISEFSKRVILADANLDKVLSAYNKHRDKPIREQAENIIHLFTLTNLGAPAAFKYFDTTIDRKRYTSTKEVLDATLIHQSITGLYETRIDLSQLGGDGGEAAAKPAPGGSGGTLNIEDEYRLHETSKEPDVPLGSTWLSDFPQAWAETGGMGLAVRQAPLIIPLKATSTPVSIKQYPMSQEARLGIKPHIQRLLDQGILVPCQSPWNTPLLPVKKPGTNDYRPVQDLREVNKRVEDIHPTVPNPYNLLSGLPPSHQWYTVLDLKDAFFCLRLHPTSQPLFAFEWRDPEMGISGQLTWTRLPQGFKNSPTLFNEALHRDLADFRIQHPDLILLQYVDDLLLAATSEQDCQRGTRALLQTLGNLGYRASAKKAQICQKQVKYLGYLLKEGQRWLTEARKETVMGQPTPKTPRQLREFLGTAGFCRLWIPGFAEMAAPLYPLTKPGTLFNWGPDQQKAYQEIKQALLTAPALGLPDLTKPFELFVDEKQGYAKGVLTQKLGPWRRPVAYLSKKLDPVAAGWPPCLRMVAAIAVLTKDAGKLTMGQPLVILAPHAVEALVKQPPDRWLSNARMTHYQAMLLDTDRVQFGPVVALNPATLLPLPEKEAPHDCLEILAETHGTRPDLTDQPIPDADYTWYTDGSSFLQEGQRRAGAAVTTETEVIWARALPAGTSAQRAELIALTQALKMAEGKKLNVYTDSRYAFATAHVHGEIYRRRGWLTSEGREIKNKNEILALLKALFLPKRLSIIHCPGHQKGNSAEARGNRMADQAAREAAMKAVLETSTLLAGKRTADGSEFEKRTADGSEFESPKKKAKVE

SEQ ID NO: 962 - protein, 2131 aa, synthetic construct
MPAAKRVKLDGGDKKYSIGLDIGTNSVGWAVITDEYKVPSKKFKVLGNTDRHSIKKNLIGALLFDSGETAEATRLKRTARRRYTRRKNRICYLQEIFSNEMAKVDDSFFHRLEESFLVEEDKKHERHPIFGNIVDEVAYHEKYPTIYHLRKKLVDSTDKADLRLIYLALAHMIKFRGHFLIEGDLNPDNSDVDKLFIQLVQTYNQLFEENPINASGVDAKAILSARLSKSRRLENLIAQLPGEKKNGLFGNLIALSLGLTPNFKSNFDLAEDAKLQLSKDTYDDDLDNLLAQIGDQYADLFLAAKNLSDAILLSDILRVNTEITKAPLSASMIKRYDEHHQDLTLLKALVRQQLPEKYKEIFFDQSKNGYAGYIDGGASQEEFYKFIKPILEKMDGTEELLVKLNREDLLRKQRTFDNGSIPHQIHLGELHAILRRQEDFYPFLKDNREKIEKILTFRIPYYVGPLARGNSRFAWMTRKSEETITPWNFEEVVDKGASAQSFIERMTNFDKNLPNEKVLPKHSLLYEYFTVYNELTKVKYVTEGMRKPAFLSGEQKKAIVDLLFKTNRKVTVKQLKEDYFKKIECFDSVEISGVEDRFNASLGTYHDLLKIIKDKDFLDNEENEDILEDIVLTLTLFEDREMIEERLKTYAHLFDDKVMKQLKRRRYTGWGRLSRKLINGIRDKQSGKTILDFLKSDGFANRNFMQLIHDDSLTFKEDIQKAQVSGQGDSLHEHIANLAGSPAIKKGILQTVKVVDELVKVMGRHKPENIVIEMARENQTTQKGQKNSRERMKRIEEGIKELGSQILKEHPVENTQLQNEKLYLYYLQNGRDMYVDQELDINRLSDYDVDHIVPQSFLKDDSIDNKVLTRSDKARGKSDNVPSEEVVKKMKNYWRQLLNAKLITQRKFDNLTKAERGGLSELDKAGFIKRQLVETRQITKHVAQILDSRMNTKYDENDKLIREVKVITLKSKLVSDFRKDFQFYKVREINNYHHAHDAYLNAVVGTALIKKYPKLESEFVYGDYKVYDVRKMIAKSEQEIGKATAKYFFYSNIMNFFKTEITLANGEIRKRPLIETNGETGEIVWDKGRDFATVRKVLSMPQVNIVKKTEVQTGGFSKESILPKRNSDKLIARKKDWDPKKYGGFDSPTVAYSVLVVAKVEKGKSKKLKSVKELLGITIMERSSFEKNPIDFLEAKGYKEVKKDLIIKLPKYSLFELENGRKRMLASAGELQKGNELALPSKYVNFLYLASHYEKLKGSPEDNEQKQLFVEQHKHYLDEIIEQISEFSKRVILADANLDKVLSAYNKHRDKPIREQAENIIHLFTLTNLGAPAAFKYFDTTIDRKRYTSTKEVLDATLIHQSITGLYETRIDLSQLGGDGGAEAAAKEAAAKEAAAKEAAAKALEAEAAAKEAAAKEAAAKEAAAKAGGTLNIEDEYRLHETSKEPDVPLGSTWLSDFPQAWAETGGMGLAVRQAPLIIPLKATSTPVSIKQYPMSQEARLGIKPHIQRLLDQGILVPCQSPWNTPLLPVKKPGTNDYRPVQDLREVNKRVEDIHPTVPNPYNLLSGLPPSHQWYTVLDLKDAFFCLRLHPTSQPLFAFEWRDPEMGISGQLTWTRLPQGFKNSPTLFNEALHRDLADFRIQHPDLILLQYVDDLLLAATSEQDCQRGTRALLQTLGNLGYRASAKKAQICQKQVKYLGYLLKEGQRWLTEARKETVMGQPTPKTPRQLREFLGTAGFCRLWIPGFAEMAAPLYPLTKPGTLFNWGPDQQKAYQEIKQALLTAPALGLPDLTKPFELFVDEKQGYAKGVLTQKLGPWRRPVAYLSKKLDPVAAGWPPCLRMVAAIAVLTKDAGKLTMGQPLVILAPHAVEALVKQPPDRWLSNARMTHYQAMLLDTDRVQFGPVVALNPATLLPLPEKEAPHDCLEILAETHGTRPDLTDQPIPDADYTWYTDGSSFLQEGQRRAGAAVTTETEVIWARALPAGTSAQRAELIALTQALKMAEGKKLNVYTDSRYAFATAHVHGEIYRRRGWLTSEGREIKNKNEILALLKALFLPKRLSIIHCPGHQKGNSAEARGNRMADQAAREAAMKAVLETSTLLAGKRTADGSEFEKRTADGSEFESPKKKAKVE

SEQ ID NO: 963 - protein, 2096 aa, synthetic construct
MPAAKRVKLDGGDKKYSIGLDIGTNSVGWAVITDEYKVPSKKFKVLGNTDRHSIKKNLIGALLFDSGETAEATRLKRTARRRYTRRKNRICYLQEIFSNEMAKVDDSFFHRLEESFLVEEDKKHERHPIFGNIVDEVAYHEKYPTIYHLRKKLVDSTDKADLRLIYLALAHMIKFRGHFLIEGDLNPDNSDVDKLFIQLVQTYNQLFEENPINASGVDAKAILSARLSKSRRLENLIAQLPGEKKNGLFGNLIALSLGLTPNFKSNFDLAEDAKLQLSKDTYDDDLDNLLAQIGDQYADLFLAAKNLSDAILLSDILRVNTEITKAPLSASMIKRYDEHHQDLTLLKALVRQQLPEKYKEIFFDQSKNGYAGYIDGGASQEEFYKFIKPILEKMDGTEELLVKLNREDLLRKQRTFDNGSIPHQIHLGELHAILRRQEDFYPFLKDNREKIEKILTFRIPYYVGPLARGNSRFAWMTRKSEETITPWNFEEVVDKGASAQSFIERMTNFDKNLPNEKVLPKHSLLYEYFTVYNELTKVKYVTEGMRKPAFLSGEQKKAIVDLLFKTNRKVTVKQLKEDYFKKIECFDSVEISGVEDRFNASLGTYHDLLKIIKDKDFLDNEENEDILEDIVLTLTLFEDREMIEERLKTYAHLFDDKVMKQLKRRRYTGWGRLSRKLINGIRDKQSGKTILDFLKSDGFANRNFMQLIHDDSLTFKEDIQKAQVSGQGDSLHEHIANLAGSPAIKKGILQTVKVVDELVKVMGRHKPENIVIEMARENQTTQKGQKNSRERMKRIEEGIKELGSQILKEHPVENTQLQNEKLYLYYLQNGRDMYVDQELDINRLSDYDVDHIVPQSFLKDDSIDNKVLTRSDKARGKSDNVPSEEVVKKMKNYWRQLLNAKLITQRKFDNLTKAERGGLSELDKAGFIKRQLVETRQITKHVAQILDSRMNTKYDENDKLIREVKVITLKSKLVSDFRKDFQFYKVREINNYHHAHDAYLNAVVGTALIKKYPKLESEFVYGDYKVYDVRKMIAKSEQEIGKATAKYFFYSNIMNFFKTEITLANGEIRKRPLIETNGETGEIVWDKGRDFATVRKVLSMPQVNIVKKTEVQTGGFSKESILPKRNSDKLIARKKDWDPKKYGGFDSPTVAYSVLVVAKVEKGKSKKLKSVKELLGITIMERSSFEKNPIDFLEAKGYKEVKKDLIIKLPKYSLFELENGRKRMLASAGELQKGNELALPSKYVNFLYLASHYEKLKGSPEDNEQKQLFVEQHKHYLDEIIEQISEFSKRVILADANLDKVLSAYNKHRDKPIREQAENIIHLFTLTNLGAPAAFKYFDTTIDRKRYTSTKEVLDATLIHQSITGLYETRIDLSQLGGDGGEAAAKGGGPAPGGTLNIEDEYRLHETSKEPDVPLGSTWLSDFPQAWAETGGMGLAVRQAPLIIPLKATSTPVSIKQYPMSQEARLGIKPHIQRLLDQGILVPCQSPWNTPLLPVKKPGTNDYRPVQDLREVNKRVEDIHPTVPNPYNLLSGLPPSHQWYTVLDLKDAFFCLRLHPTSQPLFAFEWRDPEMGISGQLTWTRLPQGFKNSPTLFNEALHRDLADFRIQHPDLILLQYVDDLLLAATSEQDCQRGTRALLQTLGNLGYRASAKKAQICQKQVKYLGYLLKEGQRWLTEARKETVMGQPTPKTPRQLREFLGTAGFCRLWIPGFAEMAAPLYPLTKPGTLFNWGPDQQKAYQEIKQALLTAPALGLPDLTKPFELFVDEKQGYAKGVLTQKLGPWRRPVAYLSKKLDPVAAGWPPCLRMVAAIAVLTKDAGKLTMGQPLVILAPHAVEALVKQPPDRWLSNARMTHYQAMLLDTDRVQFGPVVALNPATLLPLPEKEAPHDCLEILAETHGTRPDLTDQPIPDADYTWYTDGSSFLQEGQRRAGAAVTTETEVIWARALPAGTSAQRAELIALTQALKMAEGKKLNVYTDSRYAFATAHVHGEIYRRRGWLTSEGREIKNKNEILALLKALFLPKRLSIIHCPGHQKGNSAEARGNRMADQAAREAAMKAVLETSTLLAGKRTADGSEFEKRTADGSEFESPKKKAKVE

SEQ ID NO: 964 - protein, 2100 aa, synthetic construct
MPAAKRVKLDGGDKKYSIGLDIGTNSVGWAVITDEYKVPSKKFKVLGNTDRHSIKKNLIGALLFDSGETAEATRLKRTARRRYTRRKNRICYLQEIFSNEMAKVDDSFFHRLEESFLVEEDKKHERHPIFGNIVDEVAYHEKYPTIYHLRKKLVDSTDKADLRLIYLALAHMIKFRGHFLIEGDLNPDNSDVDKLFIQLVQTYNQLFEENPINASGVDAKAILSARLSKSRRLENLIAQLPGEKKNGLFGNLIALSLGLTPNFKSNFDLAEDAKLQLSKDTYDDDLDNLLAQIGDQYADLFLAAKNLSDAILLSDILRVNTEITKAPLSASMIKRYDEHHQDLTLLKALVRQQLPEKYKEIFFDQSKNGYAGYIDGGASQEEFYKFIKPILEKMDGTEELLVKLNREDLLRKQRTFDNGSIPHQIHLGELHAILRRQEDFYPFLKDNREKIEKILTFRIPYYVGPLARGNSRFAWMTRKSEETITPWNFEEVVDKGASAQSFIERMTNFDKNLPNEKVLPKHSLLYEYFTVYNELTKVKYVTEGMRKPAFLSGEQKKAIVDLLFKTNRKVTVKQLKEDYFKKIECFDSVEISGVEDRFNASLGTYHDLLKIIKDKDFLDNEENEDILEDIVLTLTLFEDREMIEERLKTYAHLFDDKVMKQLKRRRYTGWGRLSRKLINGIRDKQSGKTILDFLKSDGFANRNFMQLIHDDSLTFKEDIQKAQVSGQGDSLHEHIANLAGSPAIKKGILQTVKVVDELVKVMGRHKPENIVIEMARENQTTQKGQKNSRERMKRIEEGIKELGSQILKEHPVENTQLQNEKLYLYYLQNGRDMYVDQELDINRLSDYDVDHIVPQSFLKDDSIDNKVLTRSDKARGKSDNVPSEEVVKKMKNYWRQLLNAKLITQRKFDNLTKAERGGLSELDKAGFIKRQLVETRQITKHVAQILDSRMNTKYDENDKLIREVKVITLKSKLVSDFRKDFQFYKVREINNYHHAHDAYLNAVVGTALIKKYPKLESEFVYGDYKVYDVRKMIAKSEQEIGKATAKYFFYSNIMNFFKTEITLANGEIRKRPLIETNGETGEIVWDKGRDFATVRKVLSMPQVNIVKKTEVQTGGFSKESILPKRNSDKLIARKKDWDPKKYGGFDSPTVAYSVLVVAKVEKGKSKKLKSVKELLGITIMERSSFEKNPIDFLEAKGYKEVKKDLIIKLPKYSLFELENGRKRMLASAGELQKGNELALPSKYVNFLYLASHYEKLKGSPEDNEQKQLFVEQHKHYLDEIIEQISEFSKRVILADANLDKVLSAYNKHRDKPIREQAENIIHLFTLTNLGAPAAFKYFDTTIDRKRYTSTKEVLDATLIHQSITGLYETRIDLSQLGGDGGGSSGSSGSSGSSGSSGGTLNIEDEYRLHETSKEPDVPLGSTWLSDFPQAWAETGGMGLAVRQAPLIIPLKATSTPVSIKQYPMSQEARLGIKPHIQRLLDQGILVPCQSPWNTPLLPVKKPGTNDYRPVQDLREVNKRVEDIHPTVPNPYNLLSGLPPSHQWYTVLDLKDAFFCLRLHPTSQPLFAFEWRDPEMGISGQLTWTRLPQGFKNSPTLFNEALHRDLADFRIQHPDLILLQYVDDLLLAATSEQDCQRGTRALLQTLGNLGYRASAKKAQICQKQVKYLGYLLKEGQRWLTEARKETVMGQPTPKTPRQLREFLGTAGFCRLWIPGFAEMAAPLYPLTKPGTLFNWGPDQQKAYQEIKQALLTAPALGLPDLTKPFELFVDEKQGYAKGVLTQKLGPWRRPVAYLSKKLDPVAAGWPPCLRMVAAIAVLTKDAGKLTMGQPLVILAPHAVEALVKQPPDRWLSNARMTHYQAMLLDTDRVQFGPVVALNPATLLPLPEKEAPHDCLEILAETHGTRPDLTDQPIPDADYTWYTDGSSFLQEGQRRAGAAVTTETEVIWARALPAGTSAQRAELIALTQALKMAEGKKLNVYTDSRYAFATAHVHGEIYRRRGWLTSEGREIKNKNEILALLKALFLPKRLSIIHCPGHQKGNSAEARGNRMADQAAREAAMKAVLETSTLLAGKRTADGSEFEKRTADGSEFESPKKKAKVE

SEQ ID NO: 965 - protein, 2105 aa, synthetic construct
MPAAKRVKLDGGDKKYSIGLDIGTNSVGWAVITDEYKVPSKKFKVLGNTDRHSIKKNLIGALLFDSGETAEATRLKRTARRRYTRRKNRICYLQEIFSNEMAKVDDSFFHRLEESFLVEEDKKHERHPIFGNIVDEVAYHEKYPTIYHLRKKLVDSTDKADLRLIYLALAHMIKFRGHFLIEGDLNPDNSDVDKLFIQLVQTYNQLFEENPINASGVDAKAILSARLSKSRRLENLIAQLPGEKKNGLFGNLIALSLGLTPNFKSNFDLAEDAKLQLSKDTYDDDLDNLLAQIGDQYADLFLAAKNLSDAILLSDILRVNTEITKAPLSASMIKRYDEHHQDLTLLKALVRQQLPEKYKEIFFDQSKNGYAGYIDGGASQEEFYKFIKPILEKMDGTEELLVKLNREDLLRKQRTFDNGSIPHQIHLGELHAILRRQEDFYPFLKDNREKIEKILTFRIPYYVGPLARGNSRFAWMTRKSEETITPWNFEEVVDKGASAQSFIERMTNFDKNLPNEKVLPKHSLLYEYFTVYNELTKVKYVTEGMRKPAFLSGEQKKAIVDLLFKTNRKVTVKQLKEDYFKKIECFDSVEISGVEDRFNASLGTYHDLLKIIKDKDFLDNEENEDILEDIVLTLTLFEDREMIEERLKTYAHLFDDKVMKQLKRRRYTGWGRLSRKLINGIRDKQSGKTILDFLKSDGFANRNFMQLIHDDSLTFKEDIQKAQVSGQGDSLHEHIANLAGSPAIKKGILQTVKVVDELVKVMGRHKPENIVIEMARENQTTQKGQKNSRERMKRIEEGIKELGSQILKEHPVENTQLQNEKLYLYYLQNGRDMYVDQELDINRLSDYDVDHIVPQSFLKDDSIDNKVLTRSDKARGKSDNVPSEEVVKKMKNYWRQLLNAKLITQRKFDNLTKAERGGLSELDKAGFIKRQLVETRQITKHVAQILDSRMNTKYDENDKLIREVKVITLKSKLVSDFRKDFQFYKVREINNYHHAHDAYLNAVVGTALIKKYPKLESEFVYGDYKVYDVRKMIAKSEQEIGKATAKYFFYSNIMNFFKTEITLANGEIRKRPLIETNGETGEIVWDKGRDFATVRKVLSMPQVNIVKKTEVQTGGFSKESILPKRNSDKLIARKKDWDPKKYGGFDSPTVAYSVLVVAKVEKGKSKKLKSVKELLGITIMERSSFEKNPIDFLEAKGYKEVKKDLIIKLPKYSLFELENGRKRMLASAGELQKGNELALPSKYVNFLYLASHYEKLKGSPEDNEQKQLFVEQHKHYLDEIIEQISEFSKRVILADANLDKVLSAYNKHRDKPIREQAENIIHLFTLTNLGAPAAFKYFDTTIDRKRYTSTKEVLDATLIHQSITGLYETRIDLSQLGGDGGEAAAKEAAAKEAAAKEAAAKGGTLNIEDEYRLHETSKEPDVPLGSTWLSDFPQAWAETGGMGLAVRQAPLIIPLKATSTPVSIKQYPMSQEARLGIKPHIQRLLDQGILVPCQSPWNTPLLPVKKPGTNDYRPVQDLREVNKRVEDIHPTVPNPYNLLSGLPPSHQWYTVLDLKDAFFCLRLHPTSQPLFAFEWRDPEMGISGQLTWTRLPQGFKNSPTLFNEALHRDLADFRIQHPDLILLQYVDDLLLAATSEQDCQRGTRALLQTLGNLGYRASAKKAQICQKQVKYLGYLLKEGQRWLTEARKETVMGQPTPKTPRQLREFLGTAGFCRLWIPGFAEMAAPLYPLTKPGTLFNWGPDQQKAYQEIKQALLTAPALGLPDLTKPFELFVDEKQGYAKGVLTQKLGPWRRPVAYLSKKLDPVAAGWPPCLRMVAAIAVLTKDAGKLTMGQPLVILAPHAVEALVKQPPDRWLSNARMTHYQAMLLDTDRVQFGPVVALNPATLLPLPEKEAPHDCLEILAETHGTRPDLTDQPIPDADYTWYTDGSSFLQEGQRRAGAAVTTETEVIWARALPAGTSAQRAELIALTQALKMAEGKKLNVYTDSRYAFATAHVHGEIYRRRGWLTSEGREIKNKNEILALLKALFLPKRLSIIHCPGHQKGNSAEARGNRMADQAAREAAMKAVLETSTLLAGKRTADGSEFEKRTADGSEFESPKKKAKVE

SEQ ID NO: 966 - protein, 2093 aa, synthetic construct
MPAAKRVKLDGGDKKYSIGLDIGTNSVGWAVITDEYKVPSKKFKVLGNTDRHSIKKNLIGALLFDSGETAEATRLKRTARRRYTRRKNRICYLQEIFSNEMAKVDDSFFHRLEESFLVEEDKKHERHPIFGNIVDEVAYHEKYPTIYHLRKKLVDSTDKADLRLIYLALAHMIKFRGHFLIEGDLNPDNSDVDKLFIQLVQTYNQLFEENPINASGVDAKAILSARLSKSRRLENLIAQLPGEKKNGLFGNLIALSLGLTPNFKSNFDLAEDAKLQLSKDTYDDDLDNLLAQIGDQYADLFLAAKNLSDAILLSDILRVNTEITKAPLSASMIKRYDEHHQDLTLLKALVRQQLPEKYKEIFFDQSKNGYAGYIDGGASQEEFYKFIKPILEKMDGTEELLVKLNREDLLRKQRTFDNGSIPHQIHLGELHAILRRQEDFYPFLKDNREKIEKILTFRIPYYVGPLARGNSRFAWMTRKSEETITPWNFEEVVDKGASAQSFIERMTNFDKNLPNEKVLPKHSLLYEYFTVYNELTKVKYVTEGMRKPAFLSGEQKKAIVDLLFKTNRKVTVKQLKEDYFKKIECFDSVEISGVEDRFNASLGTYHDLLKIIKDKDFLDNEENEDILEDIVLTLTLFEDREMIEERLKTYAHLFDDKVMKQLKRRRYTGWGRLSRKLINGIRDKQSGKTILDFLKSDGFANRNFMQLIHDDSLTFKEDIQKAQVSGQGDSLHEHIANLAGSPAIKKGILQTVKVVDELVKVMGRHKPENIVIEMARENQTTQKGQKNSRERMKRIEEGIKELGSQILKEHPVENTQLQNEKLYLYYLQNGRDMYVDQELDINRLSDYDVDHIVPQSFLKDDSIDNKVLTRSDKARGKSDNVPSEEVVKKMKNYWRQLLNAKLITQRKFDNLTKAERGGLSELDKAGFIKRQLVETRQITKHVAQILDSRMNTKYDENDKLIREVKVITLKSKLVSDFRKDFQFYKVREINNYHHAHDAYLNAVVGTALIKKYPKLESEFVYGDYKVYDVRKMIAKSEQEIGKATAKYFFYSNIMNFFKTEITLANGEIRKRPLIETNGETGEIVWDKGRDFATVRKVLSMPQVNIVKKTEVQTGGFSKESILPKRNSDKLIARKKDWDPKKYGGFDSPTVAYSVLVVAKVEKGKSKKLKSVKELLGITIMERSSFEKNPIDFLEAKGYKEVKKDLIIKLPKYSLFELENGRKRMLASAGELQKGNELALPSKYVNFLYLASHYEKLKGSPEDNEQKQLFVEQHKHYLDEIIEQISEFSKRVILADANLDKVLSAYNKHRDKPIREQAENIIHLFTLTNLGAPAAFKYFDTTIDRKRYTSTKEVLDATLIHQSITGLYETRIDLSQLGGDGGGSSEAAAKGGTLNIEDEYRLHETSKEPDVPLGSTWLSDFPQAWAETGGMGLAVRQAPLIIPLKATSTPVSIKQYPMSQEARLGIKPHIQRLLDQGILVPCQSPWNTPLLPVKKPGTNDYRPVQDLREVNKRVEDIHPTVPNPYNLLSGLPPSHQWYTVLDLKDAFFCLRLHPTSQPLFAFEWRDPEMGISGQLTWTRLPQGFKNSPTLFNEALHRDLADFRIQHPDLILLQYVDDLLLAATSEQDCQRGTRALLQTLGNLGYRASAKKAQICQKQVKYLGYLLKEGQRWLTEARKETVMGQPTPKTPRQLREFLGTAGFCRLWIPGFAEMAAPLYPLTKPGTLFNWGPDQQKAYQEIKQALLTAPALGLPDLTKPFELFVDEKQGYAKGVLTQKLGPWRRPVAYLSKKLDPVAAGWPPCLRMVAAIAVLTKDAGKLTMGQPLVILAPHAVEALVKQPPDRWLSNARMTHYQAMLLDTDRVQFGPVVALNPATLLPLPEKEAPHDCLEILAETHGTRPDLTDQPIPDADYTWYTDGSSFLQEGQRRAGAAVTTETEVIWARALPAGTSAQRAELIALTQALKMAEGKKLNVYTDSRYAFATAHVHGEIYRRRGWLTSEGREIKNKNEILALLKALFLPKRLSIIHCPGHQKGNSAEARGNRMADQAAREAAMKAVLETSTLLAGKRTADGSEFEKRTADGSEFESPKKKAKVE

SEQ ID NO: 967 - protein, 2096 aa, synthetic construct
MPAAKRVKLDGGDKKYSIGLDIGTNSVGWAVITDEYKVPSKKFKVLGNTDRHSIKKNLIGALLFDSGETAEATRLKRTARRRYTRRKNRICYLQEIFSNEMAKVDDSFFHRLEESFLVEEDKKHERHPIFGNIVDEVAYHEKYPTIYHLRKKLVDSTDKADLRLIYLALAHMIKFRGHFLIEGDLNPDNSDVDKLFIQLVQTYNQLFEENPINASGVDAKAILSARLSKSRRLENLIAQLPGEKKNGLFGNLIALSLGLTPNFKSNFDLAEDAKLQLSKDTYDDDLDNLLAQIGDQYADLFLAAKNLSDAILLSDILRVNTEITKAPLSASMIKRYDEHHQDLTLLKALVRQQLPEKYKEIFFDQSKNGYAGYIDGGASQEEFYKFIKPILEKMDGTEELLVKLNREDLLRKQRTFDNGSIPHQIHLGELHAILRRQEDFYPFLKDNREKIEKILTFRIPYYVGPLARGNSRFAWMTRKSEETITPWNFEEVVDKGASAQSFIERMTNFDKNLPNEKVLPKHSLLYEYFTVYNELTKVKYVTEGMRKPAFLSGEQKKAIVDLLFKTNRKVTVKQLKEDYFKKIECFDSVEISGVEDRFNASLGTYHDLLKIIKDKDFLDNEENEDILEDIVLTLTLFEDREMIEERLKTYAHLFDDKVMKQLKRRRYTGWGRLSRKLINGIRDKQSGKTILDFLKSDGFANRNFMQLIHDDSLTFKEDIQKAQVSGQGDSLHEHIANLAGSPAIKKGILQTVKVVDELVKVMGRHKPENIVIEMARENQTTQKGQKNSRERMKRIEEGIKELGSQILKEHPVENTQLQNEKLYLYYLQNGRDMYVDQELDINRLSDYDVDHIVPQSFLKDDSIDNKVLTRSDKARGKSDNVPSEEVVKKMKNYWRQLLNAKLITQRKFDNLTKAERGGLSELDKAGFIKRQLVETRQITKHVAQILDSRMNTKYDENDKLIREVKVITLKSKLVSDFRKDFQFYKVREINNYHHAHDAYLNAVVGTALIKKYPKLESEFVYGDYKVYDVRKMIAKSEQEIGKATAKYFFYSNIMNFFKTEITLANGEIRKRPLIETNGETGEIVWDKGRDFATVRKVLSMPQVNIVKKTEVQTGGFSKESILPKRNSDKLIARKKDWDPKKYGGFDSPTVAYSVLVVAKVEKGKSKKLKSVKELLGITIMERSSFEKNPIDFLEAKGYKEVKKDLIIKLPKYSLFELENGRKRMLASAGELQKGNELALPSKYVNFLYLASHYEKLKGSPEDNEQKQLFVEQHKHYLDEIIEQISEFSKRVILADANLDKVLSAYNKHRDKPIREQAENIIHLFTLTNLGAPAAFKYFDTTIDRKRYTSTKEVLDATLIHQSITGLYETRIDLSQLGGDGGPAPGSSEAAAKGGTLNIEDEYRLHETSKEPDVPLGSTWLSDFPQAWAETGGMGLAVRQAPLIIPLKATSTPVSIKQYPMSQEARLGIKPHIQRLLDQGILVPCQSPWNTPLLPVKKPGTNDYRPVQDLREVNKRVEDIHPTVPNPYNLLSGLPPSHQWYTVLDLKDAFFCLRLHPTSQPLFAFEWRDPEMGISGQLTWTRLPQGFKNSPTLFNEALHRDLADFRIQHPDLILLQYVDDLLLAATSEQDCQRGTRALLQTLGNLGYRASAKKAQICQKQVKYLGYLLKEGQRWLTEARKETVMGQPTPKTPRQLREFLGTAGFCRLWIPGFAEMAAPLYPLTKPGTLFNWGPDQQKAYQEIKQALLTAPALGLPDLTKPFELFVDEKQGYAKGVLTQKLGPWRRPVAYLSKKLDPVAAGWPPCLRMVAAIAVLTKDAGKLTMGQPLVILAPHAVEALVKQPPDRWLSNARMTHYQAMLLDTDRVQFGPVVALNPATLLPLPEKEAPHDCLEILAETHGTRPDLTDQPIPDADYTWYTDGSSFLQEGQRRAGAAVTTETEVIWARALPAGTSAQRAELIALTQALKMAEGKKLNVYTDSRYAFATAHVHGEIYRRRGWLTSEGREIKNKNEILALLKALFLPKRLSIIHCPGHQKGNSAEARGNRMADQAAREAAMKAVLETSTLLAGKRTADGSEFEKRTADGSEFESPKKKAKVE

SEQ ID NO: 968 - protein, 2096 aa, synthetic construct
MPAAKRVKLDGGDKKYSIGLDIGTNSVGWAVITDEYKVPSKKFKVLGNTDRHSIKKNLIGALLFDSGETAEATRLKRTARRRYTRRKNRICYLQEIFSNEMAKVDDSFFHRLEESFLVEEDKKHERHPIFGNIVDEVAYHEKYPTIYHLRKKLVDSTDKADLRLIYLALAHMIKFRGHFLIEGDLNPDNSDVDKLFIQLVQTYNQLFEENPINASGVDAKAILSARLSKSRRLENLIAQLPGEKKNGLFGNLIALSLGLTPNFKSNFDLAEDAKLQLSKDTYDDDLDNLLAQIGDQYADLFLAAKNLSDAILLSDILRVNTEITKAPLSASMIKRYDEHHQDLTLLKALVRQQLPEKYKEIFFDQSKNGYAGYIDGGASQEEFYKFIKPILEKMDGTEELLVKLNREDLLRKQRTFDNGSIPHQIHLGELHAILRRQEDFYPFLKDNREKIEKILTFRIPYYVGPLARGNSRFAWMTRKSEETITPWNFEEVVDKGASAQSFIERMTNFDKNLPNEKVLPKHSLLYEYFTVYNELTKVKYVTEGMRKPAFLSGEQKKAIVDLLFKTNRKVTVKQLKEDYFKKIECFDSVEISGVEDRFNASLGTYHDLLKIIKDKDFLDNEENEDILEDIVLTLTLFEDREMIEERLKTYAHLFDDKVMKQLKRRRYTGWGRLSRKLINGIRDKQSGKTILDFLKSDGFANRNFMQLIHDDSLTFKEDIQKAQVSGQGDSLHEHIANLAGSPAIKKGILQTVKVVDELVKVMGRHKPENIVIEMARENQTTQKGQKNSRERMKRIEEGIKELGSQILKEHPVENTQLQNEKLYLYYLQNGRDMYVDQELDINRLSDYDVDHIVPQSFLKDDSIDNKVLTRSDKARGKSDNVPSEEVVKKMKNYWRQLLNAKLITQRKFDNLTKAERGGLSELDKAGFIKRQLVETRQITKHVAQILDSRMNTKYDENDKLIREVKVITLKSKLVSDFRKDFQFYKVREINNYHHAHDAYLNAVVGTALIKKYPKLESEFVYGDYKVYDVRKMIAKSEQEIGKATAKYFFYSNIMNFFKTEITLANGEIRKRPLIETNGETGEIVWDKGRDFATVRKVLSMPQVNIVKKTEVQTGGFSKESILPKRNSDKLIARKKDWDPKKYGGFDSPTVAYSVLVVAKVEKGKSKKLKSVKELLGITIMERSSFEKNPIDFLEAKGYKEVKKDLIIKLPKYSLFELENGRKRMLASAGELQKGNELALPSKYVNFLYLASHYEKLKGSPEDNEQKQLFVEQHKHYLDEIIEQISEFSKRVILADANLDKVLSAYNKHRDKPIREQAENIIHLFTLTNLGAPAAFKYFDTTIDRKRYTSTKEVLDATLIHQSITGLYETRIDLSQLGGDGGGGSPAPEAAAKGGTLNIEDEYRLHETSKEPDVPLGSTWLSDFPQAWAETGGMGLAVRQAPLIIPLKATSTPVSIKQYPMSQEARLGIKPHIQRLLDQGILVPCQSPWNTPLLPVKKPGTNDYRPVQDLREVNKRVEDIHPTVPNPYNLLSGLPPSHQWYTVLDLKDAFFCLRLHPTSQPLFAFEWRDPEMGISGQLTWTRLPQGFKNSPTLFNEALHRDLADFRIQHPDLILLQYVDDLLLAATSEQDCQRGTRALLQTLGNLGYRASAKKAQICQKQVKYLGYLLKEGQRWLTEARKETVMGQPTPKTPRQLREFLGTAGFCRLWIPGFAEMAAPLYPLTKPGTLFNWGPDQQKAYQEIKQALLTAPALGLPDLTKPFELFVDEKQGYAKGVLTQKLGPWRRPVAYLSKKLDPVAAGWPPCLRMVAAIAVLTKDAGKLTMGQPLVILAPHAVEALVKQPPDRWLSNARMTHYQAMLLDTDRVQFGPVVALNPATLLPLPEKEAPHDCLEILAETHGTRPDLTDQPIPDADYTWYTDGSSFLQEGQRRAGAAVTTETEVIWARALPAGTSAQRAELIALTQALKMAEGKKLNVYTDSRYAFATAHVHGEIYRRRGWLTSEGREIKNKNEILALLKALFLPKRLSIIHCPGHQKGNSAEARGNRMADQAAREAAMKAVLETSTLLAGKRTADGSEFEKRTADGSEFESPKKKAKVE

SEQ ID NO: 969 - protein, 2094 aa, synthetic construct
MPAAKRVKLDGGDKKYSIGLDIGTNSVGWAVITDEYKVPSKKFKVLGNTDRHSIKKNLIGALLFDSGETAEATRLKRTARRRYTRRKNRICYLQEIFSNEMAKVDDSFFHRLEESFLVEEDKKHERHPIFGNIVDEVAYHEKYPTIYHLRKKLVDSTDKADLRLIYLALAHMIKFRGHFLIEGDLNPDNSDVDKLFIQLVQTYNQLFEENPINASGVDAKAILSARLSKSRRLENLIAQLPGEKKNGLFGNLIALSLGLTPNFKSNFDLAEDAKLQLSKDTYDDDLDNLLAQIGDQYADLFLAAKNLSDAILLSDILRVNTEITKAPLSASMIKRYDEHHQDLTLLKALVRQQLPEKYKEIFFDQSKNGYAGYIDGGASQEEFYKFIKPILEKMDGTEELLVKLNREDLLRKQRTFDNGSIPHQIHLGELHAILRRQEDFYPFLKDNREKIEKILTFRIPYYVGPLARGNSRFAWMTRKSEETITPWNFEEVVDKGASAQSFIERMTNFDKNLPNEKVLPKHSLLYEYFTVYNELTKVKYVTEGMRKPAFLSGEQKKAIVDLLFKTNRKVTVKQLKEDYFKKIECFDSVEISGVEDRFNASLGTYHDLLKIIKDKDFLDNEENEDILEDIVLTLTLFEDREMIEERLKTYAHLFDDKVMKQLKRRRYTGWGRLSRKLINGIRDKQSGKTILDFLKSDGFANRNFMQLIHDDSLTFKEDIQKAQVSGQGDSLHEHIANLAGSPAIKKGILQTVKVVDELVKVMGRHKPENIVIEMARENQTTQKGQKNSRERMKRIEEGIKELGSQILKEHPVENTQLQNEKLYLYYLQNGRDMYVDQELDINRLSDYDVDHIVPQSFLKDDSIDNKVLTRSDKARGKSDNVPSEEVVKKMKNYWRQLLNAKLITQRKFDNLTKAERGGLSELDKAGFIKRQLVETRQITKHVAQILDSRMNTKYDENDKLIREVKVITLKSKLVSDFRKDFQFYKVREINNYHHAHDAYLNAVVGTALIKKYPKLESEFVYGDYKVYDVRKMIAKSEQEIGKATAKYFFYSNIMNFFKTEITLANGEIRKRPLIETNGETGEIVWDKGRDFATVRKVLSMPQVNIVKKTEVQTGGFSKESILPKRNSDKLIARKKDWDPKKYGGFDSPTVAYSVLVVAKVEKGKSKKLKSVKELLGITIMERSSFEKNPIDFLEAKGYKEVKKDLIIKLPKYSLFELENGRKRMLASAGELQKGNELALPSKYVNFLYLASHYEKLKGSPEDNEQKQLFVEQHKHYLDEIIEQISEFSKRVILADANLDKVLSAYNKHRDKPIREQAENIIHLFTLTNLGAPAAFKYFDTTIDRKRYTSTKEVLDATLIHQSITGLYETRIDLSQLGGDGGGGGGSSPAPGGTLNIEDEYRLHETSKEPDVPLGSTWLSDFPQAWAETGGMGLAVRQAPLIIPLKATSTPVSIKQYPMSQEARLGIKPHIQRLLDQGILVPCQSPWNTPLLPVKKPGTNDYRPVQDLREVNKRVEDIHPTVPNPYNLLSGLPPSHQWYTVLDLKDAFFCLRLHPTSQPLFAFEWRDPEMGISGQLTWTRLPQGFKNSPTLFNEALHRDLADFRIQHPDLILLQYVDDLLLAATSEQDCQRGTRALLQTLGNLGYRASAKKAQICQKQVKYLGYLLKEGQRWLTEARKETVMGQPTPKTPRQLREFLGTAGFCRLWIPGFAEMAAPLYPLTKPGTLFNWGPDQQKAYQEIKQALLTAPALGLPDLTKPFELFVDEKQGYAKGVLTQKLGPWRRPVAYLSKKLDPVAAGWPPCLRMVAAIAVLTKDAGKLTMGQPLVILAPHAVEALVKQPPDRWLSNARMTHYQAMLLDTDRVQFGPVVALNPATLLPLPEKEAPHDCLEILAETHGTRPDLTDQPIPDADYTWYTDGSSFLQEGQRRAGAAVTTETEVIWARALPAGTSAQRAELIALTQALKMAEGKKLNVYTDSRYAFATAHVHGEIYRRRGWLTSEGREIKNKNEILALLKALFLPKRLSIIHCPGHQKGNSAEARGNRMADQAAREAAMKAVLETSTLLAGKRTADGSEFEKRTADGSEFESPKKKAKVE

SEQ ID NO: 970 - protein, 2094 aa, synthetic construct
MPAAKRVKLDGGDKKYSIGLDIGTNSVGWAVITDEYKVPSKKFKVLGNTDRHSIKKNLIGALLFDSGETAEATRLKRTARRRYTRRKNRICYLQEIFSNEMAKVDDSFFHRLEESFLVEEDKKHERHPIFGNIVDEVAYHEKYPTIYHLRKKLVDSTDKADLRLIYLALAHMIKFRGHFLIEGDLNPDNSDVDKLFIQLVQTYNQLFEENPINASGVDAKAILSARLSKSRRLENLIAQLPGEKKNGLFGNLIALSLGLTPNFKSNFDLAEDAKLQLSKDTYDDDLDNLLAQIGDQYADLFLAAKNLSDAILLSDILRVNTEITKAPLSASMIKRYDEHHQDLTLLKALVRQQLPEKYKEIFFDQSKNGYAGYIDGGASQEEFYKFIKPILEKMDGTEELLVKLNREDLLRKQRTFDNGSIPHQIHLGELHAILRRQEDFYPFLKDNREKIEKILTFRIPYYVGPLARGNSRFAWMTRKSEETITPWNFEEVVDKGASAQSFIERMTNFDKNLPNEKVLPKHSLLYEYFTVYNELTKVKYVTEGMRKPAFLSGEQKKAIVDLLFKTNRKVTVKQLKEDYFKKIECFDSVEISGVEDRFNASLGTYHDLLKIIKDKDFLDNEENEDILEDIVLTLTLFEDREMIEERLKTYAHLFDDKVMKQLKRRRYTGWGRLSRKLINGIRDKQSGKTILDFLKSDGFANRNFMQLIHDDSLTFKEDIQKAQVSGQGDSLHEHIANLAGSPAIKKGILQTVKVVDELVKVMGRHKPENIVIEMARENQTTQKGQKNSRERMKRIEEGIKELGSQILKEHPVENTQLQNEKLYLYYLQNGRDMYVDQELDINRLSDYDVDHIVPQSFLKDDSIDNKVLTRSDKARGKSDNVPSEEVVKKMKNYWRQLLNAKLITQRKFDNLTKAERGGLSELDKAGFIKRQLVETRQITKHVAQILDSRMNTKYDENDKLIREVKVITLKSKLVSDFRKDFQFYKVREINNYHHAHDAYLNAVVGTALIKKYPKLESEFVYGDYKVYDVRKMIAKSEQEIGKATAKYFFYSNIMNFFKTEITLANGEIRKRPLIETNGETGEIVWDKGRDFATVRKVLSMPQVNIVKKTEVQTGGFSKESILPKRNSDKLIARKKDWDPKKYGGFDSPTVAYSVLVVAKVEKGKSKKLKSVKELLGITIMERSSFEKNPIDFLEAKGYKEVKKDLIIKLPKYSLFELENGRKRMLASAGELQKGNELALPSKYVNFLYLASHYEKLKGSPEDNEQKQLFVEQHKHYLDEIIEQISEFSKRVILADANLDKVLSAYNKHRDKPIREQAENIIHLFTLTNLGAPAAFKYFDTTIDRKRYTSTKEVLDATLIHQSITGLYETRIDLSQLGGDGGPAPGSSGGSGGTLNIEDEYRLHETSKEPDVPLGSTWLSDFPQAWAETGGMGLAVRQAPLIIPLKATSTPVSIKQYPMSQEARLGIKPHIQRLLDQGILVPCQSPWNTPLLPVKKPGTNDYRPVQDLREVNKRVEDIHPTVPNPYNLLSGLPPSHQWYTVLDLKDAFFCLRLHPTSQPLFAFEWRDPEMGISGQLTWTRLPQGFKNSPTLFNEALHRDLADFRIQHPDLILLQYVDDLLLAATSEQDCQRGTRALLQTLGNLGYRASAKKAQICQKQVKYLGYLLKEGQRWLTEARKETVMGQPTPKTPRQLREFLGTAGFCRLWIPGFAEMAAPLYPLTKPGTLFNWGPDQQKAYQEIKQALLTAPALGLPDLTKPFELFVDEKQGYAKGVLTQKLGPWRRPVAYLSKKLDPVAAGWPPCLRMVAAIAVLTKDAGKLTMGQPLVILAPHAVEALVKQPPDRWLSNARMTHYQAMLLDTDRVQFGPVVALNPATLLPLPEKEAPHDCLEILAETHGTRPDLTDQPIPDADYTWYTDGSSFLQEGQRRAGAAVTTETEVIWARALPAGTSAQRAELIALTQALKMAEGKKLNVYTDSRYAFATAHVHGEIYRRRGWLTSEGREIKNKNEILALLKALFLPKRLSIIHCPGHQKGNSAEARGNRMADQAAREAAMKAVLETSTLLAGKRTADGSEFEKRTADGSEFESPKKKAKVE

SEQ ID NO: 971 - protein, 2096 aa, synthetic construct
MPAAKRVKLDGGDKKYSIGLDIGTNSVGWAVITDEYKVPSKKFKVLGNTDRHSIKKNLIGALLFDSGETAEATRLKRTARRRYTRRKNRICYLQEIFSNEMAKVDDSFFHRLEESFLVEEDKKHERHPIFGNIVDEVAYHEKYPTIYHLRKKLVDSTDKADLRLIYLALAHMIKFRGHFLIEGDLNPDNSDVDKLFIQLVQTYNQLFEENPINASGVDAKAILSARLSKSRRLENLIAQLPGEKKNGLFGNLIALSLGLTPNFKSNFDLAEDAKLQLSKDTYDDDLDNLLAQIGDQYADLFLAAKNLSDAILLSDILRVNTEITKAPLSASMIKRYDEHHQDLTLLKALVRQQLPEKYKEIFFDQSKNGYAGYIDGGASQEEFYKFIKPILEKMDGTEELLVKLNREDLLRKQRTFDNGSIPHQIHLGELHAILRRQEDFYPFLKDNREKIEKILTFRIPYYVGPLARGNSRFAWMTRKSEETITPWNFEEVVDKGASAQSFIERMTNFDKNLPNEKVLPKHSLLYEYFTVYNELTKVKYVTEGMRKPAFLSGEQKKAIVDLLFKTNRKVTVKQLKEDYFKKIECFDSVEISGVEDRFNASLGTYHDLLKIIKDKDFLDNEENEDILEDIVLTLTLFEDREMIEERLKTYAHLFDDKVMKQLKRRRYTGWGRLSRKLINGIRDKQSGKTILDFLKSDGFANRNFMQLIHDDSLTFKEDIQKAQVSGQGDSLHEHIANLAGSPAIKKGILQTVKVVDELVKVMGRHKPENIVIEMARENQTTQKGQKNSRERMKRIEEGIKELGSQILKEHPVENTQLQNEKLYLYYLQNGRDMYVDQELDINRLSDYDVDHIVPQSFLKDDSIDNKVLTRSDKARGKSDNVPSEEVVKKMKNYWRQLLNAKLITQRKFDNLTKAERGGLSELDKAGFIKRQLVETRQITKHVAQILDSRMNTKYDENDKLIREVKVITLKSKLVSDFRKDFQFYKVREINNYHHAHDAYLNAVVGTALIKKYPKLESEFVYGDYKVYDVRKMIAKSEQEIGKATAKYFFYSNIMNFFKTEITLANGEIRKRPLIETNGETGEIVWDKGRDFATVRKVLSMPQVNIVKKTEVQTGGFSKESILPKRNSDKLIARKKDWDPKKYGGFDSPTVAYSVLVVAKVEKGKSKKLKSVKELLGITIMERSSFEKNPIDFLEAKGYKEVKKDLIIKLPKYSLFELENGRKRMLASAGELQKGNELALPSKYVNFLYLASHYEKLKGSPEDNEQKQLFVEQHKHYLDEIIEQISEFSKRVILADANLDKVLSAYNKHRDKPIREQAENIIHLFTLTNLGAPAAFKYFDTTIDRKRYTSTKEVLDATLIHQSITGLYETRIDLSQLGGDGGGSSGGGEAAAKGGTLNIEDEYRLHETSKEPDVPLGSTWLSDFPQAWAETGGMGLAVRQAPLIIPLKATSTPVSIKQYPMSQEARLGIKPHIQRLLDQGILVPCQSPWNTPLLPVKKPGTNDYRPVQDLREVNKRVEDIHPTVPNPYNLLSGLPPSHQWYTVLDLKDAFFCLRLHPTSQPLFAFEWRDPEMGISGQLTWTRLPQGFKNSPTLFNEALHRDLADFRIQHPDLILLQYVDDLLLAATSEQDCQRGTRALLQTLGNLGYRASAKKAQICQKQVKYLGYLLKEGQRWLTEARKETVMGQPTPKTPRQLREFLGTAGFCRLWIPGFAEMAAPLYPLTKPGTLFNWGPDQQKAYQEIKQALLTAPALGLPDLTKPFELFVDEKQGYAKGVLTQKLGPWRRPVAYLSKKLDPVAAGWPPCLRMVAAIAVLTKDAGKLTMGQPLVILAPHAVEALVKQPPDRWLSNARMTHYQAMLLDTDRVQFGPVVALNPATLLPLPEKEAPHDCLEILAETHGTRPDLTDQPIPDADYTWYTDGSSFLQEGQRRAGAAVTTETEVIWARALPAGTSAQRAELIALTQALKMAEGKKLNVYTDSRYAFATAHVHGEIYRRRGWLTSEGREIKNKNEILALLKALFLPKRLSIIHCPGHQKGNSAEARGNRMADQAAREAAMKAVLETSTLLAGKRTADGSEFEKRTADGSEFESPKKKAKVE

SEQ ID NO: 972 - protein, 2100 aa, synthetic construct
MPAAKRVKLDGGDKKYSIGLDIGTNSVGWAVITDEYKVPSKKFKVLGNTDRHSIKKNLIGALLFDSGETAEATRLKRTARRRYTRRKNRICYLQEIFSNEMAKVDDSFFHRLEESFLVEEDKKHERHPIFGNIVDEVAYHEKYPTIYHLRKKLVDSTDKADLRLIYLALAHMIKFRGHFLIEGDLNPDNSDVDKLFIQLVQTYNQLFEENPINASGVDAKAILSARLSKSRRLENLIAQLPGEKKNGLFGNLIALSLGLTPNFKSNFDLAEDAKLQLSKDTYDDDLDNLLAQIGDQYADLFLAAKNLSDAILLSDILRVNTEITKAPLSASMIKRYDEHHQDLTLLKALVRQQLPEKYKEIFFDQSKNGYAGYIDGGASQEEFYKFIKPILEKMDGTEELLVKLNREDLLRKQRTFDNGSIPHQIHLGELHAILRRQEDFYPFLKDNREKIEKILTFRIPYYVGPLARGNSRFAWMTRKSEETITPWNFEEVVDKGASAQSFIERMTNFDKNLPNEKVLPKHSLLYEYFTVYNELTKVKYVTEGMRKPAFLSGEQKKAIVDLLFKTNRKVTVKQLKEDYFKKIECFDSVEISGVEDRFNASLGTYHDLLKIIKDKDFLDNEENEDILEDIVLTLTLFEDREMIEERLKTYAHLFDDKVMKQLKRRRYTGWGRLSRKLINGIRDKQSGKTILDFLKSDGFANRNFMQLIHDDSLTFKEDIQKAQVSGQGDSLHEHIANLAGSPAIKKGILQTVKVVDELVKVMGRHKPENIVIEMARENQTTQKGQKNSRERMKRIEEGIKELGSQILKEHPVENTQLQNEKLYLYYLQNGRDMYVDQELDINRLSDYDVDHIVPQSFLKDDSIDNKVLTRSDKARGKSDNVPSEEVVKKMKNYWRQLLNAKLITQRKFDNLTKAERGGLSELDKAGFIKRQLVETRQITKHVAQILDSRMNTKYDENDKLIREVKVITLKSKLVSDFRKDFQFYKVREINNYHHAHDAYLNAVVGTALIKKYPKLESEFVYGDYKVYDVRKMIAKSEQEIGKATAKYFFYSNIMNFFKTEITLANGEIRKRPLIETNGETGEIVWDKGRDFATVRKVLSMPQVNIVKKTEVQTGGFSKESILPKRNSDKLIARKKDWDPKKYGGFDSPTVAYSVLVVAKVEKGKSKKLKSVKELLGITIMERSSFEKNPIDFLEAKGYKEVKKDLIIKLPKYSLFELENGRKRMLASAGELQKGNELALPSKYVNFLYLASHYEKLKGSPEDNEQKQLFVEQHKHYLDEIIEQISEFSKRVILADANLDKVLSAYNKHRDKPIREQAENIIHLFTLTNLGAPAAFKYFDTTIDRKRYTSTKEVLDATLIHQSITGLYETRIDLSQLGGDGGGGGGSEAAAKGGGGSGGTLNIEDEYRLHETSKEPDVPLGSTWLSDFPQAWAETGGMGLAVRQAPLIIPLKATSTPVSIKQYPMSQEARLGIKPHIQRLLDQGILVPCQSPWNTPLLPVKKPGTNDYRPVQDLREVNKRVEDIHPTVPNPYNLLSGLPPSHQWYTVLDLKDAFFCLRLHPTSQPLFAFEWRDPEMGISGQLTWTRLPQGFKNSPTLFNEALHRDLADFRIQHPDLILLQYVDDLLLAATSEQDCQRGTRALLQTLGNLGYRASAKKAQICQKQVKYLGYLLKEGQRWLTEARKETVMGQPTPKTPRQLREFLGTAGFCRLWIPGFAEMAAPLYPLTKPGTLFNWGPDQQKAYQEIKQALLTAPALGLPDLTKPFELFVDEKQGYAKGVLTQKLGPWRRPVAYLSKKLDPVAAGWPPCLRMVAAIAVLTKDAGKLTMGQPLVILAPHAVEALVKQPPDRWLSNARMTHYQAMLLDTDRVQFGPVVALNPATLLPLPEKEAPHDCLEILAETHGTRPDLTDQPIPDADYTWYTDGSSFLQEGQRRAGAAVTTETEVIWARALPAGTSAQRAELIALTQALKMAEGKKLNVYTDSRYAFATAHVHGEIYRRRGWLTSEGREIKNKNEILALLKALFLPKRLSIIHCPGHQKGNSAEARGNRMADQAAREAAMKAVLETSTLLAGKRTADGSEFEKRTADGSEFESPKKKAKVE

SEQ ID NO: 973 - protein, 2096 aa, synthetic construct
MPAAKRVKLDGGDKKYSIGLDIGTNSVGWAVITDEYKVPSKKFKVLGNTDRHSIKKNLIGALLFDSGETAEATRLKRTARRRYTRRKNRICYLQEIFSNEMAKVDDSFFHRLEESFLVEEDKKHERHPIFGNIVDEVAYHEKYPTIYHLRKKLVDSTDKADLRLIYLALAHMIKFRGHFLIEGDLNPDNSDVDKLFIQLVQTYNQLFEENPINASGVDAKAILSARLSKSRRLENLIAQLPGEKKNGLFGNLIALSLGLTPNFKSNFDLAEDAKLQLSKDTYDDDLDNLLAQIGDQYADLFLAAKNLSDAILLSDILRVNTEITKAPLSASMIKRYDEHHQDLTLLKALVRQQLPEKYKEIFFDQSKNGYAGYIDGGASQEEFYKFIKPILEKMDGTEELLVKLNREDLLRKQRTFDNGSIPHQIHLGELHAILRRQEDFYPFLKDNREKIEKILTFRIPYYVGPLARGNSRFAWMTRKSEETITPWNFEEVVDKGASAQSFIERMTNFDKNLPNEKVLPKHSLLYEYFTVYNELTKVKYVTEGMRKPAFLSGEQKKAIVDLLFKTNRKVTVKQLKEDYFKKIECFDSVEISGVEDRFNASLGTYHDLLKIIKDKDFLDNEENEDILEDIVLTLTLFEDREMIEERLKTYAHLFDDKVMKQLKRRRYTGWGRLSRKLINGIRDKQSGKTILDFLKSDGFANRNFMQLIHDDSLTFKEDIQKAQVSGQGDSLHEHIANLAGSPAIKKGILQTVKVVDELVKVMGRHKPENIVIEMARENQTTQKGQKNSRERMKRIEEGIKELGSQILKEHPVENTQLQNEKLYLYYLQNGRDMYVDQELDINRLSDYDVDHIVPQSFLKDDSIDNKVLTRSDKARGKSDNVPSEEVVKKMKNYWRQLLNAKLITQRKFDNLTKAERGGLSELDKAGFIKRQLVETRQITKHVAQILDSRMNTKYDENDKLIREVKVITLKSKLVSDFRKDFQFYKVREINNYHHAHDAYLNAVVGTALIKKYPKLESEFVYGDYKVYDVRKMIAKSEQEIGKATAKYFFYSNIMNFFKTEITLANGEIRKRPLIETNGETGEIVWDKGRDFATVRKVLSMPQVNIVKKTEVQTGGFSKESILPKRNSDKLIARKKDWDPKKYGGFDSPTVAYSVLVVAKVEKGKSKKLKSVKELLGITIMERSSFEKNPIDFLEAKGYKEVKKDLIIKLPKYSLFELENGRKRMLASAGELQKGNELALPSKYVNFLYLASHYEKLKGSPEDNEQKQLFVEQHKHYLDEIIEQISEFSKRVILADANLDKVLSAYNKHRDKPIREQAENIIHLFTLTNLGAPAAFKYFDTTIDRKRYTSTKEVLDATLIHQSITGLYETRIDLSQLGGDGGGGGGGSEAAAKGGTLNIEDEYRLHETSKEPDVPLGSTWLSDFPQAWAETGGMGLAVRQAPLIIPLKATSTPVSIKQYPMSQEARLGIKPHIQRLLDQGILVPCQSPWNTPLLPVKKPGTNDYRPVQDLREVNKRVEDIHPTVPNPYNLLSGLPPSHQWYTVLDLKDAFFCLRLHPTSQPLFAFEWRDPEMGISGQLTWTRLPQGFKNSPTLFNEALHRDLADFRIQHPDLILLQYVDDLLLAATSEQDCQRGTRALLQTLGNLGYRASAKKAQICQKQVKYLGYLLKEGQRWLTEARKETVMGQPTPKTPRQLREFLGTAGFCRLWIPGFAEMAAPLYPLTKPGTLFNWGPDQQKAYQEIKQALLTAPALGLPDLTKPFELFVDEKQGYAKGVLTQKLGPWRRPVAYLSKKLDPVAAGWPPCLRMVAAIAVLTKDAGKLTMGQPLVILAPHAVEALVKQPPDRWLSNARMTHYQAMLLDTDRVQFGPVVALNPATLLPLPEKEAPHDCLEILAETHGTRPDLTDQPIPDADYTWYTDGSSFLQEGQRRAGAAVTTETEVIWARALPAGTSAQRAELIALTQALKMAEGKKLNVYTDSRYAFATAHVHGEIYRRRGWLTSEGREIKNKNEILALLKALFLPKRLSIIHCPGHQKGNSAEARGNRMADQAAREAAMKAVLETSTLLAGKRTADGSEFEKRTADGSEFESPKKKAKVE

SEQ ID NO: 974 - protein, 2091 aa, synthetic construct
MPAAKRVKLDGGDKKYSIGLDIGTNSVGWAVITDEYKVPSKKFKVLGNTDRHSIKKNLIGALLFDSGETAEATRLKRTARRRYTRRKNRICYLQEIFSNEMAKVDDSFFHRLEESFLVEEDKKHERHPIFGNIVDEVAYHEKYPTIYHLRKKLVDSTDKADLRLIYLALAHMIKFRGHFLIEGDLNPDNSDVDKLFIQLVQTYNQLFEENPINASGVDAKAILSARLSKSRRLENLIAQLPGEKKNGLFGNLIALSLGLTPNFKSNFDLAEDAKLQLSKDTYDDDLDNLLAQIGDQYADLFLAAKNLSDAILLSDILRVNTEITKAPLSASMIKRYDEHHQDLTLLKALVRQQLPEKYKEIFFDQSKNGYAGYIDGGASQEEFYKFIKPILEKMDGTEELLVKLNREDLLRKQRTFDNGSIPHQIHLGELHAILRRQEDFYPFLKDNREKIEKILTFRIPYYVGPLARGNSRFAWMTRKSEETITPWNFEEVVDKGASAQSFIERMTNFDKNLPNEKVLPKHSLLYEYFTVYNELTKVKYVTEGMRKPAFLSGEQKKAIVDLLFKTNRKVTVKQLKEDYFKKIECFDSVEISGVEDRFNASLGTYHDLLKIIKDKDFLDNEENEDILEDIVLTLTLFEDREMIEERLKTYAHLFDDKVMKQLKRRRYTGWGRLSRKLINGIRDKQSGKTILDFLKSDGFANRNFMQLIHDDSLTFKEDIQKAQVSGQGDSLHEHIANLAGSPAIKKGILQTVKVVDELVKVMGRHKPENIVIEMARENQTTQKGQKNSRERMKRIEEGIKELGSQILKEHPVENTQLQNEKLYLYYLQNGRDMYVDQELDINRLSDYDVDHIVPQSFLKDDSIDNKVLTRSDKARGKSDNVPSEEVVKKMKNYWRQLLNAKLITQRKFDNLTKAERGGLSELDKAGFIKRQLVETRQITKHVAQILDSRMNTKYDENDKLIREVKVITLKSKLVSDFRKDFQFYKVREINNYHHAHDAYLNAVVGTALIKKYPKLESEFVYGDYKVYDVRKMIAKSEQEIGKATAKYFFYSNIMNFFKTEITLANGEIRKRPLIETNGETGEIVWDKGRDFATVRKVLSMPQVNIVKKTEVQTGGFSKESILPKRNSDKLIARKKDWDPKKYGGFDSPTVAYSVLVVAKVEKGKSKKLKSVKELLGITIMERSSFEKNPIDFLEAKGYKEVKKDLIIKLPKYSLFELENGRKRMLASAGELQKGNELALPSKYVNFLYLASHYEKLKGSPEDNEQKQLFVEQHKHYLDEIIEQISEFSKRVILADANLDKVLSAYNKHRDKPIREQAENIIHLFTLTNLGAPAAFKYFDTTIDRKRYTSTKEVLDATLIHQSITGLYETRIDLSQLGGDGGGGGGGSGGTLNIEDEYRLHETSKEPDVPLGSTWLSDFPQAWAETGGMGLAVRQAPLIIPLKATSTPVSIKQYPMSQEARLGIKPHIQRLLDQGILVPCQSPWNTPLLPVKKPGTNDYRPVQDLREVNKRVEDIHPTVPNPYNLLSGLPPSHQWYTVLDLKDAFFCLRLHPTSQPLFAFEWRDPEMGISGQLTWTRLPQGFKNSPTLFNEALHRDLADFRIQHPDLILLQYVDDLLLAATSEQDCQRGTRALLQTLGNLGYRASAKKAQICQKQVKYLGYLLKEGQRWLTEARKETVMGQPTPKTPRQLREFLGTAGFCRLWIPGFAEMAAPLYPLTKPGTLFNWGPDQQKAYQEIKQALLTAPALGLPDLTKPFELFVDEKQGYAKGVLTQKLGPWRRPVAYLSKKLDPVAAGWPPCLRMVAAIAVLTKDAGKLTMGQPLVILAPHAVEALVKQPPDRWLSNARMTHYQAMLLDTDRVQFGPVVALNPATLLPLPEKEAPHDCLEILAETHGTRPDLTDQPIPDADYTWYTDGSSFLQEGQRRAGAAVTTETEVIWARALPAGTSAQRAELIALTQALKMAEGKKLNVYTDSRYAFATAHVHGEIYRRRGWLTSEGREIKNKNEILALLKALFLPKRLSIIHCPGHQKGNSAEARGNRMADQAAREAAMKAVLETSTLLAGKRTADGSEFEKRTADGSEFESPKKKAKVE

SEQ ID NO: 975 - protein, 2096 aa, synthetic construct
MPAAKRVKLDGGDKKYSIGLDIGTNSVGWAVITDEYKVPSKKFKVLGNTDRHSIKKNLIGALLFDSGETAEATRLKRTARRRYTRRKNRICYLQEIFSNEMAKVDDSFFHRLEESFLVEEDKKHERHPIFGNIVDEVAYHEKYPTIYHLRKKLVDSTDKADLRLIYLALAHMIKFRGHFLIEGDLNPDNSDVDKLFIQLVQTYNQLFEENPINASGVDAKAILSARLSKSRRLENLIAQLPGEKKNGLFGNLIALSLGLTPNFKSNFDLAEDAKLQLSKDTYDDDLDNLLAQIGDQYADLFLAAKNLSDAILLSDILRVNTEITKAPLSASMIKRYDEHHQDLTLLKALVRQQLPEKYKEIFFDQSKNGYAGYIDGGASQEEFYKFIKPILEKMDGTEELLVKLNREDLLRKQRTFDNGSIPHQIHLGELHAILRRQEDFYPFLKDNREKIEKILTFRIPYYVGPLARGNSRFAWMTRKSEETITPWNFEEVVDKGASAQSFIERMTNFDKNLPNEKVLPKHSLLYEYFTVYNELTKVKYVTEGMRKPAFLSGEQKKAIVDLLFKTNRKVTVKQLKEDYFKKIECFDSVEISGVEDRFNASLGTYHDLLKIIKDKDFLDNEENEDILEDIVLTLTLFEDREMIEERLKTYAHLFDDKVMKQLKRRRYTGWGRLSRKLINGIRDKQSGKTILDFLKSDGFANRNFMQLIHDDSLTFKEDIQKAQVSGQGDSLHEHIANLAGSPAIKKGILQTVKVVDELVKVMGRHKPENIVIEMARENQTTQKGQKNSRERMKRIEEGIKELGSQILKEHPVENTQLQNEKLYLYYLQNGRDMYVDQELDINRLSDYDVDHIVPQSFLKDDSIDNKVLTRSDKARGKSDNVPSEEVVKKMKNYWRQLLNAKLITQRKFDNLTKAERGGLSELDKAGFIKRQLVETRQITKHVAQILDSRMNTKYDENDKLIREVKVITLKSKLVSDFRKDFQFYKVREINNYHHAHDAYLNAVVGTALIKKYPKLESEFVYGDYKVYDVRKMIAKSEQEIGKATAKYFFYSNIMNFFKTEITLANGEIRKRPLIETNGETGEIVWDKGRDFATVRKVLSMPQVNIVKKTEVQTGGFSKESILPKRNSDKLIARKKDWDPKKYGGFDSPTVAYSVLVVAKVEKGKSKKLKSVKELLGITIMERSSFEKNPIDFLEAKGYKEVKKDLIIKLPKYSLFELENGRKRMLASAGELQKGNELALPSKYVNFLYLASHYEKLKGSPEDNEQKQLFVEQHKHYLDEIIEQISEFSKRVILADANLDKVLSAYNKHRDKPIREQAENIIHLFTLTNLGAPAAFKYFDTTIDRKRYTSTKEVLDATLIHQSITGLYETRIDLSQLGGDGGGSSGGSEAAAKGGTLNIEDEYRLHETSKEPDVPLGSTWLSDFPQAWAETGGMGLAVRQAPLIIPLKATSTPVSIKQYPMSQEARLGIKPHIQRLLDQGILVPCQSPWNTPLLPVKKPGTNDYRPVQDLREVNKRVEDIHPTVPNPYNLLSGLPPSHQWYTVLDLKDAFFCLRLHPTSQPLFAFEWRDPEMGISGQLTWTRLPQGFKNSPTLFNEALHRDLADFRIQHPDLILLQYVDDLLLAATSEQDCQRGTRALLQTLGNLGYRASAKKAQICQKQVKYLGYLLKEGQRWLTEARKETVMGQPTPKTPRQLREFLGTAGFCRLWIPGFAEMAAPLYPLTKPGTLFNWGPDQQKAYQEIKQALLTAPALGLPDLTKPFELFVDEKQGYAKGVLTQKLGPWRRPVAYLSKKLDPVAAGWPPCLRMVAAIAVLTKDAGKLTMGQPLVILAPHAVEALVKQPPDRWLSNARMTHYQAMLLDTDRVQFGPVVALNPATLLPLPEKEAPHDCLEILAETHGTRPDLTDQPIPDADYTWYTDGSSFLQEGQRRAGAAVTTETEVIWARALPAGTSAQRAELIALTQALKMAEGKKLNVYTDSRYAFATAHVHGEIYRRRGWLTSEGREIKNKNEILALLKALFLPKRLSIIHCPGHQKGNSAEARGNRMADQAAREAAMKAVLETSTLLAGKRTADGSEFEKRTADGSEFESPKKKAKVE

SEQ ID NO: 976 - protein, 2115 aa, synthetic construct
MPAAKRVKLDGGDKKYSIGLDIGTNSVGWAVITDEYKVPSKKFKVLGNTDRHSIKKNLIGALLFDSGETAEATRLKRTARRRYTRRKNRICYLQEIFSNEMAKVDDSFFHRLEESFLVEEDKKHERHPIFGNIVDEVAYHEKYPTIYHLRKKLVDSTDKADLRLIYLALAHMIKFRGHFLIEGDLNPDNSDVDKLFIQLVQTYNQLFEENPINASGVDAKAILSARLSKSRRLENLIAQLPGEKKNGLFGNLIALSLGLTPNFKSNFDLAEDAKLQLSKDTYDDDLDNLLAQIGDQYADLFLAAKNLSDAILLSDILRVNTEITKAPLSASMIKRYDEHHQDLTLLKALVRQQLPEKYKEIFFDQSKNGYAGYIDGGASQEEFYKFIKPILEKMDGTEELLVKLNREDLLRKQRTFDNGSIPHQIHLGELHAILRRQEDFYPFLKDNREKIEKILTFRIPYYVGPLARGNSRFAWMTRKSEETITPWNFEEVVDKGASAQSFIERMTNFDKNLPNEKVLPKHSLLYEYFTVYNELTKVKYVTEGMRKPAFLSGEQKKAIVDLLFKTNRKVTVKQLKEDYFKKIECFDSVEISGVEDRFNASLGTYHDLLKIIKDKDFLDNEENEDILEDIVLTLTLFEDREMIEERLKTYAHLFDDKVMKQLKRRRYTGWGRLSRKLINGIRDKQSGKTILDFLKSDGFANRNFMQLIHDDSLTFKEDIQKAQVSGQGDSLHEHIANLAGSPAIKKGILQTVKVVDELVKVMGRHKPENIVIEMARENQTTQKGQKNSRERMKRIEEGIKELGSQILKEHPVENTQLQNEKLYLYYLQNGRDMYVDQELDINRLSDYDVDHIVPQSFLKDDSIDNKVLTRSDKARGKSDNVPSEEVVKKMKNYWRQLLNAKLITQRKFDNLTKAERGGLSELDKAGFIKRQLVETRQITKHVAQILDSRMNTKYDENDKLIREVKVITLKSKLVSDFRKDFQFYKVREINNYHHAHDAYLNAVVGTALIKKYPKLESEFVYGDYKVYDVRKMIAKSEQEIGKATAKYFFYSNIMNFFKTEITLANGEIRKRPLIETNGETGEIVWDKGRDFATVRKVLSMPQVNIVKKTEVQTGGFSKESILPKRNSDKLIARKKDWDPKKYGGFDSPTVAYSVLVVAKVEKGKSKKLKSVKELLGITIMERSSFEKNPIDFLEAKGYKEVKKDLIIKLPKYSLFELENGRKRMLASAGELQKGNELALPSKYVNFLYLASHYEKLKGSPEDNEQKQLFVEQHKHYLDEIIEQISEFSKRVILADANLDKVLSAYNKHRDKPIREQAENIIHLFTLTNLGAPAAFKYFDTTIDRKRYTSTKEVLDATLIHQSITGLYETRIDLSQLGGDGGGGGGSGGGGSGGGGSGGGGSGGGGSGGGGSGGTLNIEDEYRLHETSKEPDVPLGSTWLSDFPQAWAETGGMGLAVRQAPLIIPLKATSTPVSIKQYPMSQEARLGIKPHIQRLLDQGILVPCQSPWNTPLLPVKKPGTNDYRPVQDLREVNKRVEDIHPTVPNPYNLLSGLPPSHQWYTVLDLKDAFFCLRLHPTSQPLFAFEWRDPEMGISGQLTWTRLPQGFKNSPTLFNEALHRDLADFRIQHPDLILLQYVDDLLLAATSEQDCQRGTRALLQTLGNLGYRASAKKAQICQKQVKYLGYLLKEGQRWLTEARKETVMGQPTPKTPRQLREFLGTAGFCRLWIPGFAEMAAPLYPLTKPGTLFNWGPDQQKAYQEIKQALLTAPALGLPDLTKPFELFVDEKQGYAKGVLTQKLGPWRRPVAYLSKKLDPVAAGWPPCLRMVAAIAVLTKDAGKLTMGQPLVILAPHAVEALVKQPPDRWLSNARMTHYQAMLLDTDRVQFGPVVALNPATLLPLPEKEAPHDCLEILAETHGTRPDLTDQPIPDADYTWYTDGSSFLQEGQRRAGAAVTTETEVIWARALPAGTSAQRAELIALTQALKMAEGKKLNVYTDSRYAFATAHVHGEIYRRRGWLTSEGREIKNKNEILALLKALFLPKRLSIIHCPGHQKGNSAEARGNRMADQAAREAAMKAVLETSTLLAGKRTADGSEFEKRTADGSEFESPKKKAKVE

SEQ ID NO: 977 - protein, 2105 aa, synthetic construct
MPAAKRVKLDGGDKKYSIGLDIGTNSVGWAVITDEYKVPSKKFKVLGNTDRHSIKKNLIGALLFDSGETAEATRLKRTARRRYTRRKNRICYLQEIFSNEMAKVDDSFFHRLEESFLVEEDKKHERHPIFGNIVDEVAYHEKYPTIYHLRKKLVDSTDKADLRLIYLALAHMIKFRGHFLIEGDLNPDNSDVDKLFIQLVQTYNQLFEENPINASGVDAKAILSARLSKSRRLENLIAQLPGEKKNGLFGNLIALSLGLTPNFKSNFDLAEDAKLQLSKDTYDDDLDNLLAQIGDQYADLFLAAKNLSDAILLSDILRVNTEITKAPLSASMIKRYDEHHQDLTLLKALVRQQLPEKYKEIFFDQSKNGYAGYIDGGASQEEFYKFIKPILEKMDGTEELLVKLNREDLLRKQRTFDNGSIPHQIHLGELHAILRRQEDFYPFLKDNREKIEKILTFRIPYYVGPLARGNSRFAWMTRKSEETITPWNFEEVVDKGASAQSFIERMTNFDKNLPNEKVLPKHSLLYEYFTVYNELTKVKYVTEGMRKPAFLSGEQKKAIVDLLFKTNRKVTVKQLKEDYFKKIECFDSVEISGVEDRFNASLGTYHDLLKIIKDKDFLDNEENEDILEDIVLTLTLFEDREMIEERLKTYAHLFDDKVMKQLKRRRYTGWGRLSRKLINGIRDKQSGKTILDFLKSDGFANRNFMQLIHDDSLTFKEDIQKAQVSGQGDSLHEHIANLAGSPAIKKGILQTVKVVDELVKVMGRHKPENIVIEMARENQTTQKGQKNSRERMKRIEEGIKELGSQILKEHPVENTQLQNEKLYLYYLQNGRDMYVDQELDINRLSDYDVDHIVPQSFLKDDSIDNKVLTRSDKARGKSDNVPSEEVVKKMKNYWRQLLNAKLITQRKFDNLTKAERGGLSELDKAGFIKRQLVETRQITKHVAQILDSRMNTKYDENDKLIREVKVITLKSKLVSDFRKDFQFYKVREINNYHHAHDAYLNAVVGTALIKKYPKLESEFVYGDYKVYDVRKMIAKSEQEIGKATAKYFFYSNIMNFFKTEITLANGEIRKRPLIETNGETGEIVWDKGRDFATVRKVLSMPQVNIVKKTEVQTGGFSKESILPKRNSDKLIARKKDWDPKKYGGFDSPTVAYSVLVVAKVEKGKSKKLKSVKELLGITIMERSSFEKNPIDFLEAKGYKEVKKDLIIKLPKYSLFELENGRKRMLASAGELQKGNELALPSKYVNFLYLASHYEKLKGSPEDNEQKQLFVEQHKHYLDEIIEQISEFSKRVILADANLDKVLSAYNKHRDKPIREQAENIIHLFTLTNLGAPAAFKYFDTTIDRKRYTSTKEVLDATLIHQSITGLYETRIDLSQLGGDGGGGGGSGGGGSGGGGSGGGGSGGTLNIEDEYRLHETSKEPDVPLGSTWLSDFPQAWAETGGMGLAVRQAPLIIPLKATSTPVSIKQYPMSQEARLGIKPHIQRLLDQGILVPCQSPWNTPLLPVKKPGTNDYRPVQDLREVNKRVEDIHPTVPNPYNLLSGLPPSHQWYTVLDLKDAFFCLRLHPTSQPLFAFEWRDPEMGISGQLTWTRLPQGFKNSPTLFNEALHRDLADFRIQHPDLILLQYVDDLLLAATSEQDCQRGTRALLQTLGNLGYRASAKKAQICQKQVKYLGYLLKEGQRWLTEARKETVMGQPTPKTPRQLREFLGTAGFCRLWIPGFAEMAAPLYPLTKPGTLFNWGPDQQKAYQEIKQALLTAPALGLPDLTKPFELFVDEKQGYAKGVLTQKLGPWRRPVAYLSKKLDPVAAGWPPCLRMVAAIAVLTKDAGKLTMGQPLVILAPHAVEALVKQPPDRWLSNARMTHYQAMLLDTDRVQFGPVVALNPATLLPLPEKEAPHDCLEILAETHGTRPDLTDQPIPDADYTWYTDGSSFLQEGQRRAGAAVTTETEVIWARALPAGTSAQRAELIALTQALKMAEGKKLNVYTDSRYAFATAHVHGEIYRRRGWLTSEGREIKNKNEILALLKALFLPKRLSIIHCPGHQKGNSAEARGNRMADQAAREAAMKAVLETSTLLAGKRTADGSEFEKRTADGSEFESPKKKAKVE

SEQ ID NO: 978 - protein, 2094 aa, synthetic construct
MPAAKRVKLDGGDKKYSIGLDIGTNSVGWAVITDEYKVPSKKFKVLGNTDRHSIKKNLIGALLFDSGETAEATRLKRTARRRYTRRKNRICYLQEIFSNEMAKVDDSFFHRLEESFLVEEDKKHERHPIFGNIVDEVAYHEKYPTIYHLRKKLVDSTDKADLRLIYLALAHMIKFRGHFLIEGDLNPDNSDVDKLFIQLVQTYNQLFEENPINASGVDAKAILSARLSKSRRLENLIAQLPGEKKNGLFGNLIALSLGLTPNFKSNFDLAEDAKLQLSKDTYDDDLDNLLAQIGDQYADLFLAAKNLSDAILLSDILRVNTEITKAPLSASMIKRYDEHHQDLTLLKALVRQQLPEKYKEIFFDQSKNGYAGYIDGGASQEEFYKFIKPILEKMDGTEELLVKLNREDLLRKQRTFDNGSIPHQIHLGELHAILRRQEDFYPFLKDNREKIEKILTFRIPYYVGPLARGNSRFAWMTRKSEETITPWNFEEVVDKGASAQSFIERMTNFDKNLPNEKVLPKHSLLYEYFTVYNELTKVKYVTEGMRKPAFLSGEQKKAIVDLLFKTNRKVTVKQLKEDYFKKIECFDSVEISGVEDRFNASLGTYHDLLKIIKDKDFLDNEENEDILEDIVLTLTLFEDREMIEERLKTYAHLFDDKVMKQLKRRRYTGWGRLSRKLINGIRDKQSGKTILDFLKSDGFANRNFMQLIHDDSLTFKEDIQKAQVSGQGDSLHEHIANLAGSPAIKKGILQTVKVVDELVKVMGRHKPENIVIEMARENQTTQKGQKNSRERMKRIEEGIKELGSQILKEHPVENTQLQNEKLYLYYLQNGRDMYVDQELDINRLSDYDVDHIVPQSFLKDDSIDNKVLTRSDKARGKSDNVPSEEVVKKMKNYWRQLLNAKLITQRKFDNLTKAERGGLSELDKAGFIKRQLVETRQITKHVAQILDSRMNTKYDENDKLIREVKVITLKSKLVSDFRKDFQFYKVREINNYHHAHDAYLNAVVGTALIKKYPKLESEFVYGDYKVYDVRKMIAKSEQEIGKATAKYFFYSNIMNFFKTEITLANGEIRKRPLIETNGETGEIVWDKGRDFATVRKVLSMPQVNIVKKTEVQTGGFSKESILPKRNSDKLIARKKDWDPKKYGGFDSPTVAYSVLVVAKVEKGKSKKLKSVKELLGITIMERSSFEKNPIDFLEAKGYKEVKKDLIIKLPKYSLFELENGRKRMLASAGELQKGNELALPSKYVNFLYLASHYEKLKGSPEDNEQKQLFVEQHKHYLDEIIEQISEFSKRVILADANLDKVLSAYNKHRDKPIREQAENIIHLFTLTNLGAPAAFKYFDTTIDRKRYTSTKEVLDATLIHQSITGLYETRIDLSQLGGDGGPAPAPAPAPGGTLNIEDEYRLHETSKEPDVPLGSTWLSDFPQAWAETGGMGLAVRQAPLIIPLKATSTPVSIKQYPMSQEARLGIKPHIQRLLDQGILVPCQSPWNTPLLPVKKPGTNDYRPVQDLREVNKRVEDIHPTVPNPYNLLSGLPPSHQWYTVLDLKDAFFCLRLHPTSQPLFAFEWRDPEMGISGQLTWTRLPQGFKNSPTLFNEALHRDLADFRIQHPDLILLQYVDDLLLAATSEQDCQRGTRALLQTLGNLGYRASAKKAQICQKQVKYLGYLLKEGQRWLTEARKETVMGQPTPKTPRQLREFLGTAGFCRLWIPGFAEMAAPLYPLTKPGTLFNWGPDQQKAYQEIKQALLTAPALGLPDLTKPFELFVDEKQGYAKGVLTQKLGPWRRPVAYLSKKLDPVAAGWPPCLRMVAAIAVLTKDAGKLTMGQPLVILAPHAVEALVKQPPDRWLSNARMTHYQAMLLDTDRVQFGPVVALNPATLLPLPEKEAPHDCLEILAETHGTRPDLTDQPIPDADYTWYTDGSSFLQEGQRRAGAAVTTETEVIWARALPAGTSAQRAELIALTQALKMAEGKKLNVYTDSRYAFATAHVHGEIYRRRGWLTSEGREIKNKNEILALLKALFLPKRLSIIHCPGHQKGNSAEARGNRMADQAAREAAMKAVLETSTLLAGKRTADGSEFEKRTADGSEFESPKKKAKVE

SEQ ID NO: 979 - protein, 2096 aa, synthetic construct
MPAAKRVKLDGGDKKYSIGLDIGTNSVGWAVITDEYKVPSKKFKVLGNTDRHSIKKNLIGALLFDSGETAEATRLKRTARRRYTRRKNRICYLQEIFSNEMAKVDDSFFHRLEESFLVEEDKKHERHPIFGNIVDEVAYHEKYPTIYHLRKKLVDSTDKADLRLIYLALAHMIKFRGHFLIEGDLNPDNSDVDKLFIQLVQTYNQLFEENPINASGVDAKAILSARLSKSRRLENLIAQLPGEKKNGLFGNLIALSLGLTPNFKSNFDLAEDAKLQLSKDTYDDDLDNLLAQIGDQYADLFLAAKNLSDAILLSDILRVNTEITKAPLSASMIKRYDEHHQDLTLLKALVRQQLPEKYKEIFFDQSKNGYAGYIDGGASQEEFYKFIKPILEKMDGTEELLVKLNREDLLRKQRTFDNGSIPHQIHLGELHAILRRQEDFYPFLKDNREKIEKILTFRIPYYVGPLARGNSRFAWMTRKSEETITPWNFEEVVDKGASAQSFIERMTNFDKNLPNEKVLPKHSLLYEYFTVYNELTKVKYVTEGMRKPAFLSGEQKKAIVDLLFKTNRKVTVKQLKEDYFKKIECFDSVEISGVEDRFNASLGTYHDLLKIIKDKDFLDNEENEDILEDIVLTLTLFEDREMIEERLKTYAHLFDDKVMKQLKRRRYTGWGRLSRKLINGIRDKQSGKTILDFLKSDGFANRNFMQLIHDDSLTFKEDIQKAQVSGQGDSLHEHIANLAGSPAIKKGILQTVKVVDELVKVMGRHKPENIVIEMARENQTTQKGQKNSRERMKRIEEGIKELGSQILKEHPVENTQLQNEKLYLYYLQNGRDMYVDQELDINRLSDYDVDHIVPQSFLKDDSIDNKVLTRSDKARGKSDNVPSEEVVKKMKNYWRQLLNAKLITQRKFDNLTKAERGGLSELDKAGFIKRQLVETRQITKHVAQILDSRMNTKYDENDKLIREVKVITLKSKLVSDFRKDFQFYKVREINNYHHAHDAYLNAVVGTALIKKYPKLESEFVYGDYKVYDVRKMIAKSEQEIGKATAKYFFYSNIMNFFKTEITLANGEIRKRPLIETNGETGEIVWDKGRDFATVRKVLSMPQVNIVKKTEVQTGGFSKESILPKRNSDKLIARKKDWDPKKYGGFDSPTVAYSVLVVAKVEKGKSKKLKSVKELLGITIMERSSFEKNPIDFLEAKGYKEVKKDLIIKLPKYSLFELENGRKRMLASAGELQKGNELALPSKYVNFLYLASHYEKLKGSPEDNEQKQLFVEQHKHYLDEIIEQISEFSKRVILADANLDKVLSAYNKHRDKPIREQAENIIHLFTLTNLGAPAAFKYFDTTIDRKRYTSTKEVLDATLIHQSITGLYETRIDLSQLGGDGGGGGEAAAKGGSGGTLNIEDEYRLHETSKEPDVPLGSTWLSDFPQAWAETGGMGLAVRQAPLIIPLKATSTPVSIKQYPMSQEARLGIKPHIQRLLDQGILVPCQSPWNTPLLPVKKPGTNDYRPVQDLREVNKRVEDIHPTVPNPYNLLSGLPPSHQWYTVLDLKDAFFCLRLHPTSQPLFAFEWRDPEMGISGQLTWTRLPQGFKNSPTLFNEALHRDLADFRIQHPDLILLQYVDDLLLAATSEQDCQRGTRALLQTLGNLGYRASAKKAQICQKQVKYLGYLLKEGQRWLTEARKETVMGQPTPKTPRQLREFLGTAGFCRLWIPGFAEMAAPLYPLTKPGTLFNWGPDQQKAYQEIKQALLTAPALGLPDLTKPFELFVDEKQGYAKGVLTQKLGPWRRPVAYLSKKLDPVAAGWPPCLRMVAAIAVLTKDAGKLTMGQPLVILAPHAVEALVKQPPDRWLSNARMTHYQAMLLDTDRVQFGPVVALNPATLLPLPEKEAPHDCLEILAETHGTRPDLTDQPIPDADYTWYTDGSSFLQEGQRRAGAAVTTETEVIWARALPAGTSAQRAELIALTQALKMAEGKKLNVYTDSRYAFATAHVHGEIYRRRGWLTSEGREIKNKNEILALLKALFLPKRLSIIHCPGHQKGNSAEARGNRMADQAAREAAMKAVLETSTLLAGKRTADGSEFEKRTADGSEFESPKKKAKVE

SEQ ID NO: 980 - protein, 2094 aa, synthetic construct
MPAAKRVKLDGGDKKYSIGLDIGTNSVGWAVITDEYKVPSKKFKVLGNTDRHSIKKNLIGALLFDSGETAEATRLKRTARRRYTRRKNRICYLQEIFSNEMAKVDDSFFHRLEESFLVEEDKKHERHPIFGNIVDEVAYHEKYPTIYHLRKKLVDSTDKADLRLIYLALAHMIKFRGHFLIEGDLNPDNSDVDKLFIQLVQTYNQLFEENPINASGVDAKAILSARLSKSRRLENLIAQLPGEKKNGLFGNLIALSLGLTPNFKSNFDLAEDAKLQLSKDTYDDDLDNLLAQIGDQYADLFLAAKNLSDAILLSDILRVNTEITKAPLSASMIKRYDEHHQDLTLLKALVRQQLPEKYKEIFFDQSKNGYAGYIDGGASQEEFYKFIKPILEKMDGTEELLVKLNREDLLRKQRTFDNGSIPHQIHLGELHAILRRQEDFYPFLKDNREKIEKILTFRIPYYVGPLARGNSRFAWMTRKSEETITPWNFEEVVDKGASAQSFIERMTNFDKNLPNEKVLPKHSLLYEYFTVYNELTKVKYVTEGMRKPAFLSGEQKKAIVDLLFKTNRKVTVKQLKEDYFKKIECFDSVEISGVEDRFNASLGTYHDLLKIIKDKDFLDNEENEDILEDIVLTLTLFEDREMIEERLKTYAHLFDDKVMKQLKRRRYTGWGRLSRKLINGIRDKQSGKTILDFLKSDGFANRNFMQLIHDDSLTFKEDIQKAQVSGQGDSLHEHIANLAGSPAIKKGILQTVKVVDELVKVMGRHKPENIVIEMARENQTTQKGQKNSRERMKRIEEGIKELGSQILKEHPVENTQLQNEKLYLYYLQNGRDMYVDQELDINRLSDYDVDHIVPQSFLKDDSIDNKVLTRSDKARGKSDNVPSEEVVKKMKNYWRQLLNAKLITQRKFDNLTKAERGGLSELDKAGFIKRQLVETRQITKHVAQILDSRMNTKYDENDKLIREVKVITLKSKLVSDFRKDFQFYKVREINNYHHAHDAYLNAVVGTALIKKYPKLESEFVYGDYKVYDVRKMIAKSEQEIGKATAKYFFYSNIMNFFKTEITLANGEIRKRPLIETNGETGEIVWDKGRDFATVRKVLSMPQVNIVKKTEVQTGGFSKESILPKRNSDKLIARKKDWDPKKYGGFDSPTVAYSVLVVAKVEKGKSKKLKSVKELLGITIMERSSFEKNPIDFLEAKGYKEVKKDLIIKLPKYSLFELENGRKRMLASAGELQKGNELALPSKYVNFLYLASHYEKLKGSPEDNEQKQLFVEQHKHYLDEIIEQISEFSKRVILADANLDKVLSAYNKHRDKPIREQAENIIHLFTLTNLGAPAAFKYFDTTIDRKRYTSTKEVLDATLIHQSITGLYETRIDLSQLGGDGGGGSGGSGGSGGTLNIEDEYRLHETSKEPDVPLGSTWLSDFPQAWAETGGMGLAVRQAPLIIPLKATSTPVSIKQYPMSQEARLGIKPHIQRLLDQGILVPCQSPWNTPLLPVKKPGTNDYRPVQDLREVNKRVEDIHPTVPNPYNLLSGLPPSHQWYTVLDLKDAFFCLRLHPTSQPLFAFEWRDPEMGISGQLTWTRLPQGFKNSPTLFNEALHRDLADFRIQHPDLILLQYVDDLLLAATSEQDCQRGTRALLQTLGNLGYRASAKKAQICQKQVKYLGYLLKEGQRWLTEARKETVMGQPTPKTPRQLREFLGTAGFCRLWIPGFAEMAAPLYPLTKPGTLFNWGPDQQKAYQEIKQALLTAPALGLPDLTKPFELFVDEKQGYAKGVLTQKLGPWRRPVAYLSKKLDPVAAGWPPCLRMVAAIAVLTKDAGKLTMGQPLVILAPHAVEALVKQPPDRWLSNARMTHYQAMLLDTDRVQFGPVVALNPATLLPLPEKEAPHDCLEILAETHGTRPDLTDQPIPDADYTWYTDGSSFLQEGQRRAGAAVTTETEVIWARALPAGTSAQRAELIALTQALKMAEGKKLNVYTDSRYAFATAHVHGEIYRRRGWLTSEGREIKNKNEILALLKALFLPKRLSIIHCPGHQKGNSAEARGNRMADQAAREAAMKAVLETSTLLAGKRTADGSEFEKRTADGSEFESPKKKAKVE

SEQ ID NO: 981 - protein, 2100 aa, synthetic construct
MPAAKRVKLDGGDKKYSIGLDIGTNSVGWAVITDEYKVPSKKFKVLGNTDRHSIKKNLIGALLFDSGETAEATRLKRTARRRYTRRKNRICYLQEIFSNEMAKVDDSFFHRLEESFLVEEDKKHERHPIFGNIVDEVAYHEKYPTIYHLRKKLVDSTDKADLRLIYLALAHMIKFRGHFLIEGDLNPDNSDVDKLFIQLVQTYNQLFEENPINASGVDAKAILSARLSKSRRLENLIAQLPGEKKNGLFGNLIALSLGLTPNFKSNFDLAEDAKLQLSKDTYDDDLDNLLAQIGDQYADLFLAAKNLSDAILLSDILRVNTEITKAPLSASMIKRYDEHHQDLTLLKALVRQQLPEKYKEIFFDQSKNGYAGYIDGGASQEEFYKFIKPILEKMDGTEELLVKLNREDLLRKQRTFDNGSIPHQIHLGELHAILRRQEDFYPFLKDNREKIEKILTFRIPYYVGPLARGNSRFAWMTRKSEETITPWNFEEVVDKGASAQSFIERMTNFDKNLPNEKVLPKHSLLYEYFTVYNELTKVKYVTEGMRKPAFLSGEQKKAIVDLLFKTNRKVTVKQLKEDYFKKIECFDSVEISGVEDRFNASLGTYHDLLKIIKDKDFLDNEENEDILEDIVLTLTLFEDREMIEERLKTYAHLFDDKVMKQLKRRRYTGWGRLSRKLINGIRDKQSGKTILDFLKSDGFANRNFMQLIHDDSLTFKEDIQKAQVSGQGDSLHEHIANLAGSPAIKKGILQTVKVVDELVKVMGRHKPENIVIEMARENQTTQKGQKNSRERMKRIEEGIKELGSQILKEHPVENTQLQNEKLYLYYLQNGRDMYVDQELDINRLSDYDVDHIVPQSFLKDDSIDNKVLTRSDKARGKSDNVPSEEVVKKMKNYWRQLLNAKLITQRKFDNLTKAERGGLSELDKAGFIKRQLVETRQITKHVAQILDSRMNTKYDENDKLIREVKVITLKSKLVSDFRKDFQFYKVREINNYHHAHDAYLNAVVGTALIKKYPKLESEFVYGDYKVYDVRKMIAKSEQEIGKATAKYFFYSNIMNFFKTEITLANGEIRKRPLIETNGETGEIVWDKGRDFATVRKVLSMPQVNIVKKTEVQTGGFSKESILPKRNSDKLIARKKDWDPKKYGGFDSPTVAYSVLVVAKVEKGKSKKLKSVKELLGITIMERSSFEKNPIDFLEAKGYKEVKKDLIIKLPKYSLFELENGRKRMLASAGELQKGNELALPSKYVNFLYLASHYEKLKGSPEDNEQKQLFVEQHKHYLDEIIEQISEFSKRVILADANLDKVLSAYNKHRDKPIREQAENIIHLFTLTNLGAPAAFKYFDTTIDRKRYTSTKEVLDATLIHQSITGLYETRIDLSQLGGDGGEAAAKGGGGSEAAAKGGTLNIEDEYRLHETSKEPDVPLGSTWLSDFPQAWAETGGMGLAVRQAPLIIPLKATSTPVSIKQYPMSQEARLGIKPHIQRLLDQGILVPCQSPWNTPLLPVKKPGTNDYRPVQDLREVNKRVEDIHPTVPNPYNLLSGLPPSHQWYTVLDLKDAFFCLRLHPTSQPLFAFEWRDPEMGISGQLTWTRLPQGFKNSPTLFNEALHRDLADFRIQHPDLILLQYVDDLLLAATSEQDCQRGTRALLQTLGNLGYRASAKKAQICQKQVKYLGYLLKEGQRWLTEARKETVMGQPTPKTPRQLREFLGTAGFCRLWIPGFAEMAAPLYPLTKPGTLFNWGPDQQKAYQEIKQALLTAPALGLPDLTKPFELFVDEKQGYAKGVLTQKLGPWRRPVAYLSKKLDPVAAGWPPCLRMVAAIAVLTKDAGKLTMGQPLVILAPHAVEALVKQPPDRWLSNARMTHYQAMLLDTDRVQFGPVVALNPATLLPLPEKEAPHDCLEILAETHGTRPDLTDQPIPDADYTWYTDGSSFLQEGQRRAGAAVTTETEVIWARALPAGTSAQRAELIALTQALKMAEGKKLNVYTDSRYAFATAHVHGEIYRRRGWLTSEGREIKNKNEILALLKALFLPKRLSIIHCPGHQKGNSAEARGNRMADQAAREAAMKAVLETSTLLAGKRTADGSEFEKRTADGSEFESPKKKAKVE

SEQ ID NO: 982 - protein, 2093 aa, synthetic construct
MPAAKRVKLDGGDKKYSIGLDIGTNSVGWAVITDEYKVPSKKFKVLGNTDRHSIKKNLIGALLFDSGETAEATRLKRTARRRYTRRKNRICYLQEIFSNEMAKVDDSFFHRLEESFLVEEDKKHERHPIFGNIVDEVAYHEKYPTIYHLRKKLVDSTDKADLRLIYLALAHMIKFRGHFLIEGDLNPDNSDVDKLFIQLVQTYNQLFEENPINASGVDAKAILSARLSKSRRLENLIAQLPGEKKNGLFGNLIALSLGLTPNFKSNFDLAEDAKLQLSKDTYDDDLDNLLAQIGDQYADLFLAAKNLSDAILLSDILRVNTEITKAPLSASMIKRYDEHHQDLTLLKALVRQQLPEKYKEIFFDQSKNGYAGYIDGGASQEEFYKFIKPILEKMDGTEELLVKLNREDLLRKQRTFDNGSIPHQIHLGELHAILRRQEDFYPFLKDNREKIEKILTFRIPYYVGPLARGNSRFAWMTRKSEETITPWNFEEVVDKGASAQSFIERMTNFDKNLPNEKVLPKHSLLYEYFTVYNELTKVKYVTEGMRKPAFLSGEQKKAIVDLLFKTNRKVTVKQLKEDYFKKIECFDSVEISGVEDRFNASLGTYHDLLKIIKDKDFLDNEENEDILEDIVLTLTLFEDREMIEERLKTYAHLFDDKVMKQLKRRRYTGWGRLSRKLINGIRDKQSGKTILDFLKSDGFANRNFMQLIHDDSLTFKEDIQKAQVSGQGDSLHEHIANLAGSPAIKKGILQTVKVVDELVKVMGRHKPENIVIEMARENQTTQKGQKNSRERMKRIEEGIKELGSQILKEHPVENTQLQNEKLYLYYLQNGRDMYVDQELDINRLSDYDVDHIVPQSFLKDDSIDNKVLTRSDKARGKSDNVPSEEVVKKMKNYWRQLLNAKLITQRKFDNLTKAERGGLSELDKAGFIKRQLVETRQITKHVAQILDSRMNTKYDENDKLIREVKVITLKSKLVSDFRKDFQFYKVREINNYHHAHDAYLNAVVGTALIKKYPKLESEFVYGDYKVYDVRKMIAKSEQEIGKATAKYFFYSNIMNFFKTEITLANGEIRKRPLIETNGETGEIVWDKGRDFATVRKVLSMPQVNIVKKTEVQTGGFSKESILPKRNSDKLIARKKDWDPKKYGGFDSPTVAYSVLVVAKVEKGKSKKLKSVKELLGITIMERSSFEKNPIDFLEAKGYKEVKKDLIIKLPKYSLFELENGRKRMLASAGELQKGNELALPSKYVNFLYLASHYEKLKGSPEDNEQKQLFVEQHKHYLDEIIEQISEFSKRVILADANLDKVLSAYNKHRDKPIREQAENIIHLFTLTNLGAPAAFKYFDTTIDRKRYTSTKEVLDATLIHQSITGLYETRIDLSQLGGDGGEAAAKPAPGGTLNIEDEYRLHETSKEPDVPLGSTWLSDFPQAWAETGGMGLAVRQAPLIIPLKATSTPVSIKQYPMSQEARLGIKPHIQRLLDQGILVPCQSPWNTPLLPVKKPGTNDYRPVQDLREVNKRVEDIHPTVPNPYNLLSGLPPSHQWYTVLDLKDAFFCLRLHPTSQPLFAFEWRDPEMGISGQLTWTRLPQGFKNSPTLFNEALHRDLADFRIQHPDLILLQYVDDLLLAATSEQDCQRGTRALLQTLGNLGYRASAKKAQICQKQVKYLGYLLKEGQRWLTEARKETVMGQPTPKTPRQLREFLGTAGFCRLWIPGFAEMAAPLYPLTKPGTLFNWGPDQQKAYQEIKQALLTAPALGLPDLTKPFELFVDEKQGYAKGVLTQKLGPWRRPVAYLSKKLDPVAAGWPPCLRMVAAIAVLTKDAGKLTMGQPLVILAPHAVEALVKQPPDRWLSNARMTHYQAMLLDTDRVQFGPVVALNPATLLPLPEKEAPHDCLEILAETHGTRPDLTDQPIPDADYTWYTDGSSFLQEGQRRAGAAVTTETEVIWARALPAGTSAQRAELIALTQALKMAEGKKLNVYTDSRYAFATAHVHGEIYRRRGWLTSEGREIKNKNEILALLKALFLPKRLSIIHCPGHQKGNSAEARGNRMADQAAREAAMKAVLETSTLLAGKRTADGSEFEKRTADGSEFESPKKKAKVE

SEQ ID NO: 983 - protein, 2090 aa, synthetic construct
MPAAKRVKLDGGDKKYSIGLDIGTNSVGWAVITDEYKVPSKKFKVLGNTDRHSIKKNLIGALLFDSGETAEATRLKRTARRRYTRRKNRICYLQEIFSNEMAKVDDSFFHRLEESFLVEEDKKHERHPIFGNIVDEVAYHEKYPTIYHLRKKLVDSTDKADLRLIYLALAHMIKFRGHFLIEGDLNPDNSDVDKLFIQLVQTYNQLFEENPINASGVDAKAILSARLSKSRRLENLIAQLPGEKKNGLFGNLIALSLGLTPNFKSNFDLAEDAKLQLSKDTYDDDLDNLLAQIGDQYADLFLAAKNLSDAILLSDILRVNTEITKAPLSASMIKRYDEHHQDLTLLKALVRQQLPEKYKEIFFDQSKNGYAGYIDGGASQEEFYKFIKPILEKMDGTEELLVKLNREDLLRKQRTFDNGSIPHQIHLGELHAILRRQEDFYPFLKDNREKIEKILTFRIPYYVGPLARGNSRFAWMTRKSEETITPWNFEEVVDKGASAQSFIERMTNFDKNLPNEKVLPKHSLLYEYFTVYNELTKVKYVTEGMRKPAFLSGEQKKAIVDLLFKTNRKVTVKQLKEDYFKKIECFDSVEISGVEDRFNASLGTYHDLLKIIKDKDFLDNEENEDILEDIVLTLTLFEDREMIEERLKTYAHLFDDKVMKQLKRRRYTGWGRLSRKLINGIRDKQSGKTILDFLKSDGFANRNFMQLIHDDSLTFKEDIQKAQVSGQGDSLHEHIANLAGSPAIKKGILQTVKVVDELVKVMGRHKPENIVIEMARENQTTQKGQKNSRERMKRIEEGIKELGSQILKEHPVENTQLQNEKLYLYYLQNGRDMYVDQELDINRLSDYDVDHIVPQSFLKDDSIDNKVLTRSDKARGKSDNVPSEEVVKKMKNYWRQLLNAKLITQRKFDNLTKAERGGLSELDKAGFIKRQLVETRQITKHVAQILDSRMNTKYDENDKLIREVKVITLKSKLVSDFRKDFQFYKVREINNYHHAHDAYLNAVVGTALIKKYPKLESEFVYGDYKVYDVRKMIAKSEQEIGKATAKYFFYSNIMNFFKTEITLANGEIRKRPLIETNGETGEIVWDKGRDFATVRKVLSMPQVNIVKKTEVQTGGFSKESILPKRNSDKLIARKKDWDPKKYGGFDSPTVAYSVLVVAKVEKGKSKKLKSVKELLGITIMERSSFEKNPIDFLEAKGYKEVKKDLIIKLPKYSLFELENGRKRMLASAGELQKGNELALPSKYVNFLYLASHYEKLKGSPEDNEQKQLFVEQHKHYLDEIIEQISEFSKRVILADANLDKVLSAYNKHRDKPIREQAENIIHLFTLTNLGAPAAFKYFDTTIDRKRYTSTKEVLDATLIHQSITGLYETRIDLSQLGGDGGPAPAPGGTLNIEDEYRLHETSKEPDVPLGSTWLSDFPQAWAETGGMGLAVRQAPLIIPLKATSTPVSIKQYPMSQEARLGIKPHIQRLLDQGILVPCQSPWNTPLLPVKKPGTNDYRPVQDLREVNKRVEDIHPTVPNPYNLLSGLPPSHQWYTVLDLKDAFFCLRLHPTSQPLFAFEWRDPEMGISGQLTWTRLPQGFKNSPTLFNEALHRDLADFRIQHPDLILLQYVDDLLLAATSEQDCQRGTRALLQTLGNLGYRASAKKAQICQKQVKYLGYLLKEGQRWLTEARKETVMGQPTPKTPRQLREFLGTAGFCRLWIPGFAEMAAPLYPLTKPGTLFNWGPDQQKAYQEIKQALLTAPALGLPDLTKPFELFVDEKQGYAKGVLTQKLGPWRRPVAYLSKKLDPVAAGWPPCLRMVAAIAVLTKDAGKLTMGQPLVILAPHAVEALVKQPPDRWLSNARMTHYQAMLLDTDRVQFGPVVALNPATLLPLPEKEAPHDCLEILAETHGTRPDLTDQPIPDADYTWYTDGSSFLQEGQRRAGAAVTTETEVIWARALPAGTSAQRAELIALTQALKMAEGKKLNVYTDSRYAFATAHVHGEIYRRRGWLTSEGREIKNKNEILALLKALFLPKRLSIIHCPGHQKGNSAEARGNRMADQAAREAAMKAVLETSTLLAGKRTADGSEFEKRTADGSEFESPKKKAKVE

SEQ ID NO: 984 - protein, 2094 aa, synthetic construct
MPAAKRVKLDGGDKKYSIGLDIGTNSVGWAVITDEYKVPSKKFKVLGNTDRHSIKKNLIGALLFDSGETAEATRLKRTARRRYTRRKNRICYLQEIFSNEMAKVDDSFFHRLEESFLVEEDKKHERHPIFGNIVDEVAYHEKYPTIYHLRKKLVDSTDKADLRLIYLALAHMIKFRGHFLIEGDLNPDNSDVDKLFIQLVQTYNQLFEENPINASGVDAKAILSARLSKSRRLENLIAQLPGEKKNGLFGNLIALSLGLTPNFKSNFDLAEDAKLQLSKDTYDDDLDNLLAQIGDQYADLFLAAKNLSDAILLSDILRVNTEITKAPLSASMIKRYDEHHQDLTLLKALVRQQLPEKYKEIFFDQSKNGYAGYIDGGASQEEFYKFIKPILEKMDGTEELLVKLNREDLLRKQRTFDNGSIPHQIHLGELHAILRRQEDFYPFLKDNREKIEKILTFRIPYYVGPLARGNSRFAWMTRKSEETITPWNFEEVVDKGASAQSFIERMTNFDKNLPNEKVLPKHSLLYEYFTVYNELTKVKYVTEGMRKPAFLSGEQKKAIVDLLFKTNRKVTVKQLKEDYFKKIECFDSVEISGVEDRFNASLGTYHDLLKIIKDKDFLDNEENEDILEDIVLTLTLFEDREMIEERLKTYAHLFDDKVMKQLKRRRYTGWGRLSRKLINGIRDKQSGKTILDFLKSDGFANRNFMQLIHDDSLTFKEDIQKAQVSGQGDSLHEHIANLAGSPAIKKGILQTVKVVDELVKVMGRHKPENIVIEMARENQTTQKGQKNSRERMKRIEEGIKELGSQILKEHPVENTQLQNEKLYLYYLQNGRDMYVDQELDINRLSDYDVDHIVPQSFLKDDSIDNKVLTRSDKARGKSDNVPSEEVVKKMKNYWRQLLNAKLITQRKFDNLTKAERGGLSELDKAGFIKRQLVETRQITKHVAQILDSRMNTKYDENDKLIREVKVITLKSKLVSDFRKDFQFYKVREINNYHHAHDAYLNAVVGTALIKKYPKLESEFVYGDYKVYDVRKMIAKSEQEIGKATAKYFFYSNIMNFFKTEITLANGEIRKRPLIETNGETGEIVWDKGRDFATVRKVLSMPQVNIVKKTEVQTGGFSKESILPKRNSDKLIARKKDWDPKKYGGFDSPTVAYSVLVVAKVEKGKSKKLKSVKELLGITIMERSSFEKNPIDFLEAKGYKEVKKDLIIKLPKYSLFELENGRKRMLASAGELQKGNELALPSKYVNFLYLASHYEKLKGSPEDNEQKQLFVEQHKHYLDEIIEQISEFSKRVILADANLDKVLSAYNKHRDKPIREQAENIIHLFTLTNLGAPAAFKYFDTTIDRKRYTSTKEVLDATLIHQSITGLYETRIDLSQLGGDGGGGGPAPGGSGGTLNIEDEYRLHETSKEPDVPLGSTWLSDFPQAWAETGGMGLAVRQAPLIIPLKATSTPVSIKQYPMSQEARLGIKPHIQRLLDQGILVPCQSPWNTPLLPVKKPGTNDYRPVQDLREVNKRVEDIHPTVPNPYNLLSGLPPSHQWYTVLDLKDAFFCLRLHPTSQPLFAFEWRDPEMGISGQLTWTRLPQGFKNSPTLFNEALHRDLADFRIQHPDLILLQYVDDLLLAATSEQDCQRGTRALLQTLGNLGYRASAKKAQICQKQVKYLGYLLKEGQRWLTEARKETVMGQPTPKTPRQLREFLGTAGFCRLWIPGFAEMAAPLYPLTKPGTLFNWGPDQQKAYQEIKQALLTAPALGLPDLTKPFELFVDEKQGYAKGVLTQKLGPWRRPVAYLSKKLDPVAAGWPPCLRMVAAIAVLTKDAGKLTMGQPLVILAPHAVEALVKQPPDRWLSNARMTHYQAMLLDTDRVQFGPVVALNPATLLPLPEKEAPHDCLEILAETHGTRPDLTDQPIPDADYTWYTDGSSFLQEGQRRAGAAVTTETEVIWARALPAGTSAQRAELIALTQALKMAEGKKLNVYTDSRYAFATAHVHGEIYRRRGWLTSEGREIKNKNEILALLKALFLPKRLSIIHCPGHQKGNSAEARGNRMADQAAREAAMKAVLETSTLLAGKRTADGSEFEKRTADGSEFESPKKKAKVE

SEQ ID NO: 985 - protein, 2096 aa, synthetic construct
MPAAKRVKLDGGDKKYSIGLDIGTNSVGWAVITDEYKVPSKKFKVLGNTDRHSIKKNLIGALLFDSGETAEATRLKRTARRRYTRRKNRICYLQEIFSNEMAKVDDSFFHRLEESFLVEEDKKHERHPIFGNIVDEVAYHEKYPTIYHLRKKLVDSTDKADLRLIYLALAHMIKFRGHFLIEGDLNPDNSDVDKLFIQLVQTYNQLFEENPINASGVDAKAILSARLSKSRRLENLIAQLPGEKKNGLFGNLIALSLGLTPNFKSNFDLAEDAKLQLSKDTYDDDLDNLLAQIGDQYADLFLAAKNLSDAILLSDILRVNTEITKAPLSASMIKRYDEHHQDLTLLKALVRQQLPEKYKEIFFDQSKNGYAGYIDGGASQEEFYKFIKPILEKMDGTEELLVKLNREDLLRKQRTFDNGSIPHQIHLGELHAILRRQEDFYPFLKDNREKIEKILTFRIPYYVGPLARGNSRFAWMTRKSEETITPWNFEEVVDKGASAQSFIERMTNFDKNLPNEKVLPKHSLLYEYFTVYNELTKVKYVTEGMRKPAFLSGEQKKAIVDLLFKTNRKVTVKQLKEDYFKKIECFDSVEISGVEDRFNASLGTYHDLLKIIKDKDFLDNEENEDILEDIVLTLTLFEDREMIEERLKTYAHLFDDKVMKQLKRRRYTGWGRLSRKLINGIRDKQSGKTILDFLKSDGFANRNFMQLIHDDSLTFKEDIQKAQVSGQGDSLHEHIANLAGSPAIKKGILQTVKVVDELVKVMGRHKPENIVIEMARENQTTQKGQKNSRERMKRIEEGIKELGSQILKEHPVENTQLQNEKLYLYYLQNGRDMYVDQELDINRLSDYDVDHIVPQSFLKDDSIDNKVLTRSDKARGKSDNVPSEEVVKKMKNYWRQLLNAKLITQRKFDNLTKAERGGLSELDKAGFIKRQLVETRQITKHVAQILDSRMNTKYDENDKLIREVKVITLKSKLVSDFRKDFQFYKVREINNYHHAHDAYLNAVVGTALIKKYPKLESEFVYGDYKVYDVRKMIAKSEQEIGKATAKYFFYSNIMNFFKTEITLANGEIRKRPLIETNGETGEIVWDKGRDFATVRKVLSMPQVNIVKKTEVQTGGFSKESILPKRNSDKLIARKKDWDPKKYGGFDSPTVAYSVLVVAKVEKGKSKKLKSVKELLGITIMERSSFEKNPIDFLEAKGYKEVKKDLIIKLPKYSLFELENGRKRMLASAGELQKGNELALPSKYVNFLYLASHYEKLKGSPEDNEQKQLFVEQHKHYLDEIIEQISEFSKRVILADANLDKVLSAYNKHRDKPIREQAENIIHLFTLTNLGAPAAFKYFDTTIDRKRYTSTKEVLDATLIHQSITGLYETRIDLSQLGGDGGGGGEAAAKPAPGGTLNIEDEYRLHETSKEPDVPLGSTWLSDFPQAWAETGGMGLAVRQAPLIIPLKATSTPVSIKQYPMSQEARLGIKPHIQRLLDQGILVPCQSPWNTPLLPVKKPGTNDYRPVQDLREVNKRVEDIHPTVPNPYNLLSGLPPSHQWYTVLDLKDAFFCLRLHPTSQPLFAFEWRDPEMGISGQLTWTRLPQGFKNSPTLFNEALHRDLADFRIQHPDLILLQYVDDLLLAATSEQDCQRGTRALLQTLGNLGYRASAKKAQICQKQVKYLGYLLKEGQRWLTEARKETVMGQPTPKTPRQLREFLGTAGFCRLWIPGFAEMAAPLYPLTKPGTLFNWGPDQQKAYQEIKQALLTAPALGLPDLTKPFELFVDEKQGYAKGVLTQKLGPWRRPVAYLSKKLDPVAAGWPPCLRMVAAIAVLTKDAGKLTMGQPLVILAPHAVEALVKQPPDRWLSNARMTHYQAMLLDTDRVQFGPVVALNPATLLPLPEKEAPHDCLEILAETHGTRPDLTDQPIPDADYTWYTDGSSFLQEGQRRAGAAVTTETEVIWARALPAGTSAQRAELIALTQALKMAEGKKLNVYTDSRYAFATAHVHGEIYRRRGWLTSEGREIKNKNEILALLKALFLPKRLSIIHCPGHQKGNSAEARGNRMADQAAREAAMKAVLETSTLLAGKRTADGSEFEKRTADGSEFESPKKKAKVE

SEQ ID NO: 986 - protein, 2094 aa, synthetic construct
MPAAKRVKLDGGDKKYSIGLDIGTNSVGWAVITDEYKVPSKKFKVLGNTDRHSIKKNLIGALLFDSGETAEATRLKRTARRRYTRRKNRICYLQEIFSNEMAKVDDSFFHRLEESFLVEEDKKHERHPIFGNIVDEVAYHEKYPTIYHLRKKLVDSTDKADLRLIYLALAHMIKFRGHFLIEGDLNPDNSDVDKLFIQLVQTYNQLFEENPINASGVDAKAILSARLSKSRRLENLIAQLPGEKKNGLFGNLIALSLGLTPNFKSNFDLAEDAKLQLSKDTYDDDLDNLLAQIGDQYADLFLAAKNLSDAILLSDILRVNTEITKAPLSASMIKRYDEHHQDLTLLKALVRQQLPEKYKEIFFDQSKNGYAGYIDGGASQEEFYKFIKPILEKMDGTEELLVKLNREDLLRKQRTFDNGSIPHQIHLGELHAILRRQEDFYPFLKDNREKIEKILTFRIPYYVGPLARGNSRFAWMTRKSEETITPWNFEEVVDKGASAQSFIERMTNFDKNLPNEKVLPKHSLLYEYFTVYNELTKVKYVTEGMRKPAFLSGEQKKAIVDLLFKTNRKVTVKQLKEDYFKKIECFDSVEISGVEDRFNASLGTYHDLLKIIKDKDFLDNEENEDILEDIVLTLTLFEDREMIEERLKTYAHLFDDKVMKQLKRRRYTGWGRLSRKLINGIRDKQSGKTILDFLKSDGFANRNFMQLIHDDSLTFKEDIQKAQVSGQGDSLHEHIANLAGSPAIKKGILQTVKVVDELVKVMGRHKPENIVIEMARENQTTQKGQKNSRERMKRIEEGIKELGSQILKEHPVENTQLQNEKLYLYYLQNGRDMYVDQELDINRLSDYDVDHIVPQSFLKDDSIDNKVLTRSDKARGKSDNVPSEEVVKKMKNYWRQLLNAKLITQRKFDNLTKAERGGLSELDKAGFIKRQLVETRQITKHVAQILDSRMNTKYDENDKLIREVKVITLKSKLVSDFRKDFQFYKVREINNYHHAHDAYLNAVVGTALIKKYPKLESEFVYGDYKVYDVRKMIAKSEQEIGKATAKYFFYSNIMNFFKTEITLANGEIRKRPLIETNGETGEIVWDKGRDFATVRKVLSMPQVNIVKKTEVQTGGFSKESILPKRNSDKLIARKKDWDPKKYGGFDSPTVAYSVLVVAKVEKGKSKKLKSVKELLGITIMERSSFEKNPIDFLEAKGYKEVKKDLIIKLPKYSLFELENGRKRMLASAGELQKGNELALPSKYVNFLYLASHYEKLKGSPEDNEQKQLFVEQHKHYLDEIIEQISEFSKRVILADANLDKVLSAYNKHRDKPIREQAENIIHLFTLTNLGAPAAFKYFDTTIDRKRYTSTKEVLDATLIHQSITGLYETRIDLSQLGGDGGGGSPAPGSSGGTLNIEDEYRLHETSKEPDVPLGSTWLSDFPQAWAETGGMGLAVRQAPLIIPLKATSTPVSIKQYPMSQEARLGIKPHIQRLLDQGILVPCQSPWNTPLLPVKKPGTNDYRPVQDLREVNKRVEDIHPTVPNPYNLLSGLPPSHQWYTVLDLKDAFFCLRLHPTSQPLFAFEWRDPEMGISGQLTWTRLPQGFKNSPTLFNEALHRDLADFRIQHPDLILLQYVDDLLLAATSEQDCQRGTRALLQTLGNLGYRASAKKAQICQKQVKYLGYLLKEGQRWLTEARKETVMGQPTPKTPRQLREFLGTAGFCRLWIPGFAEMAAPLYPLTKPGTLFNWGPDQQKAYQEIKQALLTAPALGLPDLTKPFELFVDEKQGYAKGVLTQKLGPWRRPVAYLSKKLDPVAAGWPPCLRMVAAIAVLTKDAGKLTMGQPLVILAPHAVEALVKQPPDRWLSNARMTHYQAMLLDTDRVQFGPVVALNPATLLPLPEKEAPHDCLEILAETHGTRPDLTDQPIPDADYTWYTDGSSFLQEGQRRAGAAVTTETEVIWARALPAGTSAQRAELIALTQALKMAEGKKLNVYTDSRYAFATAHVHGEIYRRRGWLTSEGREIKNKNEILALLKALFLPKRLSIIHCPGHQKGNSAEARGNRMADQAAREAAMKAVLETSTLLAGKRTADGSEFEKRTADGSEFESPKKKAKVE

SEQ ID NO: 987 - protein, 2094 aa, synthetic construct
MPAAKRVKLDGGDKKYSIGLDIGTNSVGWAVITDEYKVPSKKFKVLGNTDRHSIKKNLIGALLFDSGETAEATRLKRTARRRYTRRKNRICYLQEIFSNEMAKVDDSFFHRLEESFLVEEDKKHERHPIFGNIVDEVAYHEKYPTIYHLRKKLVDSTDKADLRLIYLALAHMIKFRGHFLIEGDLNPDNSDVDKLFIQLVQTYNQLFEENPINASGVDAKAILSARLSKSRRLENLIAQLPGEKKNGLFGNLIALSLGLTPNFKSNFDLAEDAKLQLSKDTYDDDLDNLLAQIGDQYADLFLAAKNLSDAILLSDILRVNTEITKAPLSASMIKRYDEHHQDLTLLKALVRQQLPEKYKEIFFDQSKNGYAGYIDGGASQEEFYKFIKPILEKMDGTEELLVKLNREDLLRKQRTFDNGSIPHQIHLGELHAILRRQEDFYPFLKDNREKIEKILTFRIPYYVGPLARGNSRFAWMTRKSEETITPWNFEEVVDKGASAQSFIERMTNFDKNLPNEKVLPKHSLLYEYFTVYNELTKVKYVTEGMRKPAFLSGEQKKAIVDLLFKTNRKVTVKQLKEDYFKKIECFDSVEISGVEDRFNASLGTYHDLLKIIKDKDFLDNEENEDILEDIVLTLTLFEDREMIEERLKTYAHLFDDKVMKQLKRRRYTGWGRLSRKLINGIRDKQSGKTILDFLKSDGFANRNFMQLIHDDSLTFKEDIQKAQVSGQGDSLHEHIANLAGSPAIKKGILQTVKVVDELVKVMGRHKPENIVIEMARENQTTQKGQKNSRERMKRIEEGIKELGSQILKEHPVENTQLQNEKLYLYYLQNGRDMYVDQELDINRLSDYDVDHIVPQSFLKDDSIDNKVLTRSDKARGKSDNVPSEEVVKKMKNYWRQLLNAKLITQRKFDNLTKAERGGLSELDKAGFIKRQLVETRQITKHVAQILDSRMNTKYDENDKLIREVKVITLKSKLVSDFRKDFQFYKVREINNYHHAHDAYLNAVVGTALIKKYPKLESEFVYGDYKVYDVRKMIAKSEQEIGKATAKYFFYSNIMNFFKTEITLANGEIRKRPLIETNGETGEIVWDKGRDFATVRKVLSMPQVNIVKKTEVQTGGFSKESILPKRNSDKLIARKKDWDPKKYGGFDSPTVAYSVLVVAKVEKGKSKKLKSVKELLGITIMERSSFEKNPIDFLEAKGYKEVKKDLIIKLPKYSLFELENGRKRMLASAGELQKGNELALPSKYVNFLYLASHYEKLKGSPEDNEQKQLFVEQHKHYLDEIIEQISEFSKRVILADANLDKVLSAYNKHRDKPIREQAENIIHLFTLTNLGAPAAFKYFDTTIDRKRYTSTKEVLDATLIHQSITGLYETRIDLSQLGGDGGGSSPAPGGSGGTLNIEDEYRLHETSKEPDVPLGSTWLSDFPQAWAETGGMGLAVRQAPLIIPLKATSTPVSIKQYPMSQEARLGIKPHIQRLLDQGILVPCQSPWNTPLLPVKKPGTNDYRPVQDLREVNKRVEDIHPTVPNPYNLLSGLPPSHQWYTVLDLKDAFFCLRLHPTSQPLFAFEWRDPEMGISGQLTWTRLPQGFKNSPTLFNEALHRDLADFRIQHPDLILLQYVDDLLLAATSEQDCQRGTRALLQTLGNLGYRASAKKAQICQKQVKYLGYLLKEGQRWLTEARKETVMGQPTPKTPRQLREFLGTAGFCRLWIPGFAEMAAPLYPLTKPGTLFNWGPDQQKAYQEIKQALLTAPALGLPDLTKPFELFVDEKQGYAKGVLTQKLGPWRRPVAYLSKKLDPVAAGWPPCLRMVAAIAVLTKDAGKLTMGQPLVILAPHAVEALVKQPPDRWLSNARMTHYQAMLLDTDRVQFGPVVALNPATLLPLPEKEAPHDCLEILAETHGTRPDLTDQPIPDADYTWYTDGSSFLQEGQRRAGAAVTTETEVIWARALPAGTSAQRAELIALTQALKMAEGKKLNVYTDSRYAFATAHVHGEIYRRRGWLTSEGREIKNKNEILALLKALFLPKRLSIIHCPGHQKGNSAEARGNRMADQAAREAAMKAVLETSTLLAGKRTADGSEFEKRTADGSEFESPKKKAKVE

SEQ ID NO: 988 - protein, 2090 aa, synthetic construct
MPAAKRVKLDGGDKKYSIGLDIGTNSVGWAVITDEYKVPSKKFKVLGNTDRHSIKKNLIGALLFDSGETAEATRLKRTARRRYTRRKNRICYLQEIFSNEMAKVDDSFFHRLEESFLVEEDKKHERHPIFGNIVDEVAYHEKYPTIYHLRKKLVDSTDKADLRLIYLALAHMIKFRGHFLIEGDLNPDNSDVDKLFIQLVQTYNQLFEENPINASGVDAKAILSARLSKSRRLENLIAQLPGEKKNGLFGNLIALSLGLTPNFKSNFDLAEDAKLQLSKDTYDDDLDNLLAQIGDQYADLFLAAKNLSDAILLSDILRVNTEITKAPLSASMIKRYDEHHQDLTLLKALVRQQLPEKYKEIFFDQSKNGYAGYIDGGASQEEFYKFIKPILEKMDGTEELLVKLNREDLLRKQRTFDNGSIPHQIHLGELHAILRRQEDFYPFLKDNREKIEKILTFRIPYYVGPLARGNSRFAWMTRKSEETITPWNFEEVVDKGASAQSFIERMTNFDKNLPNEKVLPKHSLLYEYFTVYNELTKVKYVTEGMRKPAFLSGEQKKAIVDLLFKTNRKVTVKQLKEDYFKKIECFDSVEISGVEDRFNASLGTYHDLLKIIKDKDFLDNEENEDILEDIVLTLTLFEDREMIEERLKTYAHLFDDKVMKQLKRRRYTGWGRLSRKLINGIRDKQSGKTILDFLKSDGFANRNFMQLIHDDSLTFKEDIQKAQVSGQGDSLHEHIANLAGSPAIKKGILQTVKVVDELVKVMGRHKPENIVIEMARENQTTQKGQKNSRERMKRIEEGIKELGSQILKEHPVENTQLQNEKLYLYYLQNGRDMYVDQELDINRLSDYDVDHIVPQSFLKDDSIDNKVLTRSDKARGKSDNVPSEEVVKKMKNYWRQLLNAKLITQRKFDNLTKAERGGLSELDKAGFIKRQLVETRQITKHVAQILDSRMNTKYDENDKLIREVKVITLKSKLVSDFRKDFQFYKVREINNYHHAHDAYLNAVVGTALIKKYPKLESEFVYGDYKVYDVRKMIAKSEQEIGKATAKYFFYSNIMNFFKTEITLANGEIRKRPLIETNGETGEIVWDKGRDFATVRKVLSMPQVNIVKKTEVQTGGFSKESILPKRNSDKLIARKKDWDPKKYGGFDSPTVAYSVLVVAKVEKGKSKKLKSVKELLGITIMERSSFEKNPIDFLEAKGYKEVKKDLIIKLPKYSLFELENGRKRMLASAGELQKGNELALPSKYVNFLYLASHYEKLKGSPEDNEQKQLFVEQHKHYLDEIIEQISEFSKRVILADANLDKVLSAYNKHRDKPIREQAENIIHLFTLTNLGAPAAFKYFDTTIDRKRYTSTKEVLDATLIHQSITGLYETRIDLSQLGGDGGEAAAKGGTLNIEDEYRLHETSKEPDVPLGSTWLSDFPQAWAETGGMGLAVRQAPLIIPLKATSTPVSIKQYPMSQEARLGIKPHIQRLLDQGILVPCQSPWNTPLLPVKKPGTNDYRPVQDLREVNKRVEDIHPTVPNPYNLLSGLPPSHQWYTVLDLKDAFFCLRLHPTSQPLFAFEWRDPEMGISGQLTWTRLPQGFKNSPTLFNEALHRDLADFRIQHPDLILLQYVDDLLLAATSEQDCQRGTRALLQTLGNLGYRASAKKAQICQKQVKYLGYLLKEGQRWLTEARKETVMGQPTPKTPRQLREFLGTAGFCRLWIPGFAEMAAPLYPLTKPGTLFNWGPDQQKAYQEIKQALLTAPALGLPDLTKPFELFVDEKQGYAKGVLTQKLGPWRRPVAYLSKKLDPVAAGWPPCLRMVAAIAVLTKDAGKLTMGQPLVILAPHAVEALVKQPPDRWLSNARMTHYQAMLLDTDRVQFGPVVALNPATLLPLPEKEAPHDCLEILAETHGTRPDLTDQPIPDADYTWYTDGSSFLQEGQRRAGAAVTTETEVIWARALPAGTSAQRAELIALTQALKMAEGKKLNVYTDSRYAFATAHVHGEIYRRRGWLTSEGREIKNKNEILALLKALFLPKRLSIIHCPGHQKGNSAEARGNRMADQAAREAAMKAVLETSTLLAGKRTADGSEFEKRTADGSEFESPKKKAKVE

SEQ ID NO: 989 - protein, 2094 aa, synthetic construct
MPAAKRVKLDGGDKKYSIGLDIGTNSVGWAVITDEYKVPSKKFKVLGNTDRHSIKKNLIGALLFDSGETAEATRLKRTARRRYTRRKNRICYLQEIFSNEMAKVDDSFFHRLEESFLVEEDKKHERHPIFGNIVDEVAYHEKYPTIYHLRKKLVDSTDKADLRLIYLALAHMIKFRGHFLIEGDLNPDNSDVDKLFIQLVQTYNQLFEENPINASGVDAKAILSARLSKSRRLENLIAQLPGEKKNGLFGNLIALSLGLTPNFKSNFDLAEDAKLQLSKDTYDDDLDNLLAQIGDQYADLFLAAKNLSDAILLSDILRVNTEITKAPLSASMIKRYDEHHQDLTLLKALVRQQLPEKYKEIFFDQSKNGYAGYIDGGASQEEFYKFIKPILEKMDGTEELLVKLNREDLLRKQRTFDNGSIPHQIHLGELHAILRRQEDFYPFLKDNREKIEKILTFRIPYYVGPLARGNSRFAWMTRKSEETITPWNFEEVVDKGASAQSFIERMTNFDKNLPNEKVLPKHSLLYEYFTVYNELTKVKYVTEGMRKPAFLSGEQKKAIVDLLFKTNRKVTVKQLKEDYFKKIECFDSVEISGVEDRFNASLGTYHDLLKIIKDKDFLDNEENEDILEDIVLTLTLFEDREMIEERLKTYAHLFDDKVMKQLKRRRYTGWGRLSRKLINGIRDKQSGKTILDFLKSDGFANRNFMQLIHDDSLTFKEDIQKAQVSGQGDSLHEHIANLAGSPAIKKGILQTVKVVDELVKVMGRHKPENIVIEMARENQTTQKGQKNSRERMKRIEEGIKELGSQILKEHPVENTQLQNEKLYLYYLQNGRDMYVDQELDINRLSDYDVDHIVPQSFLKDDSIDNKVLTRSDKARGKSDNVPSEEVVKKMKNYWRQLLNAKLITQRKFDNLTKAERGGLSELDKAGFIKRQLVETRQITKHVAQILDSRMNTKYDENDKLIREVKVITLKSKLVSDFRKDFQFYKVREINNYHHAHDAYLNAVVGTALIKKYPKLESEFVYGDYKVYDVRKMIAKSEQEIGKATAKYFFYSNIMNFFKTEITLANGEIRKRPLIETNGETGEIVWDKGRDFATVRKVLSMPQVNIVKKTEVQTGGFSKESILPKRNSDKLIARKKDWDPKKYGGFDSPTVAYSVLVVAKVEKGKSKKLKSVKELLGITIMERSSFEKNPIDFLEAKGYKEVKKDLIIKLPKYSLFELENGRKRMLASAGELQKGNELALPSKYVNFLYLASHYEKLKGSPEDNEQKQLFVEQHKHYLDEIIEQISEFSKRVILADANLDKVLSAYNKHRDKPIREQAENIIHLFTLTNLGAPAAFKYFDTTIDRKRYTSTKEVLDATLIHQSITGLYETRIDLSQLGGDGGGGGGGSGSSGGTLNIEDEYRLHETSKEPDVPLGSTWLSDFPQAWAETGGMGLAVRQAPLIIPLKATSTPVSIKQYPMSQEARLGIKPHIQRLLDQGILVPCQSPWNTPLLPVKKPGTNDYRPVQDLREVNKRVEDIHPTVPNPYNLLSGLPPSHQWYTVLDLKDAFFCLRLHPTSQPLFAFEWRDPEMGISGQLTWTRLPQGFKNSPTLFNEALHRDLADFRIQHPDLILLQYVDDLLLAATSEQDCQRGTRALLQTLGNLGYRASAKKAQICQKQVKYLGYLLKEGQRWLTEARKETVMGQPTPKTPRQLREFLGTAGFCRLWIPGFAEMAAPLYPLTKPGTLFNWGPDQQKAYQEIKQALLTAPALGLPDLTKPFELFVDEKQGYAKGVLTQKLGPWRRPVAYLSKKLDPVAAGWPPCLRMVAAIAVLTKDAGKLTMGQPLVILAPHAVEALVKQPPDRWLSNARMTHYQAMLLDTDRVQFGPVVALNPATLLPLPEKEAPHDCLEILAETHGTRPDLTDQPIPDADYTWYTDGSSFLQEGQRRAGAAVTTETEVIWARALPAGTSAQRAELIALTQALKMAEGKKLNVYTDSRYAFATAHVHGEIYRRRGWLTSEGREIKNKNEILALLKALFLPKRLSIIHCPGHQKGNSAEARGNRMADQAAREAAMKAVLETSTLLAGKRTADGSEFEKRTADGSEFESPKKKAKVE

SEQ ID NO: 990 - protein, 2091 aa, synthetic construct
MPAAKRVKLDGGDKKYSIGLDIGTNSVGWAVITDEYKVPSKKFKVLGNTDRHSIKKNLIGALLFDSGETAEATRLKRTARRRYTRRKNRICYLQEIFSNEMAKVDDSFFHRLEESFLVEEDKKHERHPIFGNIVDEVAYHEKYPTIYHLRKKLVDSTDKADLRLIYLALAHMIKFRGHFLIEGDLNPDNSDVDKLFIQLVQTYNQLFEENPINASGVDAKAILSARLSKSRRLENLIAQLPGEKKNGLFGNLIALSLGLTPNFKSNFDLAEDAKLQLSKDTYDDDLDNLLAQIGDQYADLFLAAKNLSDAILLSDILRVNTEITKAPLSASMIKRYDEHHQDLTLLKALVRQQLPEKYKEIFFDQSKNGYAGYIDGGASQEEFYKFIKPILEKMDGTEELLVKLNREDLLRKQRTFDNGSIPHQIHLGELHAILRRQEDFYPFLKDNREKIEKILTFRIPYYVGPLARGNSRFAWMTRKSEETITPWNFEEVVDKGASAQSFIERMTNFDKNLPNEKVLPKHSLLYEYFTVYNELTKVKYVTEGMRKPAFLSGEQKKAIVDLLFKTNRKVTVKQLKEDYFKKIECFDSVEISGVEDRFNASLGTYHDLLKIIKDKDFLDNEENEDILEDIVLTLTLFEDREMIEERLKTYAHLFDDKVMKQLKRRRYTGWGRLSRKLINGIRDKQSGKTILDFLKSDGFANRNFMQLIHDDSLTFKEDIQKAQVSGQGDSLHEHIANLAGSPAIKKGILQTVKVVDELVKVMGRHKPENIVIEMARENQTTQKGQKNSRERMKRIEEGIKELGSQILKEHPVENTQLQNEKLYLYYLQNGRDMYVDQELDINRLSDYDVDHIVPQSFLKDDSIDNKVLTRSDKARGKSDNVPSEEVVKKMKNYWRQLLNAKLITQRKFDNLTKAERGGLSELDKAGFIKRQLVETRQITKHVAQILDSRMNTKYDENDKLIREVKVITLKSKLVSDFRKDFQFYKVREINNYHHAHDAYLNAVVGTALIKKYPKLESEFVYGDYKVYDVRKMIAKSEQEIGKATAKYFFYSNIMNFFKTEITLANGEIRKRPLIETNGETGEIVWDKGRDFATVRKVLSMPQVNIVKKTEVQTGGFSKESILPKRNSDKLIARKKDWDPKKYGGFDSPTVAYSVLVVAKVEKGKSKKLKSVKELLGITIMERSSFEKNPIDFLEAKGYKEVKKDLIIKLPKYSLFELENGRKRMLASAGELQKGNELALPSKYVNFLYLASHYEKLKGSPEDNEQKQLFVEQHKHYLDEIIEQISEFSKRVILADANLDKVLSAYNKHRDKPIREQAENIIHLFTLTNLGAPAAFKYFDTTIDRKRYTSTKEVLDATLIHQSITGLYETRIDLSQLGGDGGPAPGSSGGTLNIEDEYRLHETSKEPDVPLGSTWLSDFPQAWAETGGMGLAVRQAPLIIPLKATSTPVSIKQYPMSQEARLGIKPHIQRLLDQGILVPCQSPWNTPLLPVKKPGTNDYRPVQDLREVNKRVEDIHPTVPNPYNLLSGLPPSHQWYTVLDLKDAFFCLRLHPTSQPLFAFEWRDPEMGISGQLTWTRLPQGFKNSPTLFNEALHRDLADFRIQHPDLILLQYVDDLLLAATSEQDCQRGTRALLQTLGNLGYRASAKKAQICQKQVKYLGYLLKEGQRWLTEARKETVMGQPTPKTPRQLREFLGTAGFCRLWIPGFAEMAAPLYPLTKPGTLFNWGPDQQKAYQEIKQALLTAPALGLPDLTKPFELFVDEKQGYAKGVLTQKLGPWRRPVAYLSKKLDPVAAGWPPCLRMVAAIAVLTKDAGKLTMGQPLVILAPHAVEALVKQPPDRWLSNARMTHYQAMLLDTDRVQFGPVVALNPATLLPLPEKEAPHDCLEILAETHGTRPDLTDQPIPDADYTWYTDGSSFLQEGQRRAGAAVTTETEVIWARALPAGTSAQRAELIALTQALKMAEGKKLNVYTDSRYAFATAHVHGEIYRRRGWLTSEGREIKNKNEILALLKALFLPKRLSIIHCPGHQKGNSAEARGNRMADQAAREAAMKAVLETSTLLAGKRTADGSEFEKRTADGSEFESPKKKAKVE

SEQ ID NO: 991 - protein, 2095 aa, synthetic construct
MPAAKRVKLDGGDKKYSIGLDIGTNSVGWAVITDEYKVPSKKFKVLGNTDRHSIKKNLIGALLFDSGETAEATRLKRTARRRYTRRKNRICYLQEIFSNEMAKVDDSFFHRLEESFLVEEDKKHERHPIFGNIVDEVAYHEKYPTIYHLRKKLVDSTDKADLRLIYLALAHMIKFRGHFLIEGDLNPDNSDVDKLFIQLVQTYNQLFEENPINASGVDAKAILSARLSKSRRLENLIAQLPGEKKNGLFGNLIALSLGLTPNFKSNFDLAEDAKLQLSKDTYDDDLDNLLAQIGDQYADLFLAAKNLSDAILLSDILRVNTEITKAPLSASMIKRYDEHHQDLTLLKALVRQQLPEKYKEIFFDQSKNGYAGYIDGGASQEEFYKFIKPILEKMDGTEELLVKLNREDLLRKQRTFDNGSIPHQIHLGELHAILRRQEDFYPFLKDNREKIEKILTFRIPYYVGPLARGNSRFAWMTRKSEETITPWNFEEVVDKGASAQSFIERMTNFDKNLPNEKVLPKHSLLYEYFTVYNELTKVKYVTEGMRKPAFLSGEQKKAIVDLLFKTNRKVTVKQLKEDYFKKIECFDSVEISGVEDRFNASLGTYHDLLKIIKDKDFLDNEENEDILEDIVLTLTLFEDREMIEERLKTYAHLFDDKVMKQLKRRRYTGWGRLSRKLINGIRDKQSGKTILDFLKSDGFANRNFMQLIHDDSLTFKEDIQKAQVSGQGDSLHEHIANLAGSPAIKKGILQTVKVVDELVKVMGRHKPENIVIEMARENQTTQKGQKNSRERMKRIEEGIKELGSQILKEHPVENTQLQNEKLYLYYLQNGRDMYVDQELDINRLSDYDVDHIVPQSFLKDDSIDNKVLTRSDKARGKSDNVPSEEVVKKMKNYWRQLLNAKLITQRKFDNLTKAERGGLSELDKAGFIKRQLVETRQITKHVAQILDSRMNTKYDENDKLIREVKVITLKSKLVSDFRKDFQFYKVREINNYHHAHDAYLNAVVGTALIKKYPKLESEFVYGDYKVYDVRKMIAKSEQEIGKATAKYFFYSNIMNFFKTEITLANGEIRKRPLIETNGETGEIVWDKGRDFATVRKVLSMPQVNIVKKTEVQTGGFSKESILPKRNSDKLIARKKDWDPKKYGGFDSPTVAYSVLVVAKVEKGKSKKLKSVKELLGITIMERSSFEKNPIDFLEAKGYKEVKKDLIIKLPKYSLFELENGRKRMLASAGELQKGNELALPSKYVNFLYLASHYEKLKGSPEDNEQKQLFVEQHKHYLDEIIEQISEFSKRVILADANLDKVLSAYNKHRDKPIREQAENIIHLFTLTNLGAPAAFKYFDTTIDRKRYTSTKEVLDATLIHQSITGLYETRIDLSQLGGDGGEAAAKEAAAKGGTLNIEDEYRLHETSKEPDVPLGSTWLSDFPQAWAETGGMGLAVRQAPLIIPLKATSTPVSIKQYPMSQEARLGIKPHIQRLLDQGILVPCQSPWNTPLLPVKKPGTNDYRPVQDLREVNKRVEDIHPTVPNPYNLLSGLPPSHQWYTVLDLKDAFFCLRLHPTSQPLFAFEWRDPEMGISGQLTWTRLPQGFKNSPTLFNEALHRDLADFRIQHPDLILLQYVDDLLLAATSEQDCQRGTRALLQTLGNLGYRASAKKAQICQKQVKYLGYLLKEGQRWLTEARKETVMGQPTPKTPRQLREFLGTAGFCRLWIPGFAEMAAPLYPLTKPGTLFNWGPDQQKAYQEIKQALLTAPALGLPDLTKPFELFVDEKQGYAKGVLTQKLGPWRRPVAYLSKKLDPVAAGWPPCLRMVAAIAVLTKDAGKLTMGQPLVILAPHAVEALVKQPPDRWLSNARMTHYQAMLLDTDRVQFGPVVALNPATLLPLPEKEAPHDCLEILAETHGTRPDLTDQPIPDADYTWYTDGSSFLQEGQRRAGAAVTTETEVIWARALPAGTSAQRAELIALTQALKMAEGKKLNVYTDSRYAFATAHVHGEIYRRRGWLTSEGREIKNKNEILALLKALFLPKRLSIIHCPGHQKGNSAEARGNRMADQAAREAAMKAVLETSTLLAGKRTADGSEFEKRTADGSEFESPKKKAKVE

SEQ ID NO: 992 - protein, 2091 aa, synthetic construct
MPAAKRVKLDGGDKKYSIGLDIGTNSVGWAVITDEYKVPSKKFKVLGNTDRHSIKKNLIGALLFDSGETAEATRLKRTARRRYTRRKNRICYLQEIFSNEMAKVDDSFFHRLEESFLVEEDKKHERHPIFGNIVDEVAYHEKYPTIYHLRKKLVDSTDKADLRLIYLALAHMIKFRGHFLIEGDLNPDNSDVDKLFIQLVQTYNQLFEENPINASGVDAKAILSARLSKSRRLENLIAQLPGEKKNGLFGNLIALSLGLTPNFKSNFDLAEDAKLQLSKDTYDDDLDNLLAQIGDQYADLFLAAKNLSDAILLSDILRVNTEITKAPLSASMIKRYDEHHQDLTLLKALVRQQLPEKYKEIFFDQSKNGYAGYIDGGASQEEFYKFIKPILEKMDGTEELLVKLNREDLLRKQRTFDNGSIPHQIHLGELHAILRRQEDFYPFLKDNREKIEKILTFRIPYYVGPLARGNSRFAWMTRKSEETITPWNFEEVVDKGASAQSFIERMTNFDKNLPNEKVLPKHSLLYEYFTVYNELTKVKYVTEGMRKPAFLSGEQKKAIVDLLFKTNRKVTVKQLKEDYFKKIECFDSVEISGVEDRFNASLGTYHDLLKIIKDKDFLDNEENEDILEDIVLTLTLFEDREMIEERLKTYAHLFDDKVMKQLKRRRYTGWGRLSRKLINGIRDKQSGKTILDFLKSDGFANRNFMQLIHDDSLTFKEDIQKAQVSGQGDSLHEHIANLAGSPAIKKGILQTVKVVDELVKVMGRHKPENIVIEMARENQTTQKGQKNSRERMKRIEEGIKELGSQILKEHPVENTQLQNEKLYLYYLQNGRDMYVDQELDINRLSDYDVDHIVPQSFLKDDSIDNKVLTRSDKARGKSDNVPSEEVVKKMKNYWRQLLNAKLITQRKFDNLTKAERGGLSELDKAGFIKRQLVETRQITKHVAQILDSRMNTKYDENDKLIREVKVITLKSKLVSDFRKDFQFYKVREINNYHHAHDAYLNAVVGTALIKKYPKLESEFVYGDYKVYDVRKMIAKSEQEIGKATAKYFFYSNIMNFFKTEITLANGEIRKRPLIETNGETGEIVWDKGRDFATVRKVLSMPQVNIVKKTEVQTGGFSKESILPKRNSDKLIARKKDWDPKKYGGFDSPTVAYSVLVVAKVEKGKSKKLKSVKELLGITIMERSSFEKNPIDFLEAKGYKEVKKDLIIKLPKYSLFELENGRKRMLASAGELQKGNELALPSKYVNFLYLASHYEKLKGSPEDNEQKQLFVEQHKHYLDEIIEQISEFSKRVILADANLDKVLSAYNKHRDKPIREQAENIIHLFTLTNLGAPAAFKYFDTTIDRKRYTSTKEVLDATLIHQSITGLYETRIDLSQLGGDGGGSSGGGGGTLNIEDEYRLHETSKEPDVPLGSTWLSDFPQAWAETGGMGLAVRQAPLIIPLKATSTPVSIKQYPMSQEARLGIKPHIQRLLDQGILVPCQSPWNTPLLPVKKPGTNDYRPVQDLREVNKRVEDIHPTVPNPYNLLSGLPPSHQWYTVLDLKDAFFCLRLHPTSQPLFAFEWRDPEMGISGQLTWTRLPQGFKNSPTLFNEALHRDLADFRIQHPDLILLQYVDDLLLAATSEQDCQRGTRALLQTLGNLGYRASAKKAQICQKQVKYLGYLLKEGQRWLTEARKETVMGQPTPKTPRQLREFLGTAGFCRLWIPGFAEMAAPLYPLTKPGTLFNWGPDQQKAYQEIKQALLTAPALGLPDLTKPFELFVDEKQGYAKGVLTQKLGPWRRPVAYLSKKLDPVAAGWPPCLRMVAAIAVLTKDAGKLTMGQPLVILAPHAVEALVKQPPDRWLSNARMTHYQAMLLDTDRVQFGPVVALNPATLLPLPEKEAPHDCLEILAETHGTRPDLTDQPIPDADYTWYTDGSSFLQEGQRRAGAAVTTETEVIWARALPAGTSAQRAELIALTQALKMAEGKKLNVYTDSRYAFATAHVHGEIYRRRGWLTSEGREIKNKNEILALLKALFLPKRLSIIHCPGHQKGNSAEARGNRMADQAAREAAMKAVLETSTLLAGKRTADGSEFEKRTADGSEFESPKKKAKVE

SEQ ID NO: 993 - protein, 2093 aa, synthetic construct
MPAAKRVKLDGGDKKYSIGLDIGTNSVGWAVITDEYKVPSKKFKVLGNTDRHSIKKNLIGALLFDSGETAEATRLKRTARRRYTRRKNRICYLQEIFSNEMAKVDDSFFHRLEESFLVEEDKKHERHPIFGNIVDEVAYHEKYPTIYHLRKKLVDSTDKADLRLIYLALAHMIKFRGHFLIEGDLNPDNSDVDKLFIQLVQTYNQLFEENPINASGVDAKAILSARLSKSRRLENLIAQLPGEKKNGLFGNLIALSLGLTPNFKSNFDLAEDAKLQLSKDTYDDDLDNLLAQIGDQYADLFLAAKNLSDAILLSDILRVNTEITKAPLSASMIKRYDEHHQDLTLLKALVRQQLPEKYKEIFFDQSKNGYAGYIDGGASQEEFYKFIKPILEKMDGTEELLVKLNREDLLRKQRTFDNGSIPHQIHLGELHAILRRQEDFYPFLKDNREKIEKILTFRIPYYVGPLARGNSRFAWMTRKSEETITPWNFEEVVDKGASAQSFIERMTNFDKNLPNEKVLPKHSLLYEYFTVYNELTKVKYVTEGMRKPAFLSGEQKKAIVDLLFKTNRKVTVKQLKEDYFKKIECFDSVEISGVEDRFNASLGTYHDLLKIIKDKDFLDNEENEDILEDIVLTLTLFEDREMIEERLKTYAHLFDDKVMKQLKRRRYTGWGRLSRKLINGIRDKQSGKTILDFLKSDGFANRNFMQLIHDDSLTFKEDIQKAQVSGQGDSLHEHIANLAGSPAIKKGILQTVKVVDELVKVMGRHKPENIVIEMARENQTTQKGQKNSRERMKRIEEGIKELGSQILKEHPVENTQLQNEKLYLYYLQNGRDMYVDQELDINRLSDYDVDHIVPQSFLKDDSIDNKVLTRSDKARGKSDNVPSEEVVKKMKNYWRQLLNAKLITQRKFDNLTKAERGGLSELDKAGFIKRQLVETRQITKHVAQILDSRMNTKYDENDKLIREVKVITLKSKLVSDFRKDFQFYKVREINNYHHAHDAYLNAVVGTALIKKYPKLESEFVYGDYKVYDVRKMIAKSEQEIGKATAKYFFYSNIMNFFKTEITLANGEIRKRPLIETNGETGEIVWDKGRDFATVRKVLSMPQVNIVKKTEVQTGGFSKESILPKRNSDKLIARKKDWDPKKYGGFDSPTVAYSVLVVAKVEKGKSKKLKSVKELLGITIMERSSFEKNPIDFLEAKGYKEVKKDLIIKLPKYSLFELENGRKRMLASAGELQKGNELALPSKYVNFLYLASHYEKLKGSPEDNEQKQLFVEQHKHYLDEIIEQISEFSKRVILADANLDKVLSAYNKHRDKPIREQAENIIHLFTLTNLGAPAAFKYFDTTIDRKRYTSTKEVLDATLIHQSITGLYETRIDLSQLGGDGGGGSEAAAKGGTLNIEDEYRLHETSKEPDVPLGSTWLSDFPQAWAETGGMGLAVRQAPLIIPLKATSTPVSIKQYPMSQEARLGIKPHIQRLLDQGILVPCQSPWNTPLLPVKKPGTNDYRPVQDLREVNKRVEDIHPTVPNPYNLLSGLPPSHQWYTVLDLKDAFFCLRLHPTSQPLFAFEWRDPEMGISGQLTWTRLPQGFKNSPTLFNEALHRDLADFRIQHPDLILLQYVDDLLLAATSEQDCQRGTRALLQTLGNLGYRASAKKAQICQKQVKYLGYLLKEGQRWLTEARKETVMGQPTPKTPRQLREFLGTAGFCRLWIPGFAEMAAPLYPLTKPGTLFNWGPDQQKAYQEIKQALLTAPALGLPDLTKPFELFVDEKQGYAKGVLTQKLGPWRRPVAYLSKKLDPVAAGWPPCLRMVAAIAVLTKDAGKLTMGQPLVILAPHAVEALVKQPPDRWLSNARMTHYQAMLLDTDRVQFGPVVALNPATLLPLPEKEAPHDCLEILAETHGTRPDLTDQPIPDADYTWYTDGSSFLQEGQRRAGAAVTTETEVIWARALPAGTSAQRAELIALTQALKMAEGKKLNVYTDSRYAFATAHVHGEIYRRRGWLTSEGREIKNKNEILALLKALFLPKRLSIIHCPGHQKGNSAEARGNRMADQAAREAAMKAVLETSTLLAGKRTADGSEFEKRTADGSEFESPKKKAKVE

SEQ ID NO: 994 - protein, 2100 aa, synthetic construct
MPAAKRVKLDGGDKKYSIGLDIGTNSVGWAVITDEYKVPSKKFKVLGNTDRHSIKKNLIGALLFDSGETAEATRLKRTARRRYTRRKNRICYLQEIFSNEMAKVDDSFFHRLEESFLVEEDKKHERHPIFGNIVDEVAYHEKYPTIYHLRKKLVDSTDKADLRLIYLALAHMIKFRGHFLIEGDLNPDNSDVDKLFIQLVQTYNQLFEENPINASGVDAKAILSARLSKSRRLENLIAQLPGEKKNGLFGNLIALSLGLTPNFKSNFDLAEDAKLQLSKDTYDDDLDNLLAQIGDQYADLFLAAKNLSDAILLSDILRVNTEITKAPLSASMIKRYDEHHQDLTLLKALVRQQLPEKYKEIFFDQSKNGYAGYIDGGASQEEFYKFIKPILEKMDGTEELLVKLNREDLLRKQRTFDNGSIPHQIHLGELHAILRRQEDFYPFLKDNREKIEKILTFRIPYYVGPLARGNSRFAWMTRKSEETITPWNFEEVVDKGASAQSFIERMTNFDKNLPNEKVLPKHSLLYEYFTVYNELTKVKYVTEGMRKPAFLSGEQKKAIVDLLFKTNRKVTVKQLKEDYFKKIECFDSVEISGVEDRFNASLGTYHDLLKIIKDKDFLDNEENEDILEDIVLTLTLFEDREMIEERLKTYAHLFDDKVMKQLKRRRYTGWGRLSRKLINGIRDKQSGKTILDFLKSDGFANRNFMQLIHDDSLTFKEDIQKAQVSGQGDSLHEHIANLAGSPAIKKGILQTVKVVDELVKVMGRHKPENIVIEMARENQTTQKGQKNSRERMKRIEEGIKELGSQILKEHPVENTQLQNEKLYLYYLQNGRDMYVDQELDINRLSDYDVDHIVPQSFLKDDSIDNKVLTRSDKARGKSDNVPSEEVVKKMKNYWRQLLNAKLITQRKFDNLTKAERGGLSELDKAGFIKRQLVETRQITKHVAQILDSRMNTKYDENDKLIREVKVITLKSKLVSDFRKDFQFYKVREINNYHHAHDAYLNAVVGTALIKKYPKLESEFVYGDYKVYDVRKMIAKSEQEIGKATAKYFFYSNIMNFFKTEITLANGEIRKRPLIETNGETGEIVWDKGRDFATVRKVLSMPQVNIVKKTEVQTGGFSKESILPKRNSDKLIARKKDWDPKKYGGFDSPTVAYSVLVVAKVEKGKSKKLKSVKELLGITIMERSSFEKNPIDFLEAKGYKEVKKDLIIKLPKYSLFELENGRKRMLASAGELQKGNELALPSKYVNFLYLASHYEKLKGSPEDNEQKQLFVEQHKHYLDEIIEQISEFSKRVILADANLDKVLSAYNKHRDKPIREQAENIIHLFTLTNLGAPAAFKYFDTTIDRKRYTSTKEVLDATLIHQSITGLYETRIDLSQLGGDGGGGSGGSGGSGGSGGSGGTLNIEDEYRLHETSKEPDVPLGSTWLSDFPQAWAETGGMGLAVRQAPLIIPLKATSTPVSIKQYPMSQEARLGIKPHIQRLLDQGILVPCQSPWNTPLLPVKKPGTNDYRPVQDLREVNKRVEDIHPTVPNPYNLLSGLPPSHQWYTVLDLKDAFFCLRLHPTSQPLFAFEWRDPEMGISGQLTWTRLPQGFKNSPTLFNEALHRDLADFRIQHPDLILLQYVDDLLLAATSEQDCQRGTRALLQTLGNLGYRASAKKAQICQKQVKYLGYLLKEGQRWLTEARKETVMGQPTPKTPRQLREFLGTAGFCRLWIPGFAEMAAPLYPLTKPGTLFNWGPDQQKAYQEIKQALLTAPALGLPDLTKPFELFVDEKQGYAKGVLTQKLGPWRRPVAYLSKKLDPVAAGWPPCLRMVAAIAVLTKDAGKLTMGQPLVILAPHAVEALVKQPPDRWLSNARMTHYQAMLLDTDRVQFGPVVALNPATLLPLPEKEAPHDCLEILAETHGTRPDLTDQPIPDADYTWYTDGSSFLQEGQRRAGAAVTTETEVIWARALPAGTSAQRAELIALTQALKMAEGKKLNVYTDSRYAFATAHVHGEIYRRRGWLTSEGREIKNKNEILALLKALFLPKRLSIIHCPGHQKGNSAEARGNRMADQAAREAAMKAVLETSTLLAGKRTADGSEFEKRTADGSEFESPKKKAKVE

SEQ ID NO: 995 - protein, 2094 aa, synthetic construct
MPAAKRVKLDGGDKKYSIGLDIGTNSVGWAVITDEYKVPSKKFKVLGNTDRHSIKKNLIGALLFDSGETAEATRLKRTARRRYTRRKNRICYLQEIFSNEMAKVDDSFFHRLEESFLVEEDKKHERHPIFGNIVDEVAYHEKYPTIYHLRKKLVDSTDKADLRLIYLALAHMIKFRGHFLIEGDLNPDNSDVDKLFIQLVQTYNQLFEENPINASGVDAKAILSARLSKSRRLENLIAQLPGEKKNGLFGNLIALSLGLTPNFKSNFDLAEDAKLQLSKDTYDDDLDNLLAQIGDQYADLFLAAKNLSDAILLSDILRVNTEITKAPLSASMIKRYDEHHQDLTLLKALVRQQLPEKYKEIFFDQSKNGYAGYIDGGASQEEFYKFIKPILEKMDGTEELLVKLNREDLLRKQRTFDNGSIPHQIHLGELHAILRRQEDFYPFLKDNREKIEKILTFRIPYYVGPLARGNSRFAWMTRKSEETITPWNFEEVVDKGASAQSFIERMTNFDKNLPNEKVLPKHSLLYEYFTVYNELTKVKYVTEGMRKPAFLSGEQKKAIVDLLFKTNRKVTVKQLKEDYFKKIECFDSVEISGVEDRFNASLGTYHDLLKIIKDKDFLDNEENEDILEDIVLTLTLFEDREMIEERLKTYAHLFDDKVMKQLKRRRYTGWGRLSRKLINGIRDKQSGKTILDFLKSDGFANRNFMQLIHDDSLTFKEDIQKAQVSGQGDSLHEHIANLAGSPAIKKGILQTVKVVDELVKVMGRHKPENIVIEMARENQTTQKGQKNSRERMKRIEEGIKELGSQILKEHPVENTQLQNEKLYLYYLQNGRDMYVDQELDINRLSDYDVDHIVPQSFLKDDSIDNKVLTRSDKARGKSDNVPSEEVVKKMKNYWRQLLNAKLITQRKFDNLTKAERGGLSELDKAGFIKRQLVETRQITKHVAQILDSRMNTKYDENDKLIREVKVITLKSKLVSDFRKDFQFYKVREINNYHHAHDAYLNAVVGTALIKKYPKLESEFVYGDYKVYDVRKMIAKSEQEIGKATAKYFFYSNIMNFFKTEITLANGEIRKRPLIETNGETGEIVWDKGRDFATVRKVLSMPQVNIVKKTEVQTGGFSKESILPKRNSDKLIARKKDWDPKKYGGFDSPTVAYSVLVVAKVEKGKSKKLKSVKELLGITIMERSSFEKNPIDFLEAKGYKEVKKDLIIKLPKYSLFELENGRKRMLASAGELQKGNELALPSKYVNFLYLASHYEKLKGSPEDNEQKQLFVEQHKHYLDEIIEQISEFSKRVILADANLDKVLSAYNKHRDKPIREQAENIIHLFTLTNLGAPAAFKYFDTTIDRKRYTSTKEVLDATLIHQSITGLYETRIDLSQLGGDGGGGSGSSGGGGGTLNIEDEYRLHETSKEPDVPLGSTWLSDFPQAWAETGGMGLAVRQAPLIIPLKATSTPVSIKQYPMSQEARLGIKPHIQRLLDQGILVPCQSPWNTPLLPVKKPGTNDYRPVQDLREVNKRVEDIHPTVPNPYNLLSGLPPSHQWYTVLDLKDAFFCLRLHPTSQPLFAFEWRDPEMGISGQLTWTRLPQGFKNSPTLFNEALHRDLADFRIQHPDLILLQYVDDLLLAATSEQDCQRGTRALLQTLGNLGYRASAKKAQICQKQVKYLGYLLKEGQRWLTEARKETVMGQPTPKTPRQLREFLGTAGFCRLWIPGFAEMAAPLYPLTKPGTLFNWGPDQQKAYQEIKQALLTAPALGLPDLTKPFELFVDEKQGYAKGVLTQKLGPWRRPVAYLSKKLDPVAAGWPPCLRMVAAIAVLTKDAGKLTMGQPLVILAPHAVEALVKQPPDRWLSNARMTHYQAMLLDTDRVQFGPVVALNPATLLPLPEKEAPHDCLEILAETHGTRPDLTDQPIPDADYTWYTDGSSFLQEGQRRAGAAVTTETEVIWARALPAGTSAQRAELIALTQALKMAEGKKLNVYTDSRYAFATAHVHGEIYRRRGWLTSEGREIKNKNEILALLKALFLPKRLSIIHCPGHQKGNSAEARGNRMADQAAREAAMKAVLETSTLLAGKRTADGSEFEKRTADGSEFESPKKKAKVE

SEQ ID NO: 996 - protein, 2100 aa, synthetic construct
MPAAKRVKLDGGDKKYSIGLDIGTNSVGWAVITDEYKVPSKKFKVLGNTDRHSIKKNLIGALLFDSGETAEATRLKRTARRRYTRRKNRICYLQEIFSNEMAKVDDSFFHRLEESFLVEEDKKHERHPIFGNIVDEVAYHEKYPTIYHLRKKLVDSTDKADLRLIYLALAHMIKFRGHFLIEGDLNPDNSDVDKLFIQLVQTYNQLFEENPINASGVDAKAILSARLSKSRRLENLIAQLPGEKKNGLFGNLIALSLGLTPNFKSNFDLAEDAKLQLSKDTYDDDLDNLLAQIGDQYADLFLAAKNLSDAILLSDILRVNTEITKAPLSASMIKRYDEHHQDLTLLKALVRQQLPEKYKEIFFDQSKNGYAGYIDGGASQEEFYKFIKPILEKMDGTEELLVKLNREDLLRKQRTFDNGSIPHQIHLGELHAILRRQEDFYPFLKDNREKIEKILTFRIPYYVGPLARGNSRFAWMTRKSEETITPWNFEEVVDKGASAQSFIERMTNFDKNLPNEKVLPKHSLLYEYFTVYNELTKVKYVTEGMRKPAFLSGEQKKAIVDLLFKTNRKVTVKQLKEDYFKKIECFDSVEISGVEDRFNASLGTYHDLLKIIKDKDFLDNEENEDILEDIVLTLTLFEDREMIEERLKTYAHLFDDKVMKQLKRRRYTGWGRLSRKLINGIRDKQSGKTILDFLKSDGFANRNFMQLIHDDSLTFKEDIQKAQVSGQGDSLHEHIANLAGSPAIKKGILQTVKVVDELVKVMGRHKPENIVIEMARENQTTQKGQKNSRERMKRIEEGIKELGSQILKEHPVENTQLQNEKLYLYYLQNGRDMYVDQELDINRLSDYDVDHIVPQSFLKDDSIDNKVLTRSDKARGKSDNVPSEEVVKKMKNYWRQLLNAKLITQRKFDNLTKAERGGLSELDKAGFIKRQLVETRQITKHVAQILDSRMNTKYDENDKLIREVKVITLKSKLVSDFRKDFQFYKVREINNYHHAHDAYLNAVVGTALIKKYPKLESEFVYGDYKVYDVRKMIAKSEQEIGKATAKYFFYSNIMNFFKTEITLANGEIRKRPLIETNGETGEIVWDKGRDFATVRKVLSMPQVNIVKKTEVQTGGFSKESILPKRNSDKLIARKKDWDPKKYGGFDSPTVAYSVLVVAKVEKGKSKKLKSVKELLGITIMERSSFEKNPIDFLEAKGYKEVKKDLIIKLPKYSLFELENGRKRMLASAGELQKGNELALPSKYVNFLYLASHYEKLKGSPEDNEQKQLFVEQHKHYLDEIIEQISEFSKRVILADANLDKVLSAYNKHRDKPIREQAENIIHLFTLTNLGAPAAFKYFDTTIDRKRYTSTKEVLDATLIHQSITGLYETRIDLSQLGGDGGEAAAKEAAAKEAAAKGGTLNIEDEYRLHETSKEPDVPLGSTWLSDFPQAWAETGGMGLAVRQAPLIIPLKATSTPVSIKQYPMSQEARLGIKPHIQRLLDQGILVPCQSPWNTPLLPVKKPGTNDYRPVQDLREVNKRVEDIHPTVPNPYNLLSGLPPSHQWYTVLDLKDAFFCLRLHPTSQPLFAFEWRDPEMGISGQLTWTRLPQGFKNSPTLFNEALHRDLADFRIQHPDLILLQYVDDLLLAATSEQDCQRGTRALLQTLGNLGYRASAKKAQICQKQVKYLGYLLKEGQRWLTEARKETVMGQPTPKTPRQLREFLGTAGFCRLWIPGFAEMAAPLYPLTKPGTLFNWGPDQQKAYQEIKQALLTAPALGLPDLTKPFELFVDEKQGYAKGVLTQKLGPWRRPVAYLSKKLDPVAAGWPPCLRMVAAIAVLTKDAGKLTMGQPLVILAPHAVEALVKQPPDRWLSNARMTHYQAMLLDTDRVQFGPVVALNPATLLPLPEKEAPHDCLEILAETHGTRPDLTDQPIPDADYTWYTDGSSFLQEGQRRAGAAVTTETEVIWARALPAGTSAQRAELIALTQALKMAEGKKLNVYTDSRYAFATAHVHGEIYRRRGWLTSEGREIKNKNEILALLKALFLPKRLSIIHCPGHQKGNSAEARGNRMADQAAREAAMKAVLETSTLLAGKRTADGSEFEKRTADGSEFESPKKKAKVE

SEQ ID NO: 997 - protein, 2088 aa, synthetic construct
MPAAKRVKLDGGDKKYSIGLDIGTNSVGWAVITDEYKVPSKKFKVLGNTDRHSIKKNLIGALLFDSGETAEATRLKRTARRRYTRRKNRICYLQEIFSNEMAKVDDSFFHRLEESFLVEEDKKHERHPIFGNIVDEVAYHEKYPTIYHLRKKLVDSTDKADLRLIYLALAHMIKFRGHFLIEGDLNPDNSDVDKLFIQLVQTYNQLFEENPINASGVDAKAILSARLSKSRRLENLIAQLPGEKKNGLFGNLIALSLGLTPNFKSNFDLAEDAKLQLSKDTYDDDLDNLLAQIGDQYADLFLAAKNLSDAILLSDILRVNTEITKAPLSASMIKRYDEHHQDLTLLKALVRQQLPEKYKEIFFDQSKNGYAGYIDGGASQEEFYKFIKPILEKMDGTEELLVKLNREDLLRKQRTFDNGSIPHQIHLGELHAILRRQEDFYPFLKDNREKIEKILTFRIPYYVGPLARGNSRFAWMTRKSEETITPWNFEEVVDKGASAQSFIERMTNFDKNLPNEKVLPKHSLLYEYFTVYNELTKVKYVTEGMRKPAFLSGEQKKAIVDLLFKTNRKVTVKQLKEDYFKKIECFDSVEISGVEDRFNASLGTYHDLLKIIKDKDFLDNEENEDILEDIVLTLTLFEDREMIEERLKTYAHLFDDKVMKQLKRRRYTGWGRLSRKLINGIRDKQSGKTILDFLKSDGFANRNFMQLIHDDSLTFKEDIQKAQVSGQGDSLHEHIANLAGSPAIKKGILQTVKVVDELVKVMGRHKPENIVIEMARENQTTQKGQKNSRERMKRIEEGIKELGSQILKEHPVENTQLQNEKLYLYYLQNGRDMYVDQELDINRLSDYDVDHIVPQSFLKDDSIDNKVLTRSDKARGKSDNVPSEEVVKKMKNYWRQLLNAKLITQRKFDNLTKAERGGLSELDKAGFIKRQLVETRQITKHVAQILDSRMNTKYDENDKLIREVKVITLKSKLVSDFRKDFQFYKVREINNYHHAHDAYLNAVVGTALIKKYPKLESEFVYGDYKVYDVRKMIAKSEQEIGKATAKYFFYSNIMNFFKTEITLANGEIRKRPLIETNGETGEIVWDKGRDFATVRKVLSMPQVNIVKKTEVQTGGFSKESILPKRNSDKLIARKKDWDPKKYGGFDSPTVAYSVLVVAKVEKGKSKKLKSVKELLGITIMERSSFEKNPIDFLEAKGYKEVKKDLIIKLPKYSLFELENGRKRMLASAGELQKGNELALPSKYVNFLYLASHYEKLKGSPEDNEQKQLFVEQHKHYLDEIIEQISEFSKRVILADANLDKVLSAYNKHRDKPIREQAENIIHLFTLTNLGAPAAFKYFDTTIDRKRYTSTKEVLDATLIHQSITGLYETRIDLSQLGGDGGGGGGGTLNIEDEYRLHETSKEPDVPLGSTWLSDFPQAWAETGGMGLAVRQAPLIIPLKATSTPVSIKQYPMSQEARLGIKPHIQRLLDQGILVPCQSPWNTPLLPVKKPGTNDYRPVQDLREVNKRVEDIHPTVPNPYNLLSGLPPSHQWYTVLDLKDAFFCLRLHPTSQPLFAFEWRDPEMGISGQLTWTRLPQGFKNSPTLFNEALHRDLADFRIQHPDLILLQYVDDLLLAATSEQDCQRGTRALLQTLGNLGYRASAKKAQICQKQVKYLGYLLKEGQRWLTEARKETVMGQPTPKTPRQLREFLGTAGFCRLWIPGFAEMAAPLYPLTKPGTLFNWGPDQQKAYQEIKQALLTAPALGLPDLTKPFELFVDEKQGYAKGVLTQKLGPWRRPVAYLSKKLDPVAAGWPPCLRMVAAIAVLTKDAGKLTMGQPLVILAPHAVEALVKQPPDRWLSNARMTHYQAMLLDTDRVQFGPVVALNPATLLPLPEKEAPHDCLEILAETHGTRPDLTDQPIPDADYTWYTDGSSFLQEGQRRAGAAVTTETEVIWARALPAGTSAQRAELIALTQALKMAEGKKLNVYTDSRYAFATAHVHGEIYRRRGWLTSEGREIKNKNEILALLKALFLPKRLSIIHCPGHQKGNSAEARGNRMADQAAREAAMKAVLETSTLLAGKRTADGSEFEKRTADGSEFESPKKKAKVE

SEQ ID NO: 998 - protein, 2090 aa, synthetic construct
MPAAKRVKLDGGDKKYSIGLDIGTNSVGWAVITDEYKVPSKKFKVLGNTDRHSIKKNLIGALLFDSGETAEATRLKRTARRRYTRRKNRICYLQEIFSNEMAKVDDSFFHRLEESFLVEEDKKHERHPIFGNIVDEVAYHEKYPTIYHLRKKLVDSTDKADLRLIYLALAHMIKFRGHFLIEGDLNPDNSDVDKLFIQLVQTYNQLFEENPINASGVDAKAILSARLSKSRRLENLIAQLPGEKKNGLFGNLIALSLGLTPNFKSNFDLAEDAKLQLSKDTYDDDLDNLLAQIGDQYADLFLAAKNLSDAILLSDILRVNTEITKAPLSASMIKRYDEHHQDLTLLKALVRQQLPEKYKEIFFDQSKNGYAGYIDGGASQEEFYKFIKPILEKMDGTEELLVKLNREDLLRKQRTFDNGSIPHQIHLGELHAILRRQEDFYPFLKDNREKIEKILTFRIPYYVGPLARGNSRFAWMTRKSEETITPWNFEEVVDKGASAQSFIERMTNFDKNLPNEKVLPKHSLLYEYFTVYNELTKVKYVTEGMRKPAFLSGEQKKAIVDLLFKTNRKVTVKQLKEDYFKKIECFDSVEISGVEDRFNASLGTYHDLLKIIKDKDFLDNEENEDILEDIVLTLTLFEDREMIEERLKTYAHLFDDKVMKQLKRRRYTGWGRLSRKLINGIRDKQSGKTILDFLKSDGFANRNFMQLIHDDSLTFKEDIQKAQVSGQGDSLHEHIANLAGSPAIKKGILQTVKVVDELVKVMGRHKPENIVIEMARENQTTQKGQKNSRERMKRIEEGIKELGSQILKEHPVENTQLQNEKLYLYYLQNGRDMYVDQELDINRLSDYDVDHIVPQSFLKDDSIDNKVLTRSDKARGKSDNVPSEEVVKKMKNYWRQLLNAKLITQRKFDNLTKAERGGLSELDKAGFIKRQLVETRQITKHVAQILDSRMNTKYDENDKLIREVKVITLKSKLVSDFRKDFQFYKVREINNYHHAHDAYLNAVVGTALIKKYPKLESEFVYGDYKVYDVRKMIAKSEQEIGKATAKYFFYSNIMNFFKTEITLANGEIRKRPLIETNGETGEIVWDKGRDFATVRKVLSMPQVNIVKKTEVQTGGFSKESILPKRNSDKLIARKKDWDPKKYGGFDSPTVAYSVLVVAKVEKGKSKKLKSVKELLGITIMERSSFEKNPIDFLEAKGYKEVKKDLIIKLPKYSLFELENGRKRMLASAGELQKGNELALPSKYVNFLYLASHYEKLKGSPEDNEQKQLFVEQHKHYLDEIIEQISEFSKRVILADANLDKVLSAYNKHRDKPIREQAENIIHLFTLTNLGAPAAFKYFDTTIDRKRYTSTKEVLDATLIHQSITGLYETRIDLSQLGGDGGGGGGSGGTLNIEDEYRLHETSKEPDVPLGSTWLSDFPQAWAETGGMGLAVRQAPLIIPLKATSTPVSIKQYPMSQEARLGIKPHIQRLLDQGILVPCQSPWNTPLLPVKKPGTNDYRPVQDLREVNKRVEDIHPTVPNPYNLLSGLPPSHQWYTVLDLKDAFFCLRLHPTSQPLFAFEWRDPEMGISGQLTWTRLPQGFKNSPTLFNEALHRDLADFRIQHPDLILLQYVDDLLLAATSEQDCQRGTRALLQTLGNLGYRASAKKAQICQKQVKYLGYLLKEGQRWLTEARKETVMGQPTPKTPRQLREFLGTAGFCRLWIPGFAEMAAPLYPLTKPGTLFNWGPDQQKAYQEIKQALLTAPALGLPDLTKPFELFVDEKQGYAKGVLTQKLGPWRRPVAYLSKKLDPVAAGWPPCLRMVAAIAVLTKDAGKLTMGQPLVILAPHAVEALVKQPPDRWLSNARMTHYQAMLLDTDRVQFGPVVALNPATLLPLPEKEAPHDCLEILAETHGTRPDLTDQPIPDADYTWYTDGSSFLQEGQRRAGAAVTTETEVIWARALPAGTSAQRAELIALTQALKMAEGKKLNVYTDSRYAFATAHVHGEIYRRRGWLTSEGREIKNKNEILALLKALFLPKRLSIIHCPGHQKGNSAEARGNRMADQAAREAAMKAVLETSTLLAGKRTADGSEFEKRTADGSEFESPKKKAKVE

SEQ ID NO: 999 - protein, 2094 aa, synthetic construct
MPAAKRVKLDGGDKKYSIGLDIGTNSVGWAVITDEYKVPSKKFKVLGNTDRHSIKKNLIGALLFDSGETAEATRLKRTARRRYTRRKNRICYLQEIFSNEMAKVDDSFFHRLEESFLVEEDKKHERHPIFGNIVDEVAYHEKYPTIYHLRKKLVDSTDKADLRLIYLALAHMIKFRGHFLIEGDLNPDNSDVDKLFIQLVQTYNQLFEENPINASGVDAKAILSARLSKSRRLENLIAQLPGEKKNGLFGNLIALSLGLTPNFKSNFDLAEDAKLQLSKDTYDDDLDNLLAQIGDQYADLFLAAKNLSDAILLSDILRVNTEITKAPLSASMIKRYDEHHQDLTLLKALVRQQLPEKYKEIFFDQSKNGYAGYIDGGASQEEFYKFIKPILEKMDGTEELLVKLNREDLLRKQRTFDNGSIPHQIHLGELHAILRRQEDFYPFLKDNREKIEKILTFRIPYYVGPLARGNSRFAWMTRKSEETITPWNFEEVVDKGASAQSFIERMTNFDKNLPNEKVLPKHSLLYEYFTVYNELTKVKYVTEGMRKPAFLSGEQKKAIVDLLFKTNRKVTVKQLKEDYFKKIECFDSVEISGVEDRFNASLGTYHDLLKIIKDKDFLDNEENEDILEDIVLTLTLFEDREMIEERLKTYAHLFDDKVMKQLKRRRYTGWGRLSRKLINGIRDKQSGKTILDFLKSDGFANRNFMQLIHDDSLTFKEDIQKAQVSGQGDSLHEHIANLAGSPAIKKGILQTVKVVDELVKVMGRHKPENIVIEMARENQTTQKGQKNSRERMKRIEEGIKELGSQILKEHPVENTQLQNEKLYLYYLQNGRDMYVDQELDINRLSDYDVDHIVPQSFLKDDSIDNKVLTRSDKARGKSDNVPSEEVVKKMKNYWRQLLNAKLITQRKFDNLTKAERGGLSELDKAGFIKRQLVETRQITKHVAQILDSRMNTKYDENDKLIREVKVITLKSKLVSDFRKDFQFYKVREINNYHHAHDAYLNAVVGTALIKKYPKLESEFVYGDYKVYDVRKMIAKSEQEIGKATAKYFFYSNIMNFFKTEITLANGEIRKRPLIETNGETGEIVWDKGRDFATVRKVLSMPQVNIVKKTEVQTGGFSKESILPKRNSDKLIARKKDWDPKKYGGFDSPTVAYSVLVVAKVEKGKSKKLKSVKELLGITIMERSSFEKNPIDFLEAKGYKEVKKDLIIKLPKYSLFELENGRKRMLASAGELQKGNELALPSKYVNFLYLASHYEKLKGSPEDNEQKQLFVEQHKHYLDEIIEQISEFSKRVILADANLDKVLSAYNKHRDKPIREQAENIIHLFTLTNLGAPAAFKYFDTTIDRKRYTSTKEVLDATLIHQSITGLYETRIDLSQLGGDGGGGGGGSPAPGGTLNIEDEYRLHETSKEPDVPLGSTWLSDFPQAWAETGGMGLAVRQAPLIIPLKATSTPVSIKQYPMSQEARLGIKPHIQRLLDQGILVPCQSPWNTPLLPVKKPGTNDYRPVQDLREVNKRVEDIHPTVPNPYNLLSGLPPSHQWYTVLDLKDAFFCLRLHPTSQPLFAFEWRDPEMGISGQLTWTRLPQGFKNSPTLFNEALHRDLADFRIQHPDLILLQYVDDLLLAATSEQDCQRGTRALLQTLGNLGYRASAKKAQICQKQVKYLGYLLKEGQRWLTEARKETVMGQPTPKTPRQLREFLGTAGFCRLWIPGFAEMAAPLYPLTKPGTLFNWGPDQQKAYQEIKQALLTAPALGLPDLTKPFELFVDEKQGYAKGVLTQKLGPWRRPVAYLSKKLDPVAAGWPPCLRMVAAIAVLTKDAGKLTMGQPLVILAPHAVEALVKQPPDRWLSNARMTHYQAMLLDTDRVQFGPVVALNPATLLPLPEKEAPHDCLEILAETHGTRPDLTDQPIPDADYTWYTDGSSFLQEGQRRAGAAVTTETEVIWARALPAGTSAQRAELIALTQALKMAEGKKLNVYTDSRYAFATAHVHGEIYRRRGWLTSEGREIKNKNEILALLKALFLPKRLSIIHCPGHQKGNSAEARGNRMADQAAREAAMKAVLETSTLLAGKRTADGSEFEKRTADGSEFESPKKKAKVE

SEQ ID NO: 1000 - protein, 2094 aa, synthetic construct
MPAAKRVKLDGGDKKYSIGLDIGTNSVGWAVITDEYKVPSKKFKVLGNTDRHSIKKNLIGALLFDSGETAEATRLKRTARRRYTRRKNRICYLQEIFSNEMAKVDDSFFHRLEESFLVEEDKKHERHPIFGNIVDEVAYHEKYPTIYHLRKKLVDSTDKADLRLIYLALAHMIKFRGHFLIEGDLNPDNSDVDKLFIQLVQTYNQLFEENPINASGVDAKAILSARLSKSRRLENLIAQLPGEKKNGLFGNLIALSLGLTPNFKSNFDLAEDAKLQLSKDTYDDDLDNLLAQIGDQYADLFLAAKNLSDAILLSDILRVNTEITKAPLSASMIKRYDEHHQDLTLLKALVRQQLPEKYKEIFFDQSKNGYAGYIDGGASQEEFYKFIKPILEKMDGTEELLVKLNREDLLRKQRTFDNGSIPHQIHLGELHAILRRQEDFYPFLKDNREKIEKILTFRIPYYVGPLARGNSRFAWMTRKSEETITPWNFEEVVDKGASAQSFIERMTNFDKNLPNEKVLPKHSLLYEYFTVYNELTKVKYVTEGMRKPAFLSGEQKKAIVDLLFKTNRKVTVKQLKEDYFKKIECFDSVEISGVEDRFNASLGTYHDLLKIIKDKDFLDNEENEDILEDIVLTLTLFEDREMIEERLKTYAHLFDDKVMKQLKRRRYTGWGRLSRKLINGIRDKQSGKTILDFLKSDGFANRNFMQLIHDDSLTFKEDIQKAQVSGQGDSLHEHIANLAGSPAIKKGILQTVKVVDELVKVMGRHKPENIVIEMARENQTTQKGQKNSRERMKRIEEGIKELGSQILKEHPVENTQLQNEKLYLYYLQNGRDMYVDQELDINRLSDYDVDHIVPQSFLKDDSIDNKVLTRSDKARGKSDNVPSEEVVKKMKNYWRQLLNAKLITQRKFDNLTKAERGGLSELDKAGFIKRQLVETRQITKHVAQILDSRMNTKYDENDKLIREVKVITLKSKLVSDFRKDFQFYKVREINNYHHAHDAYLNAVVGTALIKKYPKLESEFVYGDYKVYDVRKMIAKSEQEIGKATAKYFFYSNIMNFFKTEITLANGEIRKRPLIETNGETGEIVWDKGRDFATVRKVLSMPQVNIVKKTEVQTGGFSKESILPKRNSDKLIARKKDWDPKKYGGFDSPTVAYSVLVVAKVEKGKSKKLKSVKELLGITIMERSSFEKNPIDFLEAKGYKEVKKDLIIKLPKYSLFELENGRKRMLASAGELQKGNELALPSKYVNFLYLASHYEKLKGSPEDNEQKQLFVEQHKHYLDEIIEQISEFSKRVILADANLDKVLSAYNKHRDKPIREQAENIIHLFTLTNLGAPAAFKYFDTTIDRKRYTSTKEVLDATLIHQSITGLYETRIDLSQLGGDGGGSSPAPGGGGGTLNIEDEYRLHETSKEPDVPLGSTWLSDFPQAWAETGGMGLAVRQAPLIIPLKATSTPVSIKQYPMSQEARLGIKPHIQRLLDQGILVPCQSPWNTPLLPVKKPGTNDYRPVQDLREVNKRVEDIHPTVPNPYNLLSGLPPSHQWYTVLDLKDAFFCLRLHPTSQPLFAFEWRDPEMGISGQLTWTRLPQGFKNSPTLFNEALHRDLADFRIQHPDLILLQYVDDLLLAATSEQDCQRGTRALLQTLGNLGYRASAKKAQICQKQVKYLGYLLKEGQRWLTEARKETVMGQPTPKTPRQLREFLGTAGFCRLWIPGFAEMAAPLYPLTKPGTLFNWGPDQQKAYQEIKQALLTAPALGLPDLTKPFELFVDEKQGYAKGVLTQKLGPWRRPVAYLSKKLDPVAAGWPPCLRMVAAIAVLTKDAGKLTMGQPLVILAPHAVEALVKQPPDRWLSNARMTHYQAMLLDTDRVQFGPVVALNPATLLPLPEKEAPHDCLEILAETHGTRPDLTDQPIPDADYTWYTDGSSFLQEGQRRAGAAVTTETEVIWARALPAGTSAQRAELIALTQALKMAEGKKLNVYTDSRYAFATAHVHGEIYRRRGWLTSEGREIKNKNEILALLKALFLPKRLSIIHCPGHQKGNSAEARGNRMADQAAREAAMKAVLETSTLLAGKRTADGSEFEKRTADGSEFESPKKKAKVE

SEQ ID NO: 1001 - protein, 2094 aa, synthetic construct
MPAAKRVKLDGGDKKYSIGLDIGTNSVGWAVITDEYKVPSKKFKVLGNTDRHSIKKNLIGALLFDSGETAEATRLKRTARRRYTRRKNRICYLQEIFSNEMAKVDDSFFHRLEESFLVEEDKKHERHPIFGNIVDEVAYHEKYPTIYHLRKKLVDSTDKADLRLIYLALAHMIKFRGHFLIEGDLNPDNSDVDKLFIQLVQTYNQLFEENPINASGVDAKAILSARLSKSRRLENLIAQLPGEKKNGLFGNLIALSLGLTPNFKSNFDLAEDAKLQLSKDTYDDDLDNLLAQIGDQYADLFLAAKNLSDAILLSDILRVNTEITKAPLSASMIKRYDEHHQDLTLLKALVRQQLPEKYKEIFFDQSKNGYAGYIDGGASQEEFYKFIKPILEKMDGTEELLVKLNREDLLRKQRTFDNGSIPHQIHLGELHAILRRQEDFYPFLKDNREKIEKILTFRIPYYVGPLARGNSRFAWMTRKSEETITPWNFEEVVDKGASAQSFIERMTNFDKNLPNEKVLPKHSLLYEYFTVYNELTKVKYVTEGMRKPAFLSGEQKKAIVDLLFKTNRKVTVKQLKEDYFKKIECFDSVEISGVEDRFNASLGTYHDLLKIIKDKDFLDNEENEDILEDIVLTLTLFEDREMIEERLKTYAHLFDDKVMKQLKRRRYTGWGRLSRKLINGIRDKQSGKTILDFLKSDGFANRNFMQLIHDDSLTFKEDIQKAQVSGQGDSLHEHIANLAGSPAIKKGILQTVKVVDELVKVMGRHKPENIVIEMARENQTTQKGQKNSRERMKRIEEGIKELGSQILKEHPVENTQLQNEKLYLYYLQNGRDMYVDQELDINRLSDYDVDHIVPQSFLKDDSIDNKVLTRSDKARGKSDNVPSEEVVKKMKNYWRQLLNAKLITQRKFDNLTKAERGGLSELDKAGFIKRQLVETRQITKHVAQILDSRMNTKYDENDKLIREVKVITLKSKLVSDFRKDFQFYKVREINNYHHAHDAYLNAVVGTALIKKYPKLESEFVYGDYKVYDVRKMIAKSEQEIGKATAKYFFYSNIMNFFKTEITLANGEIRKRPLIETNGETGEIVWDKGRDFATVRKVLSMPQVNIVKKTEVQTGGFSKESILPKRNSDKLIARKKDWDPKKYGGFDSPTVAYSVLVVAKVEKGKSKKLKSVKELLGITIMERSSFEKNPIDFLEAKGYKEVKKDLIIKLPKYSLFELENGRKRMLASAGELQKGNELALPSKYVNFLYLASHYEKLKGSPEDNEQKQLFVEQHKHYLDEIIEQISEFSKRVILADANLDKVLSAYNKHRDKPIREQAENIIHLFTLTNLGAPAAFKYFDTTIDRKRYTSTKEVLDATLIHQSITGLYETRIDLSQLGGDGGGGSPAPGGGGGTLNIEDEYRLHETSKEPDVPLGSTWLSDFPQAWAETGGMGLAVRQAPLIIPLKATSTPVSIKQYPMSQEARLGIKPHIQRLLDQGILVPCQSPWNTPLLPVKKPGTNDYRPVQDLREVNKRVEDIHPTVPNPYNLLSGLPPSHQWYTVLDLKDAFFCLRLHPTSQPLFAFEWRDPEMGISGQLTWTRLPQGFKNSPTLFNEALHRDLADFRIQHPDLILLQYVDDLLLAATSEQDCQRGTRALLQTLGNLGYRASAKKAQICQKQVKYLGYLLKEGQRWLTEARKETVMGQPTPKTPRQLREFLGTAGFCRLWIPGFAEMAAPLYPLTKPGTLFNWGPDQQKAYQEIKQALLTAPALGLPDLTKPFELFVDEKQGYAKGVLTQKLGPWRRPVAYLSKKLDPVAAGWPPCLRMVAAIAVLTKDAGKLTMGQPLVILAPHAVEALVKQPPDRWLSNARMTHYQAMLLDTDRVQFGPVVALNPATLLPLPEKEAPHDCLEILAETHGTRPDLTDQPIPDADYTWYTDGSSFLQEGQRRAGAAVTTETEVIWARALPAGTSAQRAELIALTQALKMAEGKKLNVYTDSRYAFATAHVHGEIYRRRGWLTSEGREIKNKNEILALLKALFLPKRLSIIHCPGHQKGNSAEARGNRMADQAAREAAMKAVLETSTLLAGKRTADGSEFEKRTADGSEFESPKKKAKVE

SEQ ID NO: 1002 - protein, 2095 aa, synthetic construct
MPAAKRVKLDGGDKKYSIGLDIGTNSVGWAVITDEYKVPSKKFKVLGNTDRHSIKKNLIGALLFDSGETAEATRLKRTARRRYTRRKNRICYLQEIFSNEMAKVDDSFFHRLEESFLVEEDKKHERHPIFGNIVDEVAYHEKYPTIYHLRKKLVDSTDKADLRLIYLALAHMIKFRGHFLIEGDLNPDNSDVDKLFIQLVQTYNQLFEENPINASGVDAKAILSARLSKSRRLENLIAQLPGEKKNGLFGNLIALSLGLTPNFKSNFDLAEDAKLQLSKDTYDDDLDNLLAQIGDQYADLFLAAKNLSDAILLSDILRVNTEITKAPLSASMIKRYDEHHQDLTLLKALVRQQLPEKYKEIFFDQSKNGYAGYIDGGASQEEFYKFIKPILEKMDGTEELLVKLNREDLLRKQRTFDNGSIPHQIHLGELHAILRRQEDFYPFLKDNREKIEKILTFRIPYYVGPLARGNSRFAWMTRKSEETITPWNFEEVVDKGASAQSFIERMTNFDKNLPNEKVLPKHSLLYEYFTVYNELTKVKYVTEGMRKPAFLSGEQKKAIVDLLFKTNRKVTVKQLKEDYFKKIECFDSVEISGVEDRFNASLGTYHDLLKIIKDKDFLDNEENEDILEDIVLTLTLFEDREMIEERLKTYAHLFDDKVMKQLKRRRYTGWGRLSRKLINGIRDKQSGKTILDFLKSDGFANRNFMQLIHDDSLTFKEDIQKAQVSGQGDSLHEHIANLAGSPAIKKGILQTVKVVDELVKVMGRHKPENIVIEMARENQTTQKGQKNSRERMKRIEEGIKELGSQILKEHPVENTQLQNEKLYLYYLQNGRDMYVDQELDINRLSDYDVDHIVPQSFLKDDSIDNKVLTRSDKARGKSDNVPSEEVVKKMKNYWRQLLNAKLITQRKFDNLTKAERGGLSELDKAGFIKRQLVETRQITKHVAQILDSRMNTKYDENDKLIREVKVITLKSKLVSDFRKDFQFYKVREINNYHHAHDAYLNAVVGTALIKKYPKLESEFVYGDYKVYDVRKMIAKSEQEIGKATAKYFFYSNIMNFFKTEITLANGEIRKRPLIETNGETGEIVWDKGRDFATVRKVLSMPQVNIVKKTEVQTGGFSKESILPKRNSDKLIARKKDWDPKKYGGFDSPTVAYSVLVVAKVEKGKSKKLKSVKELLGITIMERSSFEKNPIDFLEAKGYKEVKKDLIIKLPKYSLFELENGRKRMLASAGELQKGNELALPSKYVNFLYLASHYEKLKGSPEDNEQKQLFVEQHKHYLDEIIEQISEFSKRVILADANLDKVLSAYNKHRDKPIREQAENIIHLFTLTNLGAPAAFKYFDTTIDRKRYTSTKEVLDATLIHQSITGLYETRIDLSQLGGDGGGGGGSGGGGSGGTLNIEDEYRLHETSKEPDVPLGSTWLSDFPQAWAETGGMGLAVRQAPLIIPLKATSTPVSIKQYPMSQEARLGIKPHIQRLLDQGILVPCQSPWNTPLLPVKKPGTNDYRPVQDLREVNKRVEDIHPTVPNPYNLLSGLPPSHQWYTVLDLKDAFFCLRLHPTSQPLFAFEWRDPEMGISGQLTWTRLPQGFKNSPTLFNEALHRDLADFRIQHPDLILLQYVDDLLLAATSEQDCQRGTRALLQTLGNLGYRASAKKAQICQKQVKYLGYLLKEGQRWLTEARKETVMGQPTPKTPRQLREFLGTAGFCRLWIPGFAEMAAPLYPLTKPGTLFNWGPDQQKAYQEIKQALLTAPALGLPDLTKPFELFVDEKQGYAKGVLTQKLGPWRRPVAYLSKKLDPVAAGWPPCLRMVAAIAVLTKDAGKLTMGQPLVILAPHAVEALVKQPPDRWLSNARMTHYQAMLLDTDRVQFGPVVALNPATLLPLPEKEAPHDCLEILAETHGTRPDLTDQPIPDADYTWYTDGSSFLQEGQRRAGAAVTTETEVIWARALPAGTSAQRAELIALTQALKMAEGKKLNVYTDSRYAFATAHVHGEIYRRRGWLTSEGREIKNKNEILALLKALFLPKRLSIIHCPGHQKGNSAEARGNRMADQAAREAAMKAVLETSTLLAGKRTADGSEFEKRTADGSEFESPKKKAKVE

SEQ ID NO: 1003 - protein, 2088 aa, synthetic construct
MPAAKRVKLDGGDKKYSIGLDIGTNSVGWAVITDEYKVPSKKFKVLGNTDRHSIKKNLIGALLFDSGETAEATRLKRTARRRYTRRKNRICYLQEIFSNEMAKVDDSFFHRLEESFLVEEDKKHERHPIFGNIVDEVAYHEKYPTIYHLRKKLVDSTDKADLRLIYLALAHMIKFRGHFLIEGDLNPDNSDVDKLFIQLVQTYNQLFEENPINASGVDAKAILSARLSKSRRLENLIAQLPGEKKNGLFGNLIALSLGLTPNFKSNFDLAEDAKLQLSKDTYDDDLDNLLAQIGDQYADLFLAAKNLSDAILLSDILRVNTEITKAPLSASMIKRYDEHHQDLTLLKALVRQQLPEKYKEIFFDQSKNGYAGYIDGGASQEEFYKFIKPILEKMDGTEELLVKLNREDLLRKQRTFDNGSIPHQIHLGELHAILRRQEDFYPFLKDNREKIEKILTFRIPYYVGPLARGNSRFAWMTRKSEETITPWNFEEVVDKGASAQSFIERMTNFDKNLPNEKVLPKHSLLYEYFTVYNELTKVKYVTEGMRKPAFLSGEQKKAIVDLLFKTNRKVTVKQLKEDYFKKIECFDSVEISGVEDRFNASLGTYHDLLKIIKDKDFLDNEENEDILEDIVLTLTLFEDREMIEERLKTYAHLFDDKVMKQLKRRRYTGWGRLSRKLINGIRDKQSGKTILDFLKSDGFANRNFMQLIHDDSLTFKEDIQKAQVSGQGDSLHEHIANLAGSPAIKKGILQTVKVVDELVKVMGRHKPENIVIEMARENQTTQKGQKNSRERMKRIEEGIKELGSQILKEHPVENTQLQNEKLYLYYLQNGRDMYVDQELDINRLSDYDVDHIVPQSFLKDDSIDNKVLTRSDKARGKSDNVPSEEVVKKMKNYWRQLLNAKLITQRKFDNLTKAERGGLSELDKAGFIKRQLVETRQITKHVAQILDSRMNTKYDENDKLIREVKVITLKSKLVSDFRKDFQFYKVREINNYHHAHDAYLNAVVGTALIKKYPKLESEFVYGDYKVYDVRKMIAKSEQEIGKATAKYFFYSNIMNFFKTEITLANGEIRKRPLIETNGETGEIVWDKGRDFATVRKVLSMPQVNIVKKTEVQTGGFSKESILPKRNSDKLIARKKDWDPKKYGGFDSPTVAYSVLVVAKVEKGKSKKLKSVKELLGITIMERSSFEKNPIDFLEAKGYKEVKKDLIIKLPKYSLFELENGRKRMLASAGELQKGNELALPSKYVNFLYLASHYEKLKGSPEDNEQKQLFVEQHKHYLDEIIEQISEFSKRVILADANLDKVLSAYNKHRDKPIREQAENIIHLFTLTNLGAPAAFKYFDTTIDRKRYTSTKEVLDATLIHQSITGLYETRIDLSQLGGDGGGGSGGTLNIEDEYRLHETSKEPDVPLGSTWLSDFPQAWAETGGMGLAVRQAPLIIPLKATSTPVSIKQYPMSQEARLGIKPHIQRLLDQGILVPCQSPWNTPLLPVKKPGTNDYRPVQDLREVNKRVEDIHPTVPNPYNLLSGLPPSHQWYTVLDLKDAFFCLRLHPTSQPLFAFEWRDPEMGISGQLTWTRLPQGFKNSPTLFNEALHRDLADFRIQHPDLILLQYVDDLLLAATSEQDCQRGTRALLQTLGNLGYRASAKKAQICQKQVKYLGYLLKEGQRWLTEARKETVMGQPTPKTPRQLREFLGTAGFCRLWIPGFAEMAAPLYPLTKPGTLFNWGPDQQKAYQEIKQALLTAPALGLPDLTKPFELFVDEKQGYAKGVLTQKLGPWRRPVAYLSKKLDPVAAGWPPCLRMVAAIAVLTKDAGKLTMGQPLVILAPHAVEALVKQPPDRWLSNARMTHYQAMLLDTDRVQFGPVVALNPATLLPLPEKEAPHDCLEILAETHGTRPDLTDQPIPDADYTWYTDGSSFLQEGQRRAGAAVTTETEVIWARALPAGTSAQRAELIALTQALKMAEGKKLNVYTDSRYAFATAHVHGEIYRRRGWLTSEGREIKNKNEILALLKALFLPKRLSIIHCPGHQKGNSAEARGNRMADQAAREAAMKAVLETSTLLAGKRTADGSEFEKRTADGSEFESPKKKAKVE

SEQ ID NO: 1004 - protein, 2094 aa, synthetic construct
MPAAKRVKLDGGDKKYSIGLDIGTNSVGWAVITDEYKVPSKKFKVLGNTDRHSIKKNLIGALLFDSGETAEATRLKRTARRRYTRRKNRICYLQEIFSNEMAKVDDSFFHRLEESFLVEEDKKHERHPIFGNIVDEVAYHEKYPTIYHLRKKLVDSTDKADLRLIYLALAHMIKFRGHFLIEGDLNPDNSDVDKLFIQLVQTYNQLFEENPINASGVDAKAILSARLSKSRRLENLIAQLPGEKKNGLFGNLIALSLGLTPNFKSNFDLAEDAKLQLSKDTYDDDLDNLLAQIGDQYADLFLAAKNLSDAILLSDILRVNTEITKAPLSASMIKRYDEHHQDLTLLKALVRQQLPEKYKEIFFDQSKNGYAGYIDGGASQEEFYKFIKPILEKMDGTEELLVKLNREDLLRKQRTFDNGSIPHQIHLGELHAILRRQEDFYPFLKDNREKIEKILTFRIPYYVGPLARGNSRFAWMTRKSEETITPWNFEEVVDKGASAQSFIERMTNFDKNLPNEKVLPKHSLLYEYFTVYNELTKVKYVTEGMRKPAFLSGEQKKAIVDLLFKTNRKVTVKQLKEDYFKKIECFDSVEISGVEDRFNASLGTYHDLLKIIKDKDFLDNEENEDILEDIVLTLTLFEDREMIEERLKTYAHLFDDKVMKQLKRRRYTGWGRLSRKLINGIRDKQSGKTILDFLKSDGFANRNFMQLIHDDSLTFKEDIQKAQVSGQGDSLHEHIANLAGSPAIKKGILQTVKVVDELVKVMGRHKPENIVIEMARENQTTQKGQKNSRERMKRIEEGIKELGSQILKEHPVENTQLQNEKLYLYYLQNGRDMYVDQELDINRLSDYDVDHIVPQSFLKDDSIDNKVLTRSDKARGKSDNVPSEEVVKKMKNYWRQLLNAKLITQRKFDNLTKAERGGLSELDKAGFIKRQLVETRQITKHVAQILDSRMNTKYDENDKLIREVKVITLKSKLVSDFRKDFQFYKVREINNYHHAHDAYLNAVVGTALIKKYPKLESEFVYGDYKVYDVRKMIAKSEQEIGKATAKYFFYSNIMNFFKTEITLANGEIRKRPLIETNGETGEIVWDKGRDFATVRKVLSMPQVNIVKKTEVQTGGFSKESILPKRNSDKLIARKKDWDPKKYGGFDSPTVAYSVLVVAKVEKGKSKKLKSVKELLGITIMERSSFEKNPIDFLEAKGYKEVKKDLIIKLPKYSLFELENGRKRMLASAGELQKGNELALPSKYVNFLYLASHYEKLKGSPEDNEQKQLFVEQHKHYLDEIIEQISEFSKRVILADANLDKVLSAYNKHRDKPIREQAENIIHLFTLTNLGAPAAFKYFDTTIDRKRYTSTKEVLDATLIHQSITGLYETRIDLSQLGGDGGGSSGGSGGGGGTLNIEDEYRLHETSKEPDVPLGSTWLSDFPQAWAETGGMGLAVRQAPLIIPLKATSTPVSIKQYPMSQEARLGIKPHIQRLLDQGILVPCQSPWNTPLLPVKKPGTNDYRPVQDLREVNKRVEDIHPTVPNPYNLLSGLPPSHQWYTVLDLKDAFFCLRLHPTSQPLFAFEWRDPEMGISGQLTWTRLPQGFKNSPTLFNEALHRDLADFRIQHPDLILLQYVDDLLLAATSEQDCQRGTRALLQTLGNLGYRASAKKAQICQKQVKYLGYLLKEGQRWLTEARKETVMGQPTPKTPRQLREFLGTAGFCRLWIPGFAEMAAPLYPLTKPGTLFNWGPDQQKAYQEIKQALLTAPALGLPDLTKPFELFVDEKQGYAKGVLTQKLGPWRRPVAYLSKKLDPVAAGWPPCLRMVAAIAVLTKDAGKLTMGQPLVILAPHAVEALVKQPPDRWLSNARMTHYQAMLLDTDRVQFGPVVALNPATLLPLPEKEAPHDCLEILAETHGTRPDLTDQPIPDADYTWYTDGSSFLQEGQRRAGAAVTTETEVIWARALPAGTSAQRAELIALTQALKMAEGKKLNVYTDSRYAFATAHVHGEIYRRRGWLTSEGREIKNKNEILALLKALFLPKRLSIIHCPGHQKGNSAEARGNRMADQAAREAAMKAVLETSTLLAGKRTADGSEFEKRTADGSEFESPKKKAKVE

SEQ ID NO: 1005 - protein, 2096 aa, synthetic construct
MPAAKRVKLDGGDKKYSIGLDIGTNSVGWAVITDEYKVPSKKFKVLGNTDRHSIKKNLIGALLFDSGETAEATRLKRTARRRYTRRKNRICYLQEIFSNEMAKVDDSFFHRLEESFLVEEDKKHERHPIFGNIVDEVAYHEKYPTIYHLRKKLVDSTDKADLRLIYLALAHMIKFRGHFLIEGDLNPDNSDVDKLFIQLVQTYNQLFEENPINASGVDAKAILSARLSKSRRLENLIAQLPGEKKNGLFGNLIALSLGLTPNFKSNFDLAEDAKLQLSKDTYDDDLDNLLAQIGDQYADLFLAAKNLSDAILLSDILRVNTEITKAPLSASMIKRYDEHHQDLTLLKALVRQQLPEKYKEIFFDQSKNGYAGYIDGGASQEEFYKFIKPILEKMDGTEELLVKLNREDLLRKQRTFDNGSIPHQIHLGELHAILRRQEDFYPFLKDNREKIEKILTFRIPYYVGPLARGNSRFAWMTRKSEETITPWNFEEVVDKGASAQSFIERMTNFDKNLPNEKVLPKHSLLYEYFTVYNELTKVKYVTEGMRKPAFLSGEQKKAIVDLLFKTNRKVTVKQLKEDYFKKIECFDSVEISGVEDRFNASLGTYHDLLKIIKDKDFLDNEENEDILEDIVLTLTLFEDREMIEERLKTYAHLFDDKVMKQLKRRRYTGWGRLSRKLINGIRDKQSGKTILDFLKSDGFANRNFMQLIHDDSLTFKEDIQKAQVSGQGDSLHEHIANLAGSPAIKKGILQTVKVVDELVKVMGRHKPENIVIEMARENQTTQKGQKNSRERMKRIEEGIKELGSQILKEHPVENTQLQNEKLYLYYLQNGRDMYVDQELDINRLSDYDVDHIVPQSFLKDDSIDNKVLTRSDKARGKSDNVPSEEVVKKMKNYWRQLLNAKLITQRKFDNLTKAERGGLSELDKAGFIKRQLVETRQITKHVAQILDSRMNTKYDENDKLIREVKVITLKSKLVSDFRKDFQFYKVREINNYHHAHDAYLNAVVGTALIKKYPKLESEFVYGDYKVYDVRKMIAKSEQEIGKATAKYFFYSNIMNFFKTEITLANGEIRKRPLIETNGETGEIVWDKGRDFATVRKVLSMPQVNIVKKTEVQTGGFSKESILPKRNSDKLIARKKDWDPKKYGGFDSPTVAYSVLVVAKVEKGKSKKLKSVKELLGITIMERSSFEKNPIDFLEAKGYKEVKKDLIIKLPKYSLFELENGRKRMLASAGELQKGNELALPSKYVNFLYLASHYEKLKGSPEDNEQKQLFVEQHKHYLDEIIEQISEFSKRVILADANLDKVLSAYNKHRDKPIREQAENIIHLFTLTNLGAPAAFKYFDTTIDRKRYTSTKEVLDATLIHQSITGLYETRIDLSQLGGDGGGGSGSSEAAAKGGTLNIEDEYRLHETSKEPDVPLGSTWLSDFPQAWAETGGMGLAVRQAPLIIPLKATSTPVSIKQYPMSQEARLGIKPHIQRLLDQGILVPCQSPWNTPLLPVKKPGTNDYRPVQDLREVNKRVEDIHPTVPNPYNLLSGLPPSHQWYTVLDLKDAFFCLRLHPTSQPLFAFEWRDPEMGISGQLTWTRLPQGFKNSPTLFNEALHRDLADFRIQHPDLILLQYVDDLLLAATSEQDCQRGTRALLQTLGNLGYRASAKKAQICQKQVKYLGYLLKEGQRWLTEARKETVMGQPTPKTPRQLREFLGTAGFCRLWIPGFAEMAAPLYPLTKPGTLFNWGPDQQKAYQEIKQALLTAPALGLPDLTKPFELFVDEKQGYAKGVLTQKLGPWRRPVAYLSKKLDPVAAGWPPCLRMVAAIAVLTKDAGKLTMGQPLVILAPHAVEALVKQPPDRWLSNARMTHYQAMLLDTDRVQFGPVVALNPATLLPLPEKEAPHDCLEILAETHGTRPDLTDQPIPDADYTWYTDGSSFLQEGQRRAGAAVTTETEVIWARALPAGTSAQRAELIALTQALKMAEGKKLNVYTDSRYAFATAHVHGEIYRRRGWLTSEGREIKNKNEILALLKALFLPKRLSIIHCPGHQKGNSAEARGNRMADQAAREAAMKAVLETSTLLAGKRTADGSEFEKRTADGSEFESPKKKAKVE

SEQ ID NO: 1006 - protein, 2131 aa, synthetic construct
MPAAKRVKLDGGDKKYSIGLDIGTNSVGWAVITDEYKVPSKKFKVLGNTDRHSIKKNLIGALLFDSGETAEATRLKRTARRRYTRRKNRICYLQEIFSNEMAKVDDSFFHRLEESFLVEEDKKHERHPIFGNIVDEVAYHEKYPTIYHLRKKLVDSTDKADLRLIYLALAHMIKFRGHFLIEGDLNPDNSDVDKLFIQLVQTYNQLFEENPINASGVDAKAILSARLSKSRRLENLIAQLPGEKKNGLFGNLIALSLGLTPNFKSNFDLAEDAKLQLSKDTYDDDLDNLLAQIGDQYADLFLAAKNLSDAILLSDILRVNTEITKAPLSASMIKRYDEHHQDLTLLKALVRQQLPEKYKEIFFDQSKNGYAGYIDGGASQEEFYKFIKPILEKMDGTEELLVKLNREDLLRKQRTFDNGSIPHQIHLGELHAILRRQEDFYPFLKDNREKIEKILTFRIPYYVGPLARGNSRFAWMTRKSEETITPWNFEEVVDKGASAQSFIERMTNFDKNLPNEKVLPKHSLLYEYFTVYNELTKVKYVTEGMRKPAFLSGEQKKAIVDLLFKTNRKVTVKQLKEDYFKKIECFDSVEISGVEDRFNASLGTYHDLLKIIKDKDFLDNEENEDILEDIVLTLTLFEDREMIEERLKTYAHLFDDKVMKQLKRRRYTGWGRLSRKLINGIRDKQSGKTILDFLKSDGFANRNFMQLIHDDSLTFKEDIQKAQVSGQGDSLHEHIANLAGSPAIKKGILQTVKVVDELVKVMGRHKPENIVIEMARENQTTQKGQKNSRERMKRIEEGIKELGSQILKEHPVENTQLQNEKLYLYYLQNGRDMYVDQELDINRLSDYDVDHIVPQSFLKDDSIDNKVLTRSDKARGKSDNVPSEEVVKKMKNYWRQLLNAKLITQRKFDNLTKAERGGLSELDKAGFIKRQLVETRQITKHVAQILDSRMNTKYDENDKLIREVKVITLKSKLVSDFRKDFQFYKVREINNYHHAHDAYLNAVVGTALIKKYPKLESEFVYGDYKVYDVRKMIAKSEQEIGKATAKYFFYSNIMNFFKTEITLANGEIRKRPLIETNGETGEIVWDKGRDFATVRKVLSMPQVNIVKKTEVQTGGFSKESILPKRNSDKLIARKKDWDPKKYGGFDSPTVAYSVLVVAKVEKGKSKKLKSVKELLGITIMERSSFEKNPIDFLEAKGYKEVKKDLIIKLPKYSLFELENGRKRMLASAGELQKGNELALPSKYVNFLYLASHYEKLKGSPEDNEQKQLFVEQHKHYLDEIIEQISEFSKRVILADANLDKVLSAYNKHRDKPIREQAENIIHLFTLTNLGAPAAFKYFDTTIDRKRYTSTKEVLDATLIHQSITGLYETRIDLSQLGGDGGAEAAAKEAAAKEAAAKEAAAKALEAEAAAKEAAAKEAAAKEAAAKAGGTLNIEDEYRLHETSKEPDVPLGSTWLSDFPQAWAETGGMGLAVRQAPLIIPLKATSTPVSIKQYPMSQEARLGIKPHIQRLLDQGILVPCQSPWNTPLLPVKKPGTNDYRPVQDLREVNKRVEDIHPTVPNPYNLLSGLPPSHQWYTVLDLKDAFFCLRLHPTSQPLFAFEWRDPEMGISGQLTWTRLPQGFKNSPTLFNEALHRDLADFRIQHPDLILLQYVDDLLLAATSEQDCQRGTRALLQTLGNLGYRASAKKAQICQKQVKYLGYLLKEGQRWLTEARKETVMGQPTPKTPRQLREFLGKAGFCRLFIPGFAEMAAPLYPLTKPGTLFNWGPDQQKAYQEIKQALLTAPALGLPDLTKPFELFVDEKQGYAKGVLTQKLGPWRRPVAYLSKKLDPVAAGWPPCLRMVAAIAVLTKDAGKLTMGQPLVILAPHAVEALVKQPPDRWLSNARMTHYQAMLLDTDRVQFGPVVALNPATLLPLPEKEAPHDCLEILAETHGTRPDLTDQPIPDADYTWYTDGSSFLQEGQRRAGAAVTTETEVIWARALPAGTSAQRAELIALTQALKMAEGKKLNVYTDSRYAFATAHVHGEIYRRRGWLTSEGREIKNKNEILALLKALFLPKRLSIIHCPGHQKGNSAEARGNRMADQAAREAAMKAVLETSTLLAGKRTADGSEFEKRTADGSEFESPKKKAKVE

SEQ ID NO: 1007 - protein, 2096 aa, synthetic construct
MPAAKRVKLDGGDKKYSIGLDIGTNSVGWAVITDEYKVPSKKFKVLGNTDRHSIKKNLIGALLFDSGETAEATRLKRTARRRYTRRKNRICYLQEIFSNEMAKVDDSFFHRLEESFLVEEDKKHERHPIFGNIVDEVAYHEKYPTIYHLRKKLVDSTDKADLRLIYLALAHMIKFRGHFLIEGDLNPDNSDVDKLFIQLVQTYNQLFEENPINASGVDAKAILSARLSKSRRLENLIAQLPGEKKNGLFGNLIALSLGLTPNFKSNFDLAEDAKLQLSKDTYDDDLDNLLAQIGDQYADLFLAAKNLSDAILLSDILRVNTEITKAPLSASMIKRYDEHHQDLTLLKALVRQQLPEKYKEIFFDQSKNGYAGYIDGGASQEEFYKFIKPILEKMDGTEELLVKLNREDLLRKQRTFDNGSIPHQIHLGELHAILRRQEDFYPFLKDNREKIEKILTFRIPYYVGPLARGNSRFAWMTRKSEETITPWNFEEVVDKGASAQSFIERMTNFDKNLPNEKVLPKHSLLYEYFTVYNELTKVKYVTEGMRKPAFLSGEQKKAIVDLLFKTNRKVTVKQLKEDYFKKIECFDSVEISGVEDRFNASLGTYHDLLKIIKDKDFLDNEENEDILEDIVLTLTLFEDREMIEERLKTYAHLFDDKVMKQLKRRRYTGWGRLSRKLINGIRDKQSGKTILDFLKSDGFANRNFMQLIHDDSLTFKEDIQKAQVSGQGDSLHEHIANLAGSPAIKKGILQTVKVVDELVKVMGRHKPENIVIEMARENQTTQKGQKNSRERMKRIEEGIKELGSQILKEHPVENTQLQNEKLYLYYLQNGRDMYVDQELDINRLSDYDVDHIVPQSFLKDDSIDNKVLTRSDKARGKSDNVPSEEVVKKMKNYWRQLLNAKLITQRKFDNLTKAERGGLSELDKAGFIKRQLVETRQITKHVAQILDSRMNTKYDENDKLIREVKVITLKSKLVSDFRKDFQFYKVREINNYHHAHDAYLNAVVGTALIKKYPKLESEFVYGDYKVYDVRKMIAKSEQEIGKATAKYFFYSNIMNFFKTEITLANGEIRKRPLIETNGETGEIVWDKGRDFATVRKVLSMPQVNIVKKTEVQTGGFSKESILPKRNSDKLIARKKDWDPKKYGGFDSPTVAYSVLVVAKVEKGKSKKLKSVKELLGITIMERSSFEKNPIDFLEAKGYKEVKKDLIIKLPKYSLFELENGRKRMLASAGELQKGNELALPSKYVNFLYLASHYEKLKGSPEDNEQKQLFVEQHKHYLDEIIEQISEFSKRVILADANLDKVLSAYNKHRDKPIREQAENIIHLFTLTNLGAPAAFKYFDTTIDRKRYTSTKEVLDATLIHQSITGLYETRIDLSQLGGDGGPAPEAAAKGSSGGTLNIEDEYRLHETSKEPDVPLGSTWLSDFPQAWAETGGMGLAVRQAPLIIPLKATSTPVSIKQYPMSQEARLGIKPHIQRLLDQGILVPCQSPWNTPLLPVKKPGTNDYRPVQDLREVNKRVEDIHPTVPNPYNLLSGLPPSHQWYTVLDLKDAFFCLRLHPTSQPLFAFEWRDPEMGISGQLTWTRLPQGFKNSPTLFNEALHRDLADFRIQHPDLILLQYVDDLLLAATSEQDCQRGTRALLQTLGNLGYRASAKKAQICQKQVKYLGYLLKEGQRWLTEARKETVMGQPTPKTPRQLREFLGKAGFCRLFIPGFAEMAAPLYPLTKPGTLFNWGPDQQKAYQEIKQALLTAPALGLPDLTKPFELFVDEKQGYAKGVLTQKLGPWRRPVAYLSKKLDPVAAGWPPCLRMVAAIAVLTKDAGKLTMGQPLVILAPHAVEALVKQPPDRWLSNARMTHYQAMLLDTDRVQFGPVVALNPATLLPLPEKEAPHDCLEILAETHGTRPDLTDQPIPDADYTWYTDGSSFLQEGQRRAGAAVTTETEVIWARALPAGTSAQRAELIALTQALKMAEGKKLNVYTDSRYAFATAHVHGEIYRRRGWLTSEGREIKNKNEILALLKALFLPKRLSIIHCPGHQKGNSAEARGNRMADQAAREAAMKAVLETSTLLAGKRTADGSEFEKRTADGSEFESPKKKAKVE

SEQ ID NO: 1008 - protein, 2105 aa, synthetic construct
MPAAKRVKLDGGDKKYSIGLDIGTNSVGWAVITDEYKVPSKKFKVLGNTDRHSIKKNLIGALLFDSGETAEATRLKRTARRRYTRRKNRICYLQEIFSNEMAKVDDSFFHRLEESFLVEEDKKHERHPIFGNIVDEVAYHEKYPTIYHLRKKLVDSTDKADLRLIYLALAHMIKFRGHFLIEGDLNPDNSDVDKLFIQLVQTYNQLFEENPINASGVDAKAILSARLSKSRRLENLIAQLPGEKKNGLFGNLIALSLGLTPNFKSNFDLAEDAKLQLSKDTYDDDLDNLLAQIGDQYADLFLAAKNLSDAILLSDILRVNTEITKAPLSASMIKRYDEHHQDLTLLKALVRQQLPEKYKEIFFDQSKNGYAGYIDGGASQEEFYKFIKPILEKMDGTEELLVKLNREDLLRKQRTFDNGSIPHQIHLGELHAILRRQEDFYPFLKDNREKIEKILTFRIPYYVGPLARGNSRFAWMTRKSEETITPWNFEEVVDKGASAQSFIERMTNFDKNLPNEKVLPKHSLLYEYFTVYNELTKVKYVTEGMRKPAFLSGEQKKAIVDLLFKTNRKVTVKQLKEDYFKKIECFDSVEISGVEDRFNASLGTYHDLLKIIKDKDFLDNEENEDILEDIVLTLTLFEDREMIEERLKTYAHLFDDKVMKQLKRRRYTGWGRLSRKLINGIRDKQSGKTILDFLKSDGFANRNFMQLIHDDSLTFKEDIQKAQVSGQGDSLHEHIANLAGSPAIKKGILQTVKVVDELVKVMGRHKPENIVIEMARENQTTQKGQKNSRERMKRIEEGIKELGSQILKEHPVENTQLQNEKLYLYYLQNGRDMYVDQELDINRLSDYDVDHIVPQSFLKDDSIDNKVLTRSDKARGKSDNVPSEEVVKKMKNYWRQLLNAKLITQRKFDNLTKAERGGLSELDKAGFIKRQLVETRQITKHVAQILDSRMNTKYDENDKLIREVKVITLKSKLVSDFRKDFQFYKVREINNYHHAHDAYLNAVVGTALIKKYPKLESEFVYGDYKVYDVRKMIAKSEQEIGKATAKYFFYSNIMNFFKTEITLANGEIRKRPLIETNGETGEIVWDKGRDFATVRKVLSMPQVNIVKKTEVQTGGFSKESILPKRNSDKLIARKKDWDPKKYGGFDSPTVAYSVLVVAKVEKGKSKKLKSVKELLGITIMERSSFEKNPIDFLEAKGYKEVKKDLIIKLPKYSLFELENGRKRMLASAGELQKGNELALPSKYVNFLYLASHYEKLKGSPEDNEQKQLFVEQHKHYLDEIIEQISEFSKRVILADANLDKVLSAYNKHRDKPIREQAENIIHLFTLTNLGAPAAFKYFDTTIDRKRYTSTKEVLDATLIHQSITGLYETRIDLSQLGGDGGEAAAKEAAAKEAAAKEAAAKGGTLNIEDEYRLHETSKEPDVPLGSTWLSDFPQAWAETGGMGLAVRQAPLIIPLKATSTPVSIKQYPMSQEARLGIKPHIQRLLDQGILVPCQSPWNTPLLPVKKPGTNDYRPVQDLREVNKRVEDIHPTVPNPYNLLSGLPPSHQWYTVLDLKDAFFCLRLHPTSQPLFAFEWRDPEMGISGQLTWTRLPQGFKNSPTLFNEALHRDLADFRIQHPDLILLQYVDDLLLAATSEQDCQRGTRALLQTLGNLGYRASAKKAQICQKQVKYLGYLLKEGQRWLTEARKETVMGQPTPKTPRQLREFLGKAGFCRLFIPGFAEMAAPLYPLTKPGTLFNWGPDQQKAYQEIKQALLTAPALGLPDLTKPFELFVDEKQGYAKGVLTQKLGPWRRPVAYLSKKLDPVAAGWPPCLRMVAAIAVLTKDAGKLTMGQPLVILAPHAVEALVKQPPDRWLSNARMTHYQAMLLDTDRVQFGPVVALNPATLLPLPEKEAPHDCLEILAETHGTRPDLTDQPIPDADYTWYTDGSSFLQEGQRRAGAAVTTETEVIWARALPAGTSAQRAELIALTQALKMAEGKKLNVYTDSRYAFATAHVHGEIYRRRGWLTSEGREIKNKNEILALLKALFLPKRLSIIHCPGHQKGNSAEARGNRMADQAAREAAMKAVLETSTLLAGKRTADGSEFEKRTADGSEFESPKKKAKVE

SEQ ID NO: 1009 - protein, 2090 aa, synthetic construct
MPAAKRVKLDGGDKKYSIGLDIGTNSVGWAVITDEYKVPSKKFKVLGNTDRHSIKKNLIGALLFDSGETAEATRLKRTARRRYTRRKNRICYLQEIFSNEMAKVDDSFFHRLEESFLVEEDKKHERHPIFGNIVDEVAYHEKYPTIYHLRKKLVDSTDKADLRLIYLALAHMIKFRGHFLIEGDLNPDNSDVDKLFIQLVQTYNQLFEENPINASGVDAKAILSARLSKSRRLENLIAQLPGEKKNGLFGNLIALSLGLTPNFKSNFDLAEDAKLQLSKDTYDDDLDNLLAQIGDQYADLFLAAKNLSDAILLSDILRVNTEITKAPLSASMIKRYDEHHQDLTLLKALVRQQLPEKYKEIFFDQSKNGYAGYIDGGASQEEFYKFIKPILEKMDGTEELLVKLNREDLLRKQRTFDNGSIPHQIHLGELHAILRRQEDFYPFLKDNREKIEKILTFRIPYYVGPLARGNSRFAWMTRKSEETITPWNFEEVVDKGASAQSFIERMTNFDKNLPNEKVLPKHSLLYEYFTVYNELTKVKYVTEGMRKPAFLSGEQKKAIVDLLFKTNRKVTVKQLKEDYFKKIECFDSVEISGVEDRFNASLGTYHDLLKIIKDKDFLDNEENEDILEDIVLTLTLFEDREMIEERLKTYAHLFDDKVMKQLKRRRYTGWGRLSRKLINGIRDKQSGKTILDFLKSDGFANRNFMQLIHDDSLTFKEDIQKAQVSGQGDSLHEHIANLAGSPAIKKGILQTVKVVDELVKVMGRHKPENIVIEMARENQTTQKGQKNSRERMKRIEEGIKELGSQILKEHPVENTQLQNEKLYLYYLQNGRDMYVDQELDINRLSDYDVDHIVPQSFLKDDSIDNKVLTRSDKARGKSDNVPSEEVVKKMKNYWRQLLNAKLITQRKFDNLTKAERGGLSELDKAGFIKRQLVETRQITKHVAQILDSRMNTKYDENDKLIREVKVITLKSKLVSDFRKDFQFYKVREINNYHHAHDAYLNAVVGTALIKKYPKLESEFVYGDYKVYDVRKMIAKSEQEIGKATAKYFFYSNIMNFFKTEITLANGEIRKRPLIETNGETGEIVWDKGRDFATVRKVLSMPQVNIVKKTEVQTGGFSKESILPKRNSDKLIARKKDWDPKKYGGFDSPTVAYSVLVVAKVEKGKSKKLKSVKELLGITIMERSSFEKNPIDFLEAKGYKEVKKDLIIKLPKYSLFELENGRKRMLASAGELQKGNELALPSKYVNFLYLASHYEKLKGSPEDNEQKQLFVEQHKHYLDEIIEQISEFSKRVILADANLDKVLSAYNKHRDKPIREQAENIIHLFTLTNLGAPAAFKYFDTTIDRKRYTSTKEVLDATLIHQSITGLYETRIDLSQLGGDGGEAAAKGGTLNIEDEYRLHETSKEPDVPLGSTWLSDFPQAWAETGGMGLAVRQAPLIIPLKATSTPVSIKQYPMSQEARLGIKPHIQRLLDQGILVPCQSPWNTPLLPVKKPGTNDYRPVQDLREVNKRVEDIHPTVPNPYNLLSGLPPSHQWYTVLDLKDAFFCLRLHPTSQPLFAFEWRDPEMGISGQLTWTRLPQGFKNSPTLFNEALHRDLADFRIQHPDLILLQYVDDLLLAATSEQDCQRGTRALLQTLGNLGYRASAKKAQICQKQVKYLGYLLKEGQRWLTEARKETVMGQPTPKTPRQLREFLGKAGFCRLFIPGFAEMAAPLYPLTKPGTLFNWGPDQQKAYQEIKQALLTAPALGLPDLTKPFELFVDEKQGYAKGVLTQKLGPWRRPVAYLSKKLDPVAAGWPPCLRMVAAIAVLTKDAGKLTMGQPLVILAPHAVEALVKQPPDRWLSNARMTHYQAMLLDTDRVQFGPVVALNPATLLPLPEKEAPHDCLEILAETHGTRPDLTDQPIPDADYTWYTDGSSFLQEGQRRAGAAVTTETEVIWARALPAGTSAQRAELIALTQALKMAEGKKLNVYTDSRYAFATAHVHGEIYRRRGWLTSEGREIKNKNEILALLKALFLPKRLSIIHCPGHQKGNSAEARGNRMADQAAREAAMKAVLETSTLLAGKRTADGSEFEKRTADGSEFESPKKKAKVE

SEQ ID NO: 1010 - protein, 2096 aa, synthetic construct
MPAAKRVKLDGGDKKYSIGLDIGTNSVGWAVITDEYKVPSKKFKVLGNTDRHSIKKNLIGALLFDSGETAEATRLKRTARRRYTRRKNRICYLQEIFSNEMAKVDDSFFHRLEESFLVEEDKKHERHPIFGNIVDEVAYHEKYPTIYHLRKKLVDSTDKADLRLIYLALAHMIKFRGHFLIEGDLNPDNSDVDKLFIQLVQTYNQLFEENPINASGVDAKAILSARLSKSRRLENLIAQLPGEKKNGLFGNLIALSLGLTPNFKSNFDLAEDAKLQLSKDTYDDDLDNLLAQIGDQYADLFLAAKNLSDAILLSDILRVNTEITKAPLSASMIKRYDEHHQDLTLLKALVRQQLPEKYKEIFFDQSKNGYAGYIDGGASQEEFYKFIKPILEKMDGTEELLVKLNREDLLRKQRTFDNGSIPHQIHLGELHAILRRQEDFYPFLKDNREKIEKILTFRIPYYVGPLARGNSRFAWMTRKSEETITPWNFEEVVDKGASAQSFIERMTNFDKNLPNEKVLPKHSLLYEYFTVYNELTKVKYVTEGMRKPAFLSGEQKKAIVDLLFKTNRKVTVKQLKEDYFKKIECFDSVEISGVEDRFNASLGTYHDLLKIIKDKDFLDNEENEDILEDIVLTLTLFEDREMIEERLKTYAHLFDDKVMKQLKRRRYTGWGRLSRKLINGIRDKQSGKTILDFLKSDGFANRNFMQLIHDDSLTFKEDIQKAQVSGQGDSLHEHIANLAGSPAIKKGILQTVKVVDELVKVMGRHKPENIVIEMARENQTTQKGQKNSRERMKRIEEGIKELGSQILKEHPVENTQLQNEKLYLYYLQNGRDMYVDQELDINRLSDYDVDHIVPQSFLKDDSIDNKVLTRSDKARGKSDNVPSEEVVKKMKNYWRQLLNAKLITQRKFDNLTKAERGGLSELDKAGFIKRQLVETRQITKHVAQILDSRMNTKYDENDKLIREVKVITLKSKLVSDFRKDFQFYKVREINNYHHAHDAYLNAVVGTALIKKYPKLESEFVYGDYKVYDVRKMIAKSEQEIGKATAKYFFYSNIMNFFKTEITLANGEIRKRPLIETNGETGEIVWDKGRDFATVRKVLSMPQVNIVKKTEVQTGGFSKESILPKRNSDKLIARKKDWDPKKYGGFDSPTVAYSVLVVAKVEKGKSKKLKSVKELLGITIMERSSFEKNPIDFLEAKGYKEVKKDLIIKLPKYSLFELENGRKRMLASAGELQKGNELALPSKYVNFLYLASHYEKLKGSPEDNEQKQLFVEQHKHYLDEIIEQISEFSKRVILADANLDKVLSAYNKHRDKPIREQAENIIHLFTLTNLGAPAAFKYFDTTIDRKRYTSTKEVLDATLIHQSITGLYETRIDLSQLGGDGGGSSPAPEAAAKGGTLNIEDEYRLHETSKEPDVPLGSTWLSDFPQAWAETGGMGLAVRQAPLIIPLKATSTPVSIKQYPMSQEARLGIKPHIQRLLDQGILVPCQSPWNTPLLPVKKPGTNDYRPVQDLREVNKRVEDIHPTVPNPYNLLSGLPPSHQWYTVLDLKDAFFCLRLHPTSQPLFAFEWRDPEMGISGQLTWTRLPQGFKNSPTLFNEALHRDLADFRIQHPDLILLQYVDDLLLAATSEQDCQRGTRALLQTLGNLGYRASAKKAQICQKQVKYLGYLLKEGQRWLTEARKETVMGQPTPKTPRQLREFLGKAGFCRLFIPGFAEMAAPLYPLTKPGTLFNWGPDQQKAYQEIKQALLTAPALGLPDLTKPFELFVDEKQGYAKGVLTQKLGPWRRPVAYLSKKLDPVAAGWPPCLRMVAAIAVLTKDAGKLTMGQPLVILAPHAVEALVKQPPDRWLSNARMTHYQAMLLDTDRVQFGPVVALNPATLLPLPEKEAPHDCLEILAETHGTRPDLTDQPIPDADYTWYTDGSSFLQEGQRRAGAAVTTETEVIWARALPAGTSAQRAELIALTQALKMAEGKKLNVYTDSRYAFATAHVHGEIYRRRGWLTSEGREIKNKNEILALLKALFLPKRLSIIHCPGHQKGNSAEARGNRMADQAAREAAMKAVLETSTLLAGKRTADGSEFEKRTADGSEFESPKKKAKVE

SEQ ID NO: 1011 - protein, 2088 aa, synthetic construct
MPAAKRVKLDGGDKKYSIGLDIGTNSVGWAVITDEYKVPSKKFKVLGNTDRHSIKKNLIGALLFDSGETAEATRLKRTARRRYTRRKNRICYLQEIFSNEMAKVDDSFFHRLEESFLVEEDKKHERHPIFGNIVDEVAYHEKYPTIYHLRKKLVDSTDKADLRLIYLALAHMIKFRGHFLIEGDLNPDNSDVDKLFIQLVQTYNQLFEENPINASGVDAKAILSARLSKSRRLENLIAQLPGEKKNGLFGNLIALSLGLTPNFKSNFDLAEDAKLQLSKDTYDDDLDNLLAQIGDQYADLFLAAKNLSDAILLSDILRVNTEITKAPLSASMIKRYDEHHQDLTLLKALVRQQLPEKYKEIFFDQSKNGYAGYIDGGASQEEFYKFIKPILEKMDGTEELLVKLNREDLLRKQRTFDNGSIPHQIHLGELHAILRRQEDFYPFLKDNREKIEKILTFRIPYYVGPLARGNSRFAWMTRKSEETITPWNFEEVVDKGASAQSFIERMTNFDKNLPNEKVLPKHSLLYEYFTVYNELTKVKYVTEGMRKPAFLSGEQKKAIVDLLFKTNRKVTVKQLKEDYFKKIECFDSVEISGVEDRFNASLGTYHDLLKIIKDKDFLDNEENEDILEDIVLTLTLFEDREMIEERLKTYAHLFDDKVMKQLKRRRYTGWGRLSRKLINGIRDKQSGKTILDFLKSDGFANRNFMQLIHDDSLTFKEDIQKAQVSGQGDSLHEHIANLAGSPAIKKGILQTVKVVDELVKVMGRHKPENIVIEMARENQTTQKGQKNSRERMKRIEEGIKELGSQILKEHPVENTQLQNEKLYLYYLQNGRDMYVDQELDINRLSDYDVDHIVPQSFLKDDSIDNKVLTRSDKARGKSDNVPSEEVVKKMKNYWRQLLNAKLITQRKFDNLTKAERGGLSELDKAGFIKRQLVETRQITKHVAQILDSRMNTKYDENDKLIREVKVITLKSKLVSDFRKDFQFYKVREINNYHHAHDAYLNAVVGTALIKKYPKLESEFVYGDYKVYDVRKMIAKSEQEIGKATAKYFFYSNIMNFFKTEITLANGEIRKRPLIETNGETGEIVWDKGRDFATVRKVLSMPQVNIVKKTEVQTGGFSKESILPKRNSDKLIARKKDWDPKKYGGFDSPTVAYSVLVVAKVEKGKSKKLKSVKELLGITIMERSSFEKNPIDFLEAKGYKEVKKDLIIKLPKYSLFELENGRKRMLASAGELQKGNELALPSKYVNFLYLASHYEKLKGSPEDNEQKQLFVEQHKHYLDEIIEQISEFSKRVILADANLDKVLSAYNKHRDKPIREQAENIIHLFTLTNLGAPAAFKYFDTTIDRKRYTSTKEVLDATLIHQSITGLYETRIDLSQLGGDGGGSSGGTLNIEDEYRLHETSKEPDVPLGSTWLSDFPQAWAETGGMGLAVRQAPLIIPLKATSTPVSIKQYPMSQEARLGIKPHIQRLLDQGILVPCQSPWNTPLLPVKKPGTNDYRPVQDLREVNKRVEDIHPTVPNPYNLLSGLPPSHQWYTVLDLKDAFFCLRLHPTSQPLFAFEWRDPEMGISGQLTWTRLPQGFKNSPTLFNEALHRDLADFRIQHPDLILLQYVDDLLLAATSEQDCQRGTRALLQTLGNLGYRASAKKAQICQKQVKYLGYLLKEGQRWLTEARKETVMGQPTPKTPRQLREFLGKAGFCRLFIPGFAEMAAPLYPLTKPGTLFNWGPDQQKAYQEIKQALLTAPALGLPDLTKPFELFVDEKQGYAKGVLTQKLGPWRRPVAYLSKKLDPVAAGWPPCLRMVAAIAVLTKDAGKLTMGQPLVILAPHAVEALVKQPPDRWLSNARMTHYQAMLLDTDRVQFGPVVALNPATLLPLPEKEAPHDCLEILAETHGTRPDLTDQPIPDADYTWYTDGSSFLQEGQRRAGAAVTTETEVIWARALPAGTSAQRAELIALTQALKMAEGKKLNVYTDSRYAFATAHVHGEIYRRRGWLTSEGREIKNKNEILALLKALFLPKRLSIIHCPGHQKGNSAEARGNRMADQAAREAAMKAVLETSTLLAGKRTADGSEFEKRTADGSEFESPKKKAKVE

SEQ ID NO: 1012 - protein, 2096 aa, synthetic construct
MPAAKRVKLDGGDKKYSIGLDIGTNSVGWAVITDEYKVPSKKFKVLGNTDRHSIKKNLIGALLFDSGETAEATRLKRTARRRYTRRKNRICYLQEIFSNEMAKVDDSFFHRLEESFLVEEDKKHERHPIFGNIVDEVAYHEKYPTIYHLRKKLVDSTDKADLRLIYLALAHMIKFRGHFLIEGDLNPDNSDVDKLFIQLVQTYNQLFEENPINASGVDAKAILSARLSKSRRLENLIAQLPGEKKNGLFGNLIALSLGLTPNFKSNFDLAEDAKLQLSKDTYDDDLDNLLAQIGDQYADLFLAAKNLSDAILLSDILRVNTEITKAPLSASMIKRYDEHHQDLTLLKALVRQQLPEKYKEIFFDQSKNGYAGYIDGGASQEEFYKFIKPILEKMDGTEELLVKLNREDLLRKQRTFDNGSIPHQIHLGELHAILRRQEDFYPFLKDNREKIEKILTFRIPYYVGPLARGNSRFAWMTRKSEETITPWNFEEVVDKGASAQSFIERMTNFDKNLPNEKVLPKHSLLYEYFTVYNELTKVKYVTEGMRKPAFLSGEQKKAIVDLLFKTNRKVTVKQLKEDYFKKIECFDSVEISGVEDRFNASLGTYHDLLKIIKDKDFLDNEENEDILEDIVLTLTLFEDREMIEERLKTYAHLFDDKVMKQLKRRRYTGWGRLSRKLINGIRDKQSGKTILDFLKSDGFANRNFMQLIHDDSLTFKEDIQKAQVSGQGDSLHEHIANLAGSPAIKKGILQTVKVVDELVKVMGRHKPENIVIEMARENQTTQKGQKNSRERMKRIEEGIKELGSQILKEHPVENTQLQNEKLYLYYLQNGRDMYVDQELDINRLSDYDVDHIVPQSFLKDDSIDNKVLTRSDKARGKSDNVPSEEVVKKMKNYWRQLLNAKLITQRKFDNLTKAERGGLSELDKAGFIKRQLVETRQITKHVAQILDSRMNTKYDENDKLIREVKVITLKSKLVSDFRKDFQFYKVREINNYHHAHDAYLNAVVGTALIKKYPKLESEFVYGDYKVYDVRKMIAKSEQEIGKATAKYFFYSNIMNFFKTEITLANGEIRKRPLIETNGETGEIVWDKGRDFATVRKVLSMPQVNIVKKTEVQTGGFSKESILPKRNSDKLIARKKDWDPKKYGGFDSPTVAYSVLVVAKVEKGKSKKLKSVKELLGITIMERSSFEKNPIDFLEAKGYKEVKKDLIIKLPKYSLFELENGRKRMLASAGELQKGNELALPSKYVNFLYLASHYEKLKGSPEDNEQKQLFVEQHKHYLDEIIEQISEFSKRVILADANLDKVLSAYNKHRDKPIREQAENIIHLFTLTNLGAPAAFKYFDTTIDRKRYTSTKEVLDATLIHQSITGLYETRIDLSQLGGDGGEAAAKGSSGGGGGTLNIEDEYRLHETSKEPDVPLGSTWLSDFPQAWAETGGMGLAVRQAPLIIPLKATSTPVSIKQYPMSQEARLGIKPHIQRLLDQGILVPCQSPWNTPLLPVKKPGTNDYRPVQDLREVNKRVEDIHPTVPNPYNLLSGLPPSHQWYTVLDLKDAFFCLRLHPTSQPLFAFEWRDPEMGISGQLTWTRLPQGFKNSPTLFNEALHRDLADFRIQHPDLILLQYVDDLLLAATSEQDCQRGTRALLQTLGNLGYRASAKKAQICQKQVKYLGYLLKEGQRWLTEARKETVMGQPTPKTPRQLREFLGKAGFCRLFIPGFAEMAAPLYPLTKPGTLFNWGPDQQKAYQEIKQALLTAPALGLPDLTKPFELFVDEKQGYAKGVLTQKLGPWRRPVAYLSKKLDPVAAGWPPCLRMVAAIAVLTKDAGKLTMGQPLVILAPHAVEALVKQPPDRWLSNARMTHYQAMLLDTDRVQFGPVVALNPATLLPLPEKEAPHDCLEILAETHGTRPDLTDQPIPDADYTWYTDGSSFLQEGQRRAGAAVTTETEVIWARALPAGTSAQRAELIALTQALKMAEGKKLNVYTDSRYAFATAHVHGEIYRRRGWLTSEGREIKNKNEILALLKALFLPKRLSIIHCPGHQKGNSAEARGNRMADQAAREAAMKAVLETSTLLAGKRTADGSEFEKRTADGSEFESPKKKAKVE

SEQ ID NO: 1013 - protein, 2094 aa, synthetic construct
MPAAKRVKLDGGDKKYSIGLDIGTNSVGWAVITDEYKVPSKKFKVLGNTDRHSIKKNLIGALLFDSGETAEATRLKRTARRRYTRRKNRICYLQEIFSNEMAKVDDSFFHRLEESFLVEEDKKHERHPIFGNIVDEVAYHEKYPTIYHLRKKLVDSTDKADLRLIYLALAHMIKFRGHFLIEGDLNPDNSDVDKLFIQLVQTYNQLFEENPINASGVDAKAILSARLSKSRRLENLIAQLPGEKKNGLFGNLIALSLGLTPNFKSNFDLAEDAKLQLSKDTYDDDLDNLLAQIGDQYADLFLAAKNLSDAILLSDILRVNTEITKAPLSASMIKRYDEHHQDLTLLKALVRQQLPEKYKEIFFDQSKNGYAGYIDGGASQEEFYKFIKPILEKMDGTEELLVKLNREDLLRKQRTFDNGSIPHQIHLGELHAILRRQEDFYPFLKDNREKIEKILTFRIPYYVGPLARGNSRFAWMTRKSEETITPWNFEEVVDKGASAQSFIERMTNFDKNLPNEKVLPKHSLLYEYFTVYNELTKVKYVTEGMRKPAFLSGEQKKAIVDLLFKTNRKVTVKQLKEDYFKKIECFDSVEISGVEDRFNASLGTYHDLLKIIKDKDFLDNEENEDILEDIVLTLTLFEDREMIEERLKTYAHLFDDKVMKQLKRRRYTGWGRLSRKLINGIRDKQSGKTILDFLKSDGFANRNFMQLIHDDSLTFKEDIQKAQVSGQGDSLHEHIANLAGSPAIKKGILQTVKVVDELVKVMGRHKPENIVIEMARENQTTQKGQKNSRERMKRIEEGIKELGSQILKEHPVENTQLQNEKLYLYYLQNGRDMYVDQELDINRLSDYDVDHIVPQSFLKDDSIDNKVLTRSDKARGKSDNVPSEEVVKKMKNYWRQLLNAKLITQRKFDNLTKAERGGLSELDKAGFIKRQLVETRQITKHVAQILDSRMNTKYDENDKLIREVKVITLKSKLVSDFRKDFQFYKVREINNYHHAHDAYLNAVVGTALIKKYPKLESEFVYGDYKVYDVRKMIAKSEQEIGKATAKYFFYSNIMNFFKTEITLANGEIRKRPLIETNGETGEIVWDKGRDFATVRKVLSMPQVNIVKKTEVQTGGFSKESILPKRNSDKLIARKKDWDPKKYGGFDSPTVAYSVLVVAKVEKGKSKKLKSVKELLGITIMERSSFEKNPIDFLEAKGYKEVKKDLIIKLPKYSLFELENGRKRMLASAGELQKGNELALPSKYVNFLYLASHYEKLKGSPEDNEQKQLFVEQHKHYLDEIIEQISEFSKRVILADANLDKVLSAYNKHRDKPIREQAENIIHLFTLTNLGAPAAFKYFDTTIDRKRYTSTKEVLDATLIHQSITGLYETRIDLSQLGGDGGGGGPAPGSSGGTLNIEDEYRLHETSKEPDVPLGSTWLSDFPQAWAETGGMGLAVRQAPLIIPLKATSTPVSIKQYPMSQEARLGIKPHIQRLLDQGILVPCQSPWNTPLLPVKKPGTNDYRPVQDLREVNKRVEDIHPTVPNPYNLLSGLPPSHQWYTVLDLKDAFFCLRLHPTSQPLFAFEWRDPEMGISGQLTWTRLPQGFKNSPTLFNEALHRDLADFRIQHPDLILLQYVDDLLLAATSEQDCQRGTRALLQTLGNLGYRASAKKAQICQKQVKYLGYLLKEGQRWLTEARKETVMGQPTPKTPRQLREFLGKAGFCRLFIPGFAEMAAPLYPLTKPGTLFNWGPDQQKAYQEIKQALLTAPALGLPDLTKPFELFVDEKQGYAKGVLTQKLGPWRRPVAYLSKKLDPVAAGWPPCLRMVAAIAVLTKDAGKLTMGQPLVILAPHAVEALVKQPPDRWLSNARMTHYQAMLLDTDRVQFGPVVALNPATLLPLPEKEAPHDCLEILAETHGTRPDLTDQPIPDADYTWYTDGSSFLQEGQRRAGAAVTTETEVIWARALPAGTSAQRAELIALTQALKMAEGKKLNVYTDSRYAFATAHVHGEIYRRRGWLTSEGREIKNKNEILALLKALFLPKRLSIIHCPGHQKGNSAEARGNRMADQAAREAAMKAVLETSTLLAGKRTADGSEFEKRTADGSEFESPKKKAKVE

SEQ ID NO: 1014 - protein, 2094 aa, synthetic construct
MPAAKRVKLDGGDKKYSIGLDIGTNSVGWAVITDEYKVPSKKFKVLGNTDRHSIKKNLIGALLFDSGETAEATRLKRTARRRYTRRKNRICYLQEIFSNEMAKVDDSFFHRLEESFLVEEDKKHERHPIFGNIVDEVAYHEKYPTIYHLRKKLVDSTDKADLRLIYLALAHMIKFRGHFLIEGDLNPDNSDVDKLFIQLVQTYNQLFEENPINASGVDAKAILSARLSKSRRLENLIAQLPGEKKNGLFGNLIALSLGLTPNFKSNFDLAEDAKLQLSKDTYDDDLDNLLAQIGDQYADLFLAAKNLSDAILLSDILRVNTEITKAPLSASMIKRYDEHHQDLTLLKALVRQQLPEKYKEIFFDQSKNGYAGYIDGGASQEEFYKFIKPILEKMDGTEELLVKLNREDLLRKQRTFDNGSIPHQIHLGELHAILRRQEDFYPFLKDNREKIEKILTFRIPYYVGPLARGNSRFAWMTRKSEETITPWNFEEVVDKGASAQSFIERMTNFDKNLPNEKVLPKHSLLYEYFTVYNELTKVKYVTEGMRKPAFLSGEQKKAIVDLLFKTNRKVTVKQLKEDYFKKIECFDSVEISGVEDRFNASLGTYHDLLKIIKDKDFLDNEENEDILEDIVLTLTLFEDREMIEERLKTYAHLFDDKVMKQLKRRRYTGWGRLSRKLINGIRDKQSGKTILDFLKSDGFANRNFMQLIHDDSLTFKEDIQKAQVSGQGDSLHEHIANLAGSPAIKKGILQTVKVVDELVKVMGRHKPENIVIEMARENQTTQKGQKNSRERMKRIEEGIKELGSQILKEHPVENTQLQNEKLYLYYLQNGRDMYVDQELDINRLSDYDVDHIVPQSFLKDDSIDNKVLTRSDKARGKSDNVPSEEVVKKMKNYWRQLLNAKLITQRKFDNLTKAERGGLSELDKAGFIKRQLVETRQITKHVAQILDSRMNTKYDENDKLIREVKVITLKSKLVSDFRKDFQFYKVREINNYHHAHDAYLNAVVGTALIKKYPKLESEFVYGDYKVYDVRKMIAKSEQEIGKATAKYFFYSNIMNFFKTEITLANGEIRKRPLIETNGETGEIVWDKGRDFATVRKVLSMPQVNIVKKTEVQTGGFSKESILPKRNSDKLIARKKDWDPKKYGGFDSPTVAYSVLVVAKVEKGKSKKLKSVKELLGITIMERSSFEKNPIDFLEAKGYKEVKKDLIIKLPKYSLFELENGRKRMLASAGELQKGNELALPSKYVNFLYLASHYEKLKGSPEDNEQKQLFVEQHKHYLDEIIEQISEFSKRVILADANLDKVLSAYNKHRDKPIREQAENIIHLFTLTNLGAPAAFKYFDTTIDRKRYTSTKEVLDATLIHQSITGLYETRIDLSQLGGDGGGSSPAPGGSGGTLNIEDEYRLHETSKEPDVPLGSTWLSDFPQAWAETGGMGLAVRQAPLIIPLKATSTPVSIKQYPMSQEARLGIKPHIQRLLDQGILVPCQSPWNTPLLPVKKPGTNDYRPVQDLREVNKRVEDIHPTVPNPYNLLSGLPPSHQWYTVLDLKDAFFCLRLHPTSQPLFAFEWRDPEMGISGQLTWTRLPQGFKNSPTLFNEALHRDLADFRIQHPDLILLQYVDDLLLAATSEQDCQRGTRALLQTLGNLGYRASAKKAQICQKQVKYLGYLLKEGQRWLTEARKETVMGQPTPKTPRQLREFLGKAGFCRLFIPGFAEMAAPLYPLTKPGTLFNWGPDQQKAYQEIKQALLTAPALGLPDLTKPFELFVDEKQGYAKGVLTQKLGPWRRPVAYLSKKLDPVAAGWPPCLRMVAAIAVLTKDAGKLTMGQPLVILAPHAVEALVKQPPDRWLSNARMTHYQAMLLDTDRVQFGPVVALNPATLLPLPEKEAPHDCLEILAETHGTRPDLTDQPIPDADYTWYTDGSSFLQEGQRRAGAAVTTETEVIWARALPAGTSAQRAELIALTQALKMAEGKKLNVYTDSRYAFATAHVHGEIYRRRGWLTSEGREIKNKNEILALLKALFLPKRLSIIHCPGHQKGNSAEARGNRMADQAAREAAMKAVLETSTLLAGKRTADGSEFEKRTADGSEFESPKKKAKVE

SEQ ID NO: 1015 - protein, 2094 aa, synthetic construct
MPAAKRVKLDGGDKKYSIGLDIGTNSVGWAVITDEYKVPSKKFKVLGNTDRHSIKKNLIGALLFDSGETAEATRLKRTARRRYTRRKNRICYLQEIFSNEMAKVDDSFFHRLEESFLVEEDKKHERHPIFGNIVDEVAYHEKYPTIYHLRKKLVDSTDKADLRLIYLALAHMIKFRGHFLIEGDLNPDNSDVDKLFIQLVQTYNQLFEENPINASGVDAKAILSARLSKSRRLENLIAQLPGEKKNGLFGNLIALSLGLTPNFKSNFDLAEDAKLQLSKDTYDDDLDNLLAQIGDQYADLFLAAKNLSDAILLSDILRVNTEITKAPLSASMIKRYDEHHQDLTLLKALVRQQLPEKYKEIFFDQSKNGYAGYIDGGASQEEFYKFIKPILEKMDGTEELLVKLNREDLLRKQRTFDNGSIPHQIHLGELHAILRRQEDFYPFLKDNREKIEKILTFRIPYYVGPLARGNSRFAWMTRKSEETITPWNFEEVVDKGASAQSFIERMTNFDKNLPNEKVLPKHSLLYEYFTVYNELTKVKYVTEGMRKPAFLSGEQKKAIVDLLFKTNRKVTVKQLKEDYFKKIECFDSVEISGVEDRFNASLGTYHDLLKIIKDKDFLDNEENEDILEDIVLTLTLFEDREMIEERLKTYAHLFDDKVMKQLKRRRYTGWGRLSRKLINGIRDKQSGKTILDFLKSDGFANRNFMQLIHDDSLTFKEDIQKAQVSGQGDSLHEHIANLAGSPAIKKGILQTVKVVDELVKVMGRHKPENIVIEMARENQTTQKGQKNSRERMKRIEEGIKELGSQILKEHPVENTQLQNEKLYLYYLQNGRDMYVDQELDINRLSDYDVDHIVPQSFLKDDSIDNKVLTRSDKARGKSDNVPSEEVVKKMKNYWRQLLNAKLITQRKFDNLTKAERGGLSELDKAGFIKRQLVETRQITKHVAQILDSRMNTKYDENDKLIREVKVITLKSKLVSDFRKDFQFYKVREINNYHHAHDAYLNAVVGTALIKKYPKLESEFVYGDYKVYDVRKMIAKSEQEIGKATAKYFFYSNIMNFFKTEITLANGEIRKRPLIETNGETGEIVWDKGRDFATVRKVLSMPQVNIVKKTEVQTGGFSKESILPKRNSDKLIARKKDWDPKKYGGFDSPTVAYSVLVVAKVEKGKSKKLKSVKELLGITIMERSSFEKNPIDFLEAKGYKEVKKDLIIKLPKYSLFELENGRKRMLASAGELQKGNELALPSKYVNFLYLASHYEKLKGSPEDNEQKQLFVEQHKHYLDEIIEQISEFSKRVILADANLDKVLSAYNKHRDKPIREQAENIIHLFTLTNLGAPAAFKYFDTTIDRKRYTSTKEVLDATLIHQSITGLYETRIDLSQLGGDGGGGGGGSPAPGGTLNIEDEYRLHETSKEPDVPLGSTWLSDFPQAWAETGGMGLAVRQAPLIIPLKATSTPVSIKQYPMSQEARLGIKPHIQRLLDQGILVPCQSPWNTPLLPVKKPGTNDYRPVQDLREVNKRVEDIHPTVPNPYNLLSGLPPSHQWYTVLDLKDAFFCLRLHPTSQPLFAFEWRDPEMGISGQLTWTRLPQGFKNSPTLFNEALHRDLADFRIQHPDLILLQYVDDLLLAATSEQDCQRGTRALLQTLGNLGYRASAKKAQICQKQVKYLGYLLKEGQRWLTEARKETVMGQPTPKTPRQLREFLGKAGFCRLFIPGFAEMAAPLYPLTKPGTLFNWGPDQQKAYQEIKQALLTAPALGLPDLTKPFELFVDEKQGYAKGVLTQKLGPWRRPVAYLSKKLDPVAAGWPPCLRMVAAIAVLTKDAGKLTMGQPLVILAPHAVEALVKQPPDRWLSNARMTHYQAMLLDTDRVQFGPVVALNPATLLPLPEKEAPHDCLEILAETHGTRPDLTDQPIPDADYTWYTDGSSFLQEGQRRAGAAVTTETEVIWARALPAGTSAQRAELIALTQALKMAEGKKLNVYTDSRYAFATAHVHGEIYRRRGWLTSEGREIKNKNEILALLKALFLPKRLSIIHCPGHQKGNSAEARGNRMADQAAREAAMKAVLETSTLLAGKRTADGSEFEKRTADGSEFESPKKKAKVE

SEQ ID NO: 1016 - protein, 2091 aa, synthetic construct
MPAAKRVKLDGGDKKYSIGLDIGTNSVGWAVITDEYKVPSKKFKVLGNTDRHSIKKNLIGALLFDSGETAEATRLKRTARRRYTRRKNRICYLQEIFSNEMAKVDDSFFHRLEESFLVEEDKKHERHPIFGNIVDEVAYHEKYPTIYHLRKKLVDSTDKADLRLIYLALAHMIKFRGHFLIEGDLNPDNSDVDKLFIQLVQTYNQLFEENPINASGVDAKAILSARLSKSRRLENLIAQLPGEKKNGLFGNLIALSLGLTPNFKSNFDLAEDAKLQLSKDTYDDDLDNLLAQIGDQYADLFLAAKNLSDAILLSDILRVNTEITKAPLSASMIKRYDEHHQDLTLLKALVRQQLPEKYKEIFFDQSKNGYAGYIDGGASQEEFYKFIKPILEKMDGTEELLVKLNREDLLRKQRTFDNGSIPHQIHLGELHAILRRQEDFYPFLKDNREKIEKILTFRIPYYVGPLARGNSRFAWMTRKSEETITPWNFEEVVDKGASAQSFIERMTNFDKNLPNEKVLPKHSLLYEYFTVYNELTKVKYVTEGMRKPAFLSGEQKKAIVDLLFKTNRKVTVKQLKEDYFKKIECFDSVEISGVEDRFNASLGTYHDLLKIIKDKDFLDNEENEDILEDIVLTLTLFEDREMIEERLKTYAHLFDDKVMKQLKRRRYTGWGRLSRKLINGIRDKQSGKTILDFLKSDGFANRNFMQLIHDDSLTFKEDIQKAQVSGQGDSLHEHIANLAGSPAIKKGILQTVKVVDELVKVMGRHKPENIVIEMARENQTTQKGQKNSRERMKRIEEGIKELGSQILKEHPVENTQLQNEKLYLYYLQNGRDMYVDQELDINRLSDYDVDHIVPQSFLKDDSIDNKVLTRSDKARGKSDNVPSEEVVKKMKNYWRQLLNAKLITQRKFDNLTKAERGGLSELDKAGFIKRQLVETRQITKHVAQILDSRMNTKYDENDKLIREVKVITLKSKLVSDFRKDFQFYKVREINNYHHAHDAYLNAVVGTALIKKYPKLESEFVYGDYKVYDVRKMIAKSEQEIGKATAKYFFYSNIMNFFKTEITLANGEIRKRPLIETNGETGEIVWDKGRDFATVRKVLSMPQVNIVKKTEVQTGGFSKESILPKRNSDKLIARKKDWDPKKYGGFDSPTVAYSVLVVAKVEKGKSKKLKSVKELLGITIMERSSFEKNPIDFLEAKGYKEVKKDLIIKLPKYSLFELENGRKRMLASAGELQKGNELALPSKYVNFLYLASHYEKLKGSPEDNEQKQLFVEQHKHYLDEIIEQISEFSKRVILADANLDKVLSAYNKHRDKPIREQAENIIHLFTLTNLGAPAAFKYFDTTIDRKRYTSTKEVLDATLIHQSITGLYETRIDLSQLGGDGGGGSGSSGGTLNIEDEYRLHETSKEPDVPLGSTWLSDFPQAWAETGGMGLAVRQAPLIIPLKATSTPVSIKQYPMSQEARLGIKPHIQRLLDQGILVPCQSPWNTPLLPVKKPGTNDYRPVQDLREVNKRVEDIHPTVPNPYNLLSGLPPSHQWYTVLDLKDAFFCLRLHPTSQPLFAFEWRDPEMGISGQLTWTRLPQGFKNSPTLFNEALHRDLADFRIQHPDLILLQYVDDLLLAATSEQDCQRGTRALLQTLGNLGYRASAKKAQICQKQVKYLGYLLKEGQRWLTEARKETVMGQPTPKTPRQLREFLGKAGFCRLFIPGFAEMAAPLYPLTKPGTLFNWGPDQQKAYQEIKQALLTAPALGLPDLTKPFELFVDEKQGYAKGVLTQKLGPWRRPVAYLSKKLDPVAAGWPPCLRMVAAIAVLTKDAGKLTMGQPLVILAPHAVEALVKQPPDRWLSNARMTHYQAMLLDTDRVQFGPVVALNPATLLPLPEKEAPHDCLEILAETHGTRPDLTDQPIPDADYTWYTDGSSFLQEGQRRAGAAVTTETEVIWARALPAGTSAQRAELIALTQALKMAEGKKLNVYTDSRYAFATAHVHGEIYRRRGWLTSEGREIKNKNEILALLKALFLPKRLSIIHCPGHQKGNSAEARGNRMADQAAREAAMKAVLETSTLLAGKRTADGSEFEKRTADGSEFESPKKKAKVE

SEQ ID NO: 1017 - protein, 2091 aa, synthetic construct
MPAAKRVKLDGGDKKYSIGLDIGTNSVGWAVITDEYKVPSKKFKVLGNTDRHSIKKNLIGALLFDSGETAEATRLKRTARRRYTRRKNRICYLQEIFSNEMAKVDDSFFHRLEESFLVEEDKKHERHPIFGNIVDEVAYHEKYPTIYHLRKKLVDSTDKADLRLIYLALAHMIKFRGHFLIEGDLNPDNSDVDKLFIQLVQTYNQLFEENPINASGVDAKAILSARLSKSRRLENLIAQLPGEKKNGLFGNLIALSLGLTPNFKSNFDLAEDAKLQLSKDTYDDDLDNLLAQIGDQYADLFLAAKNLSDAILLSDILRVNTEITKAPLSASMIKRYDEHHQDLTLLKALVRQQLPEKYKEIFFDQSKNGYAGYIDGGASQEEFYKFIKPILEKMDGTEELLVKLNREDLLRKQRTFDNGSIPHQIHLGELHAILRRQEDFYPFLKDNREKIEKILTFRIPYYVGPLARGNSRFAWMTRKSEETITPWNFEEVVDKGASAQSFIERMTNFDKNLPNEKVLPKHSLLYEYFTVYNELTKVKYVTEGMRKPAFLSGEQKKAIVDLLFKTNRKVTVKQLKEDYFKKIECFDSVEISGVEDRFNASLGTYHDLLKIIKDKDFLDNEENEDILEDIVLTLTLFEDREMIEERLKTYAHLFDDKVMKQLKRRRYTGWGRLSRKLINGIRDKQSGKTILDFLKSDGFANRNFMQLIHDDSLTFKEDIQKAQVSGQGDSLHEHIANLAGSPAIKKGILQTVKVVDELVKVMGRHKPENIVIEMARENQTTQKGQKNSRERMKRIEEGIKELGSQILKEHPVENTQLQNEKLYLYYLQNGRDMYVDQELDINRLSDYDVDHIVPQSFLKDDSIDNKVLTRSDKARGKSDNVPSEEVVKKMKNYWRQLLNAKLITQRKFDNLTKAERGGLSELDKAGFIKRQLVETRQITKHVAQILDSRMNTKYDENDKLIREVKVITLKSKLVSDFRKDFQFYKVREINNYHHAHDAYLNAVVGTALIKKYPKLESEFVYGDYKVYDVRKMIAKSEQEIGKATAKYFFYSNIMNFFKTEITLANGEIRKRPLIETNGETGEIVWDKGRDFATVRKVLSMPQVNIVKKTEVQTGGFSKESILPKRNSDKLIARKKDWDPKKYGGFDSPTVAYSVLVVAKVEKGKSKKLKSVKELLGITIMERSSFEKNPIDFLEAKGYKEVKKDLIIKLPKYSLFELENGRKRMLASAGELQKGNELALPSKYVNFLYLASHYEKLKGSPEDNEQKQLFVEQHKHYLDEIIEQISEFSKRVILADANLDKVLSAYNKHRDKPIREQAENIIHLFTLTNLGAPAAFKYFDTTIDRKRYTSTKEVLDATLIHQSITGLYETRIDLSQLGGDGGGGSPAPGGTLNIEDEYRLHETSKEPDVPLGSTWLSDFPQAWAETGGMGLAVRQAPLIIPLKATSTPVSIKQYPMSQEARLGIKPHIQRLLDQGILVPCQSPWNTPLLPVKKPGTNDYRPVQDLREVNKRVEDIHPTVPNPYNLLSGLPPSHQWYTVLDLKDAFFCLRLHPTSQPLFAFEWRDPEMGISGQLTWTRLPQGFKNSPTLFNEALHRDLADFRIQHPDLILLQYVDDLLLAATSEQDCQRGTRALLQTLGNLGYRASAKKAQICQKQVKYLGYLLKEGQRWLTEARKETVMGQPTPKTPRQLREFLGKAGFCRLFIPGFAEMAAPLYPLTKPGTLFNWGPDQQKAYQEIKQALLTAPALGLPDLTKPFELFVDEKQGYAKGVLTQKLGPWRRPVAYLSKKLDPVAAGWPPCLRMVAAIAVLTKDAGKLTMGQPLVILAPHAVEALVKQPPDRWLSNARMTHYQAMLLDTDRVQFGPVVALNPATLLPLPEKEAPHDCLEILAETHGTRPDLTDQPIPDADYTWYTDGSSFLQEGQRRAGAAVTTETEVIWARALPAGTSAQRAELIALTQALKMAEGKKLNVYTDSRYAFATAHVHGEIYRRRGWLTSEGREIKNKNEILALLKALFLPKRLSIIHCPGHQKGNSAEARGNRMADQAAREAAMKAVLETSTLLAGKRTADGSEFEKRTADGSEFESPKKKAKVE

SEQ ID NO: 1018 - protein, 2096 aa, synthetic construct
MPAAKRVKLDGGDKKYSIGLDIGTNSVGWAVITDEYKVPSKKFKVLGNTDRHSIKKNLIGALLFDSGETAEATRLKRTARRRYTRRKNRICYLQEIFSNEMAKVDDSFFHRLEESFLVEEDKKHERHPIFGNIVDEVAYHEKYPTIYHLRKKLVDSTDKADLRLIYLALAHMIKFRGHFLIEGDLNPDNSDVDKLFIQLVQTYNQLFEENPINASGVDAKAILSARLSKSRRLENLIAQLPGEKKNGLFGNLIALSLGLTPNFKSNFDLAEDAKLQLSKDTYDDDLDNLLAQIGDQYADLFLAAKNLSDAILLSDILRVNTEITKAPLSASMIKRYDEHHQDLTLLKALVRQQLPEKYKEIFFDQSKNGYAGYIDGGASQEEFYKFIKPILEKMDGTEELLVKLNREDLLRKQRTFDNGSIPHQIHLGELHAILRRQEDFYPFLKDNREKIEKILTFRIPYYVGPLARGNSRFAWMTRKSEETITPWNFEEVVDKGASAQSFIERMTNFDKNLPNEKVLPKHSLLYEYFTVYNELTKVKYVTEGMRKPAFLSGEQKKAIVDLLFKTNRKVTVKQLKEDYFKKIECFDSVEISGVEDRFNASLGTYHDLLKIIKDKDFLDNEENEDILEDIVLTLTLFEDREMIEERLKTYAHLFDDKVMKQLKRRRYTGWGRLSRKLINGIRDKQSGKTILDFLKSDGFANRNFMQLIHDDSLTFKEDIQKAQVSGQGDSLHEHIANLAGSPAIKKGILQTVKVVDELVKVMGRHKPENIVIEMARENQTTQKGQKNSRERMKRIEEGIKELGSQILKEHPVENTQLQNEKLYLYYLQNGRDMYVDQELDINRLSDYDVDHIVPQSFLKDDSIDNKVLTRSDKARGKSDNVPSEEVVKKMKNYWRQLLNAKLITQRKFDNLTKAERGGLSELDKAGFIKRQLVETRQITKHVAQILDSRMNTKYDENDKLIREVKVITLKSKLVSDFRKDFQFYKVREINNYHHAHDAYLNAVVGTALIKKYPKLESEFVYGDYKVYDVRKMIAKSEQEIGKATAKYFFYSNIMNFFKTEITLANGEIRKRPLIETNGETGEIVWDKGRDFATVRKVLSMPQVNIVKKTEVQTGGFSKESILPKRNSDKLIARKKDWDPKKYGGFDSPTVAYSVLVVAKVEKGKSKKLKSVKELLGITIMERSSFEKNPIDFLEAKGYKEVKKDLIIKLPKYSLFELENGRKRMLASAGELQKGNELALPSKYVNFLYLASHYEKLKGSPEDNEQKQLFVEQHKHYLDEIIEQISEFSKRVILADANLDKVLSAYNKHRDKPIREQAENIIHLFTLTNLGAPAAFKYFDTTIDRKRYTSTKEVLDATLIHQSITGLYETRIDLSQLGGDGGGGGEAAAKGGSGGTLNIEDEYRLHETSKEPDVPLGSTWLSDFPQAWAETGGMGLAVRQAPLIIPLKATSTPVSIKQYPMSQEARLGIKPHIQRLLDQGILVPCQSPWNTPLLPVKKPGTNDYRPVQDLREVNKRVEDIHPTVPNPYNLLSGLPPSHQWYTVLDLKDAFFCLRLHPTSQPLFAFEWRDPEMGISGQLTWTRLPQGFKNSPTLFNEALHRDLADFRIQHPDLILLQYVDDLLLAATSEQDCQRGTRALLQTLGNLGYRASAKKAQICQKQVKYLGYLLKEGQRWLTEARKETVMGQPTPKTPRQLREFLGKAGFCRLFIPGFAEMAAPLYPLTKPGTLFNWGPDQQKAYQEIKQALLTAPALGLPDLTKPFELFVDEKQGYAKGVLTQKLGPWRRPVAYLSKKLDPVAAGWPPCLRMVAAIAVLTKDAGKLTMGQPLVILAPHAVEALVKQPPDRWLSNARMTHYQAMLLDTDRVQFGPVVALNPATLLPLPEKEAPHDCLEILAETHGTRPDLTDQPIPDADYTWYTDGSSFLQEGQRRAGAAVTTETEVIWARALPAGTSAQRAELIALTQALKMAEGKKLNVYTDSRYAFATAHVHGEIYRRRGWLTSEGREIKNKNEILALLKALFLPKRLSIIHCPGHQKGNSAEARGNRMADQAAREAAMKAVLETSTLLAGKRTADGSEFEKRTADGSEFESPKKKAKVE

SEQ ID NO: 1019 - protein, 2097 aa, synthetic construct
MPAAKRVKLDGGDKKYSIGLDIGTNSVGWAVITDEYKVPSKKFKVLGNTDRHSIKKNLIGALLFDSGETAEATRLKRTARRRYTRRKNRICYLQEIFSNEMAKVDDSFFHRLEESFLVEEDKKHERHPIFGNIVDEVAYHEKYPTIYHLRKKLVDSTDKADLRLIYLALAHMIKFRGHFLIEGDLNPDNSDVDKLFIQLVQTYNQLFEENPINASGVDAKAILSARLSKSRRLENLIAQLPGEKKNGLFGNLIALSLGLTPNFKSNFDLAEDAKLQLSKDTYDDDLDNLLAQIGDQYADLFLAAKNLSDAILLSDILRVNTEITKAPLSASMIKRYDEHHQDLTLLKALVRQQLPEKYKEIFFDQSKNGYAGYIDGGASQEEFYKFIKPILEKMDGTEELLVKLNREDLLRKQRTFDNGSIPHQIHLGELHAILRRQEDFYPFLKDNREKIEKILTFRIPYYVGPLARGNSRFAWMTRKSEETITPWNFEEVVDKGASAQSFIERMTNFDKNLPNEKVLPKHSLLYEYFTVYNELTKVKYVTEGMRKPAFLSGEQKKAIVDLLFKTNRKVTVKQLKEDYFKKIECFDSVEISGVEDRFNASLGTYHDLLKIIKDKDFLDNEENEDILEDIVLTLTLFEDREMIEERLKTYAHLFDDKVMKQLKRRRYTGWGRLSRKLINGIRDKQSGKTILDFLKSDGFANRNFMQLIHDDSLTFKEDIQKAQVSGQGDSLHEHIANLAGSPAIKKGILQTVKVVDELVKVMGRHKPENIVIEMARENQTTQKGQKNSRERMKRIEEGIKELGSQILKEHPVENTQLQNEKLYLYYLQNGRDMYVDQELDINRLSDYDVDHIVPQSFLKDDSIDNKVLTRSDKARGKSDNVPSEEVVKKMKNYWRQLLNAKLITQRKFDNLTKAERGGLSELDKAGFIKRQLVETRQITKHVAQILDSRMNTKYDENDKLIREVKVITLKSKLVSDFRKDFQFYKVREINNYHHAHDAYLNAVVGTALIKKYPKLESEFVYGDYKVYDVRKMIAKSEQEIGKATAKYFFYSNIMNFFKTEITLANGEIRKRPLIETNGETGEIVWDKGRDFATVRKVLSMPQVNIVKKTEVQTGGFSKESILPKRNSDKLIARKKDWDPKKYGGFDSPTVAYSVLVVAKVEKGKSKKLKSVKELLGITIMERSSFEKNPIDFLEAKGYKEVKKDLIIKLPKYSLFELENGRKRMLASAGELQKGNELALPSKYVNFLYLASHYEKLKGSPEDNEQKQLFVEQHKHYLDEIIEQISEFSKRVILADANLDKVLSAYNKHRDKPIREQAENIIHLFTLTNLGAPAAFKYFDTTIDRKRYTSTKEVLDATLIHQSITGLYETRIDLSQLGGDGGGGSGGSGGSGGSGGTLNIEDEYRLHETSKEPDVPLGSTWLSDFPQAWAETGGMGLAVRQAPLIIPLKATSTPVSIKQYPMSQEARLGIKPHIQRLLDQGILVPCQSPWNTPLLPVKKPGTNDYRPVQDLREVNKRVEDIHPTVPNPYNLLSGLPPSHQWYTVLDLKDAFFCLRLHPTSQPLFAFEWRDPEMGISGQLTWTRLPQGFKNSPTLFNEALHRDLADFRIQHPDLILLQYVDDLLLAATSEQDCQRGTRALLQTLGNLGYRASAKKAQICQKQVKYLGYLLKEGQRWLTEARKETVMGQPTPKTPRQLREFLGKAGFCRLFIPGFAEMAAPLYPLTKPGTLFNWGPDQQKAYQEIKQALLTAPALGLPDLTKPFELFVDEKQGYAKGVLTQKLGPWRRPVAYLSKKLDPVAAGWPPCLRMVAAIAVLTKDAGKLTMGQPLVILAPHAVEALVKQPPDRWLSNARMTHYQAMLLDTDRVQFGPVVALNPATLLPLPEKEAPHDCLEILAETHGTRPDLTDQPIPDADYTWYTDGSSFLQEGQRRAGAAVTTETEVIWARALPAGTSAQRAELIALTQALKMAEGKKLNVYTDSRYAFATAHVHGEIYRRRGWLTSEGREIKNKNEILALLKALFLPKRLSIIHCPGHQKGNSAEARGNRMADQAAREAAMKAVLETSTLLAGKRTADGSEFEKRTADGSEFESPKKKAKVE

SEQ ID NO: 1020 - protein, 2098 aa, synthetic construct
MPAAKRVKLDGGDKKYSIGLDIGTNSVGWAVITDEYKVPSKKFKVLGNTDRHSIKKNLIGALLFDSGETAEATRLKRTARRRYTRRKNRICYLQEIFSNEMAKVDDSFFHRLEESFLVEEDKKHERHPIFGNIVDEVAYHEKYPTIYHLRKKLVDSTDKADLRLIYLALAHMIKFRGHFLIEGDLNPDNSDVDKLFIQLVQTYNQLFEENPINASGVDAKAILSARLSKSRRLENLIAQLPGEKKNGLFGNLIALSLGLTPNFKSNFDLAEDAKLQLSKDTYDDDLDNLLAQIGDQYADLFLAAKNLSDAILLSDILRVNTEITKAPLSASMIKRYDEHHQDLTLLKALVRQQLPEKYKEIFFDQSKNGYAGYIDGGASQEEFYKFIKPILEKMDGTEELLVKLNREDLLRKQRTFDNGSIPHQIHLGELHAILRRQEDFYPFLKDNREKIEKILTFRIPYYVGPLARGNSRFAWMTRKSEETITPWNFEEVVDKGASAQSFIERMTNFDKNLPNEKVLPKHSLLYEYFTVYNELTKVKYVTEGMRKPAFLSGEQKKAIVDLLFKTNRKVTVKQLKEDYFKKIECFDSVEISGVEDRFNASLGTYHDLLKIIKDKDFLDNEENEDILEDIVLTLTLFEDREMIEERLKTYAHLFDDKVMKQLKRRRYTGWGRLSRKLINGIRDKQSGKTILDFLKSDGFANRNFMQLIHDDSLTFKEDIQKAQVSGQGDSLHEHIANLAGSPAIKKGILQTVKVVDELVKVMGRHKPENIVIEMARENQTTQKGQKNSRERMKRIEEGIKELGSQILKEHPVENTQLQNEKLYLYYLQNGRDMYVDQELDINRLSDYDVDHIVPQSFLKDDSIDNKVLTRSDKARGKSDNVPSEEVVKKMKNYWRQLLNAKLITQRKFDNLTKAERGGLSELDKAGFIKRQLVETRQITKHVAQILDSRMNTKYDENDKLIREVKVITLKSKLVSDFRKDFQFYKVREINNYHHAHDAYLNAVVGTALIKKYPKLESEFVYGDYKVYDVRKMIAKSEQEIGKATAKYFFYSNIMNFFKTEITLANGEIRKRPLIETNGETGEIVWDKGRDFATVRKVLSMPQVNIVKKTEVQTGGFSKESILPKRNSDKLIARKKDWDPKKYGGFDSPTVAYSVLVVAKVEKGKSKKLKSVKELLGITIMERSSFEKNPIDFLEAKGYKEVKKDLIIKLPKYSLFELENGRKRMLASAGELQKGNELALPSKYVNFLYLASHYEKLKGSPEDNEQKQLFVEQHKHYLDEIIEQISEFSKRVILADANLDKVLSAYNKHRDKPIREQAENIIHLFTLTNLGAPAAFKYFDTTIDRKRYTSTKEVLDATLIHQSITGLYETRIDLSQLGGDGGPAPAPAPAPAPAPGGTLNIEDEYRLHETSKEPDVPLGSTWLSDFPQAWAETGGMGLAVRQAPLIIPLKATSTPVSIKQYPMSQEARLGIKPHIQRLLDQGILVPCQSPWNTPLLPVKKPGTNDYRPVQDLREVNKRVEDIHPTVPNPYNLLSGLPPSHQWYTVLDLKDAFFCLRLHPTSQPLFAFEWRDPEMGISGQLTWTRLPQGFKNSPTLFNEALHRDLADFRIQHPDLILLQYVDDLLLAATSEQDCQRGTRALLQTLGNLGYRASAKKAQICQKQVKYLGYLLKEGQRWLTEARKETVMGQPTPKTPRQLREFLGKAGFCRLFIPGFAEMAAPLYPLTKPGTLFNWGPDQQKAYQEIKQALLTAPALGLPDLTKPFELFVDEKQGYAKGVLTQKLGPWRRPVAYLSKKLDPVAAGWPPCLRMVAAIAVLTKDAGKLTMGQPLVILAPHAVEALVKQPPDRWLSNARMTHYQAMLLDTDRVQFGPVVALNPATLLPLPEKEAPHDCLEILAETHGTRPDLTDQPIPDADYTWYTDGSSFLQEGQRRAGAAVTTETEVIWARALPAGTSAQRAELIALTQALKMAEGKKLNVYTDSRYAFATAHVHGEIYRRRGWLTSEGREIKNKNEILALLKALFLPKRLSIIHCPGHQKGNSAEARGNRMADQAAREAAMKAVLETSTLLAGKRTADGSEFEKRTADGSEFESPKKKAKVE

SEQ ID NO: 1021 - protein, 2115 aa, synthetic construct
MPAAKRVKLDGGDKKYSIGLDIGTNSVGWAVITDEYKVPSKKFKVLGNTDRHSIKKNLIGALLFDSGETAEATRLKRTARRRYTRRKNRICYLQEIFSNEMAKVDDSFFHRLEESFLVEEDKKHERHPIFGNIVDEVAYHEKYPTIYHLRKKLVDSTDKADLRLIYLALAHMIKFRGHFLIEGDLNPDNSDVDKLFIQLVQTYNQLFEENPINASGVDAKAILSARLSKSRRLENLIAQLPGEKKNGLFGNLIALSLGLTPNFKSNFDLAEDAKLQLSKDTYDDDLDNLLAQIGDQYADLFLAAKNLSDAILLSDILRVNTEITKAPLSASMIKRYDEHHQDLTLLKALVRQQLPEKYKEIFFDQSKNGYAGYIDGGASQEEFYKFIKPILEKMDGTEELLVKLNREDLLRKQRTFDNGSIPHQIHLGELHAILRRQEDFYPFLKDNREKIEKILTFRIPYYVGPLARGNSRFAWMTRKSEETITPWNFEEVVDKGASAQSFIERMTNFDKNLPNEKVLPKHSLLYEYFTVYNELTKVKYVTEGMRKPAFLSGEQKKAIVDLLFKTNRKVTVKQLKEDYFKKIECFDSVEISGVEDRFNASLGTYHDLLKIIKDKDFLDNEENEDILEDIVLTLTLFEDREMIEERLKTYAHLFDDKVMKQLKRRRYTGWGRLSRKLINGIRDKQSGKTILDFLKSDGFANRNFMQLIHDDSLTFKEDIQKAQVSGQGDSLHEHIANLAGSPAIKKGILQTVKVVDELVKVMGRHKPENIVIEMARENQTTQKGQKNSRERMKRIEEGIKELGSQILKEHPVENTQLQNEKLYLYYLQNGRDMYVDQELDINRLSDYDVDHIVPQSFLKDDSIDNKVLTRSDKARGKSDNVPSEEVVKKMKNYWRQLLNAKLITQRKFDNLTKAERGGLSELDKAGFIKRQLVETRQITKHVAQILDSRMNTKYDENDKLIREVKVITLKSKLVSDFRKDFQFYKVREINNYHHAHDAYLNAVVGTALIKKYPKLESEFVYGDYKVYDVRKMIAKSEQEIGKATAKYFFYSNIMNFFKTEITLANGEIRKRPLIETNGETGEIVWDKGRDFATVRKVLSMPQVNIVKKTEVQTGGFSKESILPKRNSDKLIARKKDWDPKKYGGFDSPTVAYSVLVVAKVEKGKSKKLKSVKELLGITIMERSSFEKNPIDFLEAKGYKEVKKDLIIKLPKYSLFELENGRKRMLASAGELQKGNELALPSKYVNFLYLASHYEKLKGSPEDNEQKQLFVEQHKHYLDEIIEQISEFSKRVILADANLDKVLSAYNKHRDKPIREQAENIIHLFTLTNLGAPAAFKYFDTTIDRKRYTSTKEVLDATLIHQSITGLYETRIDLSQLGGDGGGGGGSGGGGSGGGGSGGGGSGGGGSGGGGSGGTLNIEDEYRLHETSKEPDVPLGSTWLSDFPQAWAETGGMGLAVRQAPLIIPLKATSTPVSIKQYPMSQEARLGIKPHIQRLLDQGILVPCQSPWNTPLLPVKKPGTNDYRPVQDLREVNKRVEDIHPTVPNPYNLLSGLPPSHQWYTVLDLKDAFFCLRLHPTSQPLFAFEWRDPEMGISGQLTWTRLPQGFKNSPTLFNEALHRDLADFRIQHPDLILLQYVDDLLLAATSEQDCQRGTRALLQTLGNLGYRASAKKAQICQKQVKYLGYLLKEGQRWLTEARKETVMGQPTPKTPRQLREFLGKAGFCRLFIPGFAEMAAPLYPLTKPGTLFNWGPDQQKAYQEIKQALLTAPALGLPDLTKPFELFVDEKQGYAKGVLTQKLGPWRRPVAYLSKKLDPVAAGWPPCLRMVAAIAVLTKDAGKLTMGQPLVILAPHAVEALVKQPPDRWLSNARMTHYQAMLLDTDRVQFGPVVALNPATLLPLPEKEAPHDCLEILAETHGTRPDLTDQPIPDADYTWYTDGSSFLQEGQRRAGAAVTTETEVIWARALPAGTSAQRAELIALTQALKMAEGKKLNVYTDSRYAFATAHVHGEIYRRRGWLTSEGREIKNKNEILALLKALFLPKRLSIIHCPGHQKGNSAEARGNRMADQAAREAAMKAVLETSTLLAGKRTADGSEFEKRTADGSEFESPKKKAKVE

SEQ ID NO: 1022 - protein, 2094 aa, synthetic construct
MPAAKRVKLDGGDKKYSIGLDIGTNSVGWAVITDEYKVPSKKFKVLGNTDRHSIKKNLIGALLFDSGETAEATRLKRTARRRYTRRKNRICYLQEIFSNEMAKVDDSFFHRLEESFLVEEDKKHERHPIFGNIVDEVAYHEKYPTIYHLRKKLVDSTDKADLRLIYLALAHMIKFRGHFLIEGDLNPDNSDVDKLFIQLVQTYNQLFEENPINASGVDAKAILSARLSKSRRLENLIAQLPGEKKNGLFGNLIALSLGLTPNFKSNFDLAEDAKLQLSKDTYDDDLDNLLAQIGDQYADLFLAAKNLSDAILLSDILRVNTEITKAPLSASMIKRYDEHHQDLTLLKALVRQQLPEKYKEIFFDQSKNGYAGYIDGGASQEEFYKFIKPILEKMDGTEELLVKLNREDLLRKQRTFDNGSIPHQIHLGELHAILRRQEDFYPFLKDNREKIEKILTFRIPYYVGPLARGNSRFAWMTRKSEETITPWNFEEVVDKGASAQSFIERMTNFDKNLPNEKVLPKHSLLYEYFTVYNELTKVKYVTEGMRKPAFLSGEQKKAIVDLLFKTNRKVTVKQLKEDYFKKIECFDSVEISGVEDRFNASLGTYHDLLKIIKDKDFLDNEENEDILEDIVLTLTLFEDREMIEERLKTYAHLFDDKVMKQLKRRRYTGWGRLSRKLINGIRDKQSGKTILDFLKSDGFANRNFMQLIHDDSLTFKEDIQKAQVSGQGDSLHEHIANLAGSPAIKKGILQTVKVVDELVKVMGRHKPENIVIEMARENQTTQKGQKNSRERMKRIEEGIKELGSQILKEHPVENTQLQNEKLYLYYLQNGRDMYVDQELDINRLSDYDVDHIVPQSFLKDDSIDNKVLTRSDKARGKSDNVPSEEVVKKMKNYWRQLLNAKLITQRKFDNLTKAERGGLSELDKAGFIKRQLVETRQITKHVAQILDSRMNTKYDENDKLIREVKVITLKSKLVSDFRKDFQFYKVREINNYHHAHDAYLNAVVGTALIKKYPKLESEFVYGDYKVYDVRKMIAKSEQEIGKATAKYFFYSNIMNFFKTEITLANGEIRKRPLIETNGETGEIVWDKGRDFATVRKVLSMPQVNIVKKTEVQTGGFSKESILPKRNSDKLIARKKDWDPKKYGGFDSPTVAYSVLVVAKVEKGKSKKLKSVKELLGITIMERSSFEKNPIDFLEAKGYKEVKKDLIIKLPKYSLFELENGRKRMLASAGELQKGNELALPSKYVNFLYLASHYEKLKGSPEDNEQKQLFVEQHKHYLDEIIEQISEFSKRVILADANLDKVLSAYNKHRDKPIREQAENIIHLFTLTNLGAPAAFKYFDTTIDRKRYTSTKEVLDATLIHQSITGLYETRIDLSQLGGDGGGGSGSSGGGGGTLNIEDEYRLHETSKEPDVPLGSTWLSDFPQAWAETGGMGLAVRQAPLIIPLKATSTPVSIKQYPMSQEARLGIKPHIQRLLDQGILVPCQSPWNTPLLPVKKPGTNDYRPVQDLREVNKRVEDIHPTVPNPYNLLSGLPPSHQWYTVLDLKDAFFCLRLHPTSQPLFAFEWRDPEMGISGQLTWTRLPQGFKNSPTLFNEALHRDLADFRIQHPDLILLQYVDDLLLAATSEQDCQRGTRALLQTLGNLGYRASAKKAQICQKQVKYLGYLLKEGQRWLTEARKETVMGQPTPKTPRQLREFLGKAGFCRLFIPGFAEMAAPLYPLTKPGTLFNWGPDQQKAYQEIKQALLTAPALGLPDLTKPFELFVDEKQGYAKGVLTQKLGPWRRPVAYLSKKLDPVAAGWPPCLRMVAAIAVLTKDAGKLTMGQPLVILAPHAVEALVKQPPDRWLSNARMTHYQAMLLDTDRVQFGPVVALNPATLLPLPEKEAPHDCLEILAETHGTRPDLTDQPIPDADYTWYTDGSSFLQEGQRRAGAAVTTETEVIWARALPAGTSAQRAELIALTQALKMAEGKKLNVYTDSRYAFATAHVHGEIYRRRGWLTSEGREIKNKNEILALLKALFLPKRLSIIHCPGHQKGNSAEARGNRMADQAAREAAMKAVLETSTLLAGKRTADGSEFEKRTADGSEFESPKKKAKVE

SEQ ID NO: 1023 - protein, 2093 aa, synthetic construct
MPAAKRVKLDGGDKKYSIGLDIGTNSVGWAVITDEYKVPSKKFKVLGNTDRHSIKKNLIGALLFDSGETAEATRLKRTARRRYTRRKNRICYLQEIFSNEMAKVDDSFFHRLEESFLVEEDKKHERHPIFGNIVDEVAYHEKYPTIYHLRKKLVDSTDKADLRLIYLALAHMIKFRGHFLIEGDLNPDNSDVDKLFIQLVQTYNQLFEENPINASGVDAKAILSARLSKSRRLENLIAQLPGEKKNGLFGNLIALSLGLTPNFKSNFDLAEDAKLQLSKDTYDDDLDNLLAQIGDQYADLFLAAKNLSDAILLSDILRVNTEITKAPLSASMIKRYDEHHQDLTLLKALVRQQLPEKYKEIFFDQSKNGYAGYIDGGASQEEFYKFIKPILEKMDGTEELLVKLNREDLLRKQRTFDNGSIPHQIHLGELHAILRRQEDFYPFLKDNREKIEKILTFRIPYYVGPLARGNSRFAWMTRKSEETITPWNFEEVVDKGASAQSFIERMTNFDKNLPNEKVLPKHSLLYEYFTVYNELTKVKYVTEGMRKPAFLSGEQKKAIVDLLFKTNRKVTVKQLKEDYFKKIECFDSVEISGVEDRFNASLGTYHDLLKIIKDKDFLDNEENEDILEDIVLTLTLFEDREMIEERLKTYAHLFDDKVMKQLKRRRYTGWGRLSRKLINGIRDKQSGKTILDFLKSDGFANRNFMQLIHDDSLTFKEDIQKAQVSGQGDSLHEHIANLAGSPAIKKGILQTVKVVDELVKVMGRHKPENIVIEMARENQTTQKGQKNSRERMKRIEEGIKELGSQILKEHPVENTQLQNEKLYLYYLQNGRDMYVDQELDINRLSDYDVDHIVPQSFLKDDSIDNKVLTRSDKARGKSDNVPSEEVVKKMKNYWRQLLNAKLITQRKFDNLTKAERGGLSELDKAGFIKRQLVETRQITKHVAQILDSRMNTKYDENDKLIREVKVITLKSKLVSDFRKDFQFYKVREINNYHHAHDAYLNAVVGTALIKKYPKLESEFVYGDYKVYDVRKMIAKSEQEIGKATAKYFFYSNIMNFFKTEITLANGEIRKRPLIETNGETGEIVWDKGRDFATVRKVLSMPQVNIVKKTEVQTGGFSKESILPKRNSDKLIARKKDWDPKKYGGFDSPTVAYSVLVVAKVEKGKSKKLKSVKELLGITIMERSSFEKNPIDFLEAKGYKEVKKDLIIKLPKYSLFELENGRKRMLASAGELQKGNELALPSKYVNFLYLASHYEKLKGSPEDNEQKQLFVEQHKHYLDEIIEQISEFSKRVILADANLDKVLSAYNKHRDKPIREQAENIIHLFTLTNLGAPAAFKYFDTTIDRKRYTSTKEVLDATLIHQSITGLYETRIDLSQLGGDGGEAAAKGGSGGTLNIEDEYRLHETSKEPDVPLGSTWLSDFPQAWAETGGMGLAVRQAPLIIPLKATSTPVSIKQYPMSQEARLGIKPHIQRLLDQGILVPCQSPWNTPLLPVKKPGTNDYRPVQDLREVNKRVEDIHPTVPNPYNLLSGLPPSHQWYTVLDLKDAFFCLRLHPTSQPLFAFEWRDPEMGISGQLTWTRLPQGFKNSPTLFNEALHRDLADFRIQHPDLILLQYVDDLLLAATSEQDCQRGTRALLQTLGNLGYRASAKKAQICQKQVKYLGYLLKEGQRWLTEARKETVMGQPTPKTPRQLREFLGKAGFCRLFIPGFAEMAAPLYPLTKPGTLFNWGPDQQKAYQEIKQALLTAPALGLPDLTKPFELFVDEKQGYAKGVLTQKLGPWRRPVAYLSKKLDPVAAGWPPCLRMVAAIAVLTKDAGKLTMGQPLVILAPHAVEALVKQPPDRWLSNARMTHYQAMLLDTDRVQFGPVVALNPATLLPLPEKEAPHDCLEILAETHGTRPDLTDQPIPDADYTWYTDGSSFLQEGQRRAGAAVTTETEVIWARALPAGTSAQRAELIALTQALKMAEGKKLNVYTDSRYAFATAHVHGEIYRRRGWLTSEGREIKNKNEILALLKALFLPKRLSIIHCPGHQKGNSAEARGNRMADQAAREAAMKAVLETSTLLAGKRTADGSEFEKRTADGSEFESPKKKAKVE

SEQ ID NO: 1024 - protein, 2094 aa, synthetic construct
MPAAKRVKLDGGDKKYSIGLDIGTNSVGWAVITDEYKVPSKKFKVLGNTDRHSIKKNLIGALLFDSGETAEATRLKRTARRRYTRRKNRICYLQEIFSNEMAKVDDSFFHRLEESFLVEEDKKHERHPIFGNIVDEVAYHEKYPTIYHLRKKLVDSTDKADLRLIYLALAHMIKFRGHFLIEGDLNPDNSDVDKLFIQLVQTYNQLFEENPINASGVDAKAILSARLSKSRRLENLIAQLPGEKKNGLFGNLIALSLGLTPNFKSNFDLAEDAKLQLSKDTYDDDLDNLLAQIGDQYADLFLAAKNLSDAILLSDILRVNTEITKAPLSASMIKRYDEHHQDLTLLKALVRQQLPEKYKEIFFDQSKNGYAGYIDGGASQEEFYKFIKPILEKMDGTEELLVKLNREDLLRKQRTFDNGSIPHQIHLGELHAILRRQEDFYPFLKDNREKIEKILTFRIPYYVGPLARGNSRFAWMTRKSEETITPWNFEEVVDKGASAQSFIERMTNFDKNLPNEKVLPKHSLLYEYFTVYNELTKVKYVTEGMRKPAFLSGEQKKAIVDLLFKTNRKVTVKQLKEDYFKKIECFDSVEISGVEDRFNASLGTYHDLLKIIKDKDFLDNEENEDILEDIVLTLTLFEDREMIEERLKTYAHLFDDKVMKQLKRRRYTGWGRLSRKLINGIRDKQSGKTILDFLKSDGFANRNFMQLIHDDSLTFKEDIQKAQVSGQGDSLHEHIANLAGSPAIKKGILQTVKVVDELVKVMGRHKPENIVIEMARENQTTQKGQKNSRERMKRIEEGIKELGSQILKEHPVENTQLQNEKLYLYYLQNGRDMYVDQELDINRLSDYDVDHIVPQSFLKDDSIDNKVLTRSDKARGKSDNVPSEEVVKKMKNYWRQLLNAKLITQRKFDNLTKAERGGLSELDKAGFIKRQLVETRQITKHVAQILDSRMNTKYDENDKLIREVKVITLKSKLVSDFRKDFQFYKVREINNYHHAHDAYLNAVVGTALIKKYPKLESEFVYGDYKVYDVRKMIAKSEQEIGKATAKYFFYSNIMNFFKTEITLANGEIRKRPLIETNGETGEIVWDKGRDFATVRKVLSMPQVNIVKKTEVQTGGFSKESILPKRNSDKLIARKKDWDPKKYGGFDSPTVAYSVLVVAKVEKGKSKKLKSVKELLGITIMERSSFEKNPIDFLEAKGYKEVKKDLIIKLPKYSLFELENGRKRMLASAGELQKGNELALPSKYVNFLYLASHYEKLKGSPEDNEQKQLFVEQHKHYLDEIIEQISEFSKRVILADANLDKVLSAYNKHRDKPIREQAENIIHLFTLTNLGAPAAFKYFDTTIDRKRYTSTKEVLDATLIHQSITGLYETRIDLSQLGGDGGGGGGGSGSSGGTLNIEDEYRLHETSKEPDVPLGSTWLSDFPQAWAETGGMGLAVRQAPLIIPLKATSTPVSIKQYPMSQEARLGIKPHIQRLLDQGILVPCQSPWNTPLLPVKKPGTNDYRPVQDLREVNKRVEDIHPTVPNPYNLLSGLPPSHQWYTVLDLKDAFFCLRLHPTSQPLFAFEWRDPEMGISGQLTWTRLPQGFKNSPTLFNEALHRDLADFRIQHPDLILLQYVDDLLLAATSEQDCQRGTRALLQTLGNLGYRASAKKAQICQKQVKYLGYLLKEGQRWLTEARKETVMGQPTPKTPRQLREFLGKAGFCRLFIPGFAEMAAPLYPLTKPGTLFNWGPDQQKAYQEIKQALLTAPALGLPDLTKPFELFVDEKQGYAKGVLTQKLGPWRRPVAYLSKKLDPVAAGWPPCLRMVAAIAVLTKDAGKLTMGQPLVILAPHAVEALVKQPPDRWLSNARMTHYQAMLLDTDRVQFGPVVALNPATLLPLPEKEAPHDCLEILAETHGTRPDLTDQPIPDADYTWYTDGSSFLQEGQRRAGAAVTTETEVIWARALPAGTSAQRAELIALTQALKMAEGKKLNVYTDSRYAFATAHVHGEIYRRRGWLTSEGREIKNKNEILALLKALFLPKRLSIIHCPGHQKGNSAEARGNRMADQAAREAAMKAVLETSTLLAGKRTADGSEFEKRTADGSEFESPKKKAKVE

SEQ ID NO: 1025 - protein, 2094 aa, synthetic construct
MPAAKRVKLDGGDKKYSIGLDIGTNSVGWAVITDEYKVPSKKFKVLGNTDRHSIKKNLIGALLFDSGETAEATRLKRTARRRYTRRKNRICYLQEIFSNEMAKVDDSFFHRLEESFLVEEDKKHERHPIFGNIVDEVAYHEKYPTIYHLRKKLVDSTDKADLRLIYLALAHMIKFRGHFLIEGDLNPDNSDVDKLFIQLVQTYNQLFEENPINASGVDAKAILSARLSKSRRLENLIAQLPGEKKNGLFGNLIALSLGLTPNFKSNFDLAEDAKLQLSKDTYDDDLDNLLAQIGDQYADLFLAAKNLSDAILLSDILRVNTEITKAPLSASMIKRYDEHHQDLTLLKALVRQQLPEKYKEIFFDQSKNGYAGYIDGGASQEEFYKFIKPILEKMDGTEELLVKLNREDLLRKQRTFDNGSIPHQIHLGELHAILRRQEDFYPFLKDNREKIEKILTFRIPYYVGPLARGNSRFAWMTRKSEETITPWNFEEVVDKGASAQSFIERMTNFDKNLPNEKVLPKHSLLYEYFTVYNELTKVKYVTEGMRKPAFLSGEQKKAIVDLLFKTNRKVTVKQLKEDYFKKIECFDSVEISGVEDRFNASLGTYHDLLKIIKDKDFLDNEENEDILEDIVLTLTLFEDREMIEERLKTYAHLFDDKVMKQLKRRRYTGWGRLSRKLINGIRDKQSGKTILDFLKSDGFANRNFMQLIHDDSLTFKEDIQKAQVSGQGDSLHEHIANLAGSPAIKKGILQTVKVVDELVKVMGRHKPENIVIEMARENQTTQKGQKNSRERMKRIEEGIKELGSQILKEHPVENTQLQNEKLYLYYLQNGRDMYVDQELDINRLSDYDVDHIVPQSFLKDDSIDNKVLTRSDKARGKSDNVPSEEVVKKMKNYWRQLLNAKLITQRKFDNLTKAERGGLSELDKAGFIKRQLVETRQITKHVAQILDSRMNTKYDENDKLIREVKVITLKSKLVSDFRKDFQFYKVREINNYHHAHDAYLNAVVGTALIKKYPKLESEFVYGDYKVYDVRKMIAKSEQEIGKATAKYFFYSNIMNFFKTEITLANGEIRKRPLIETNGETGEIVWDKGRDFATVRKVLSMPQVNIVKKTEVQTGGFSKESILPKRNSDKLIARKKDWDPKKYGGFDSPTVAYSVLVVAKVEKGKSKKLKSVKELLGITIMERSSFEKNPIDFLEAKGYKEVKKDLIIKLPKYSLFELENGRKRMLASAGELQKGNELALPSKYVNFLYLASHYEKLKGSPEDNEQKQLFVEQHKHYLDEIIEQISEFSKRVILADANLDKVLSAYNKHRDKPIREQAENIIHLFTLTNLGAPAAFKYFDTTIDRKRYTSTKEVLDATLIHQSITGLYETRIDLSQLGGDGGGGGPAPGGSGGTLNIEDEYRLHETSKEPDVPLGSTWLSDFPQAWAETGGMGLAVRQAPLIIPLKATSTPVSIKQYPMSQEARLGIKPHIQRLLDQGILVPCQSPWNTPLLPVKKPGTNDYRPVQDLREVNKRVEDIHPTVPNPYNLLSGLPPSHQWYTVLDLKDAFFCLRLHPTSQPLFAFEWRDPEMGISGQLTWTRLPQGFKNSPTLFNEALHRDLADFRIQHPDLILLQYVDDLLLAATSEQDCQRGTRALLQTLGNLGYRASAKKAQICQKQVKYLGYLLKEGQRWLTEARKETVMGQPTPKTPRQLREFLGKAGFCRLFIPGFAEMAAPLYPLTKPGTLFNWGPDQQKAYQEIKQALLTAPALGLPDLTKPFELFVDEKQGYAKGVLTQKLGPWRRPVAYLSKKLDPVAAGWPPCLRMVAAIAVLTKDAGKLTMGQPLVILAPHAVEALVKQPPDRWLSNARMTHYQAMLLDTDRVQFGPVVALNPATLLPLPEKEAPHDCLEILAETHGTRPDLTDQPIPDADYTWYTDGSSFLQEGQRRAGAAVTTETEVIWARALPAGTSAQRAELIALTQALKMAEGKKLNVYTDSRYAFATAHVHGEIYRRRGWLTSEGREIKNKNEILALLKALFLPKRLSIIHCPGHQKGNSAEARGNRMADQAAREAAMKAVLETSTLLAGKRTADGSEFEKRTADGSEFESPKKKAKVE

SEQ ID NO: 1026 - protein, 2110 aa, synthetic construct
MPAAKRVKLDGGDKKYSIGLDIGTNSVGWAVITDEYKVPSKKFKVLGNTDRHSIKKNLIGALLFDSGETAEATRLKRTARRRYTRRKNRICYLQEIFSNEMAKVDDSFFHRLEESFLVEEDKKHERHPIFGNIVDEVAYHEKYPTIYHLRKKLVDSTDKADLRLIYLALAHMIKFRGHFLIEGDLNPDNSDVDKLFIQLVQTYNQLFEENPINASGVDAKAILSARLSKSRRLENLIAQLPGEKKNGLFGNLIALSLGLTPNFKSNFDLAEDAKLQLSKDTYDDDLDNLLAQIGDQYADLFLAAKNLSDAILLSDILRVNTEITKAPLSASMIKRYDEHHQDLTLLKALVRQQLPEKYKEIFFDQSKNGYAGYIDGGASQEEFYKFIKPILEKMDGTEELLVKLNREDLLRKQRTFDNGSIPHQIHLGELHAILRRQEDFYPFLKDNREKIEKILTFRIPYYVGPLARGNSRFAWMTRKSEETITPWNFEEVVDKGASAQSFIERMTNFDKNLPNEKVLPKHSLLYEYFTVYNELTKVKYVTEGMRKPAFLSGEQKKAIVDLLFKTNRKVTVKQLKEDYFKKIECFDSVEISGVEDRFNASLGTYHDLLKIIKDKDFLDNEENEDILEDIVLTLTLFEDREMIEERLKTYAHLFDDKVMKQLKRRRYTGWGRLSRKLINGIRDKQSGKTILDFLKSDGFANRNFMQLIHDDSLTFKEDIQKAQVSGQGDSLHEHIANLAGSPAIKKGILQTVKVVDELVKVMGRHKPENIVIEMARENQTTQKGQKNSRERMKRIEEGIKELGSQILKEHPVENTQLQNEKLYLYYLQNGRDMYVDQELDINRLSDYDVDHIVPQSFLKDDSIDNKVLTRSDKARGKSDNVPSEEVVKKMKNYWRQLLNAKLITQRKFDNLTKAERGGLSELDKAGFIKRQLVETRQITKHVAQILDSRMNTKYDENDKLIREVKVITLKSKLVSDFRKDFQFYKVREINNYHHAHDAYLNAVVGTALIKKYPKLESEFVYGDYKVYDVRKMIAKSEQEIGKATAKYFFYSNIMNFFKTEITLANGEIRKRPLIETNGETGEIVWDKGRDFATVRKVLSMPQVNIVKKTEVQTGGFSKESILPKRNSDKLIARKKDWDPKKYGGFDSPTVAYSVLVVAKVEKGKSKKLKSVKELLGITIMERSSFEKNPIDFLEAKGYKEVKKDLIIKLPKYSLFELENGRKRMLASAGELQKGNELALPSKYVNFLYLASHYEKLKGSPEDNEQKQLFVEQHKHYLDEIIEQISEFSKRVILADANLDKVLSAYNKHRDKPIREQAENIIHLFTLTNLGAPAAFKYFDTTIDRKRYTSTKEVLDATLIHQSITGLYETRIDLSQLGGDGGGGGGSGGGGSGGGGSGGGGSGGGGSGGTLNIEDEYRLHETSKEPDVPLGSTWLSDFPQAWAETGGMGLAVRQAPLIIPLKATSTPVSIKQYPMSQEARLGIKPHIQRLLDQGILVPCQSPWNTPLLPVKKPGTNDYRPVQDLREVNKRVEDIHPTVPNPYNLLSGLPPSHQWYTVLDLKDAFFCLRLHPTSQPLFAFEWRDPEMGISGQLTWTRLPQGFKNSPTLFNEALHRDLADFRIQHPDLILLQYVDDLLLAATSEQDCQRGTRALLQTLGNLGYRASAKKAQICQKQVKYLGYLLKEGQRWLTEARKETVMGQPTPKTPRQLREFLGKAGFCRLFIPGFAEMAAPLYPLTKPGTLFNWGPDQQKAYQEIKQALLTAPALGLPDLTKPFELFVDEKQGYAKGVLTQKLGPWRRPVAYLSKKLDPVAAGWPPCLRMVAAIAVLTKDAGKLTMGQPLVILAPHAVEALVKQPPDRWLSNARMTHYQAMLLDTDRVQFGPVVALNPATLLPLPEKEAPHDCLEILAETHGTRPDLTDQPIPDADYTWYTDGSSFLQEGQRRAGAAVTTETEVIWARALPAGTSAQRAELIALTQALKMAEGKKLNVYTDSRYAFATAHVHGEIYRRRGWLTSEGREIKNKNEILALLKALFLPKRLSIIHCPGHQKGNSAEARGNRMADQAAREAAMKAVLETSTLLAGKRTADGSEFEKRTADGSEFESPKKKAKVE

SEQ ID NO: 1027 - protein, 2096 aa, synthetic construct
MPAAKRVKLDGGDKKYSIGLDIGTNSVGWAVITDEYKVPSKKFKVLGNTDRHSIKKNLIGALLFDSGETAEATRLKRTARRRYTRRKNRICYLQEIFSNEMAKVDDSFFHRLEESFLVEEDKKHERHPIFGNIVDEVAYHEKYPTIYHLRKKLVDSTDKADLRLIYLALAHMIKFRGHFLIEGDLNPDNSDVDKLFIQLVQTYNQLFEENPINASGVDAKAILSARLSKSRRLENLIAQLPGEKKNGLFGNLIALSLGLTPNFKSNFDLAEDAKLQLSKDTYDDDLDNLLAQIGDQYADLFLAAKNLSDAILLSDILRVNTEITKAPLSASMIKRYDEHHQDLTLLKALVRQQLPEKYKEIFFDQSKNGYAGYIDGGASQEEFYKFIKPILEKMDGTEELLVKLNREDLLRKQRTFDNGSIPHQIHLGELHAILRRQEDFYPFLKDNREKIEKILTFRIPYYVGPLARGNSRFAWMTRKSEETITPWNFEEVVDKGASAQSFIERMTNFDKNLPNEKVLPKHSLLYEYFTVYNELTKVKYVTEGMRKPAFLSGEQKKAIVDLLFKTNRKVTVKQLKEDYFKKIECFDSVEISGVEDRFNASLGTYHDLLKIIKDKDFLDNEENEDILEDIVLTLTLFEDREMIEERLKTYAHLFDDKVMKQLKRRRYTGWGRLSRKLINGIRDKQSGKTILDFLKSDGFANRNFMQLIHDDSLTFKEDIQKAQVSGQGDSLHEHIANLAGSPAIKKGILQTVKVVDELVKVMGRHKPENIVIEMARENQTTQKGQKNSRERMKRIEEGIKELGSQILKEHPVENTQLQNEKLYLYYLQNGRDMYVDQELDINRLSDYDVDHIVPQSFLKDDSIDNKVLTRSDKARGKSDNVPSEEVVKKMKNYWRQLLNAKLITQRKFDNLTKAERGGLSELDKAGFIKRQLVETRQITKHVAQILDSRMNTKYDENDKLIREVKVITLKSKLVSDFRKDFQFYKVREINNYHHAHDAYLNAVVGTALIKKYPKLESEFVYGDYKVYDVRKMIAKSEQEIGKATAKYFFYSNIMNFFKTEITLANGEIRKRPLIETNGETGEIVWDKGRDFATVRKVLSMPQVNIVKKTEVQTGGFSKESILPKRNSDKLIARKKDWDPKKYGGFDSPTVAYSVLVVAKVEKGKSKKLKSVKELLGITIMERSSFEKNPIDFLEAKGYKEVKKDLIIKLPKYSLFELENGRKRMLASAGELQKGNELALPSKYVNFLYLASHYEKLKGSPEDNEQKQLFVEQHKHYLDEIIEQISEFSKRVILADANLDKVLSAYNKHRDKPIREQAENIIHLFTLTNLGAPAAFKYFDTTIDRKRYTSTKEVLDATLIHQSITGLYETRIDLSQLGGDGGGSSEAAAKPAPGGTLNIEDEYRLHETSKEPDVPLGSTWLSDFPQAWAETGGMGLAVRQAPLIIPLKATSTPVSIKQYPMSQEARLGIKPHIQRLLDQGILVPCQSPWNTPLLPVKKPGTNDYRPVQDLREVNKRVEDIHPTVPNPYNLLSGLPPSHQWYTVLDLKDAFFCLRLHPTSQPLFAFEWRDPEMGISGQLTWTRLPQGFKNSPTLFNEALHRDLADFRIQHPDLILLQYVDDLLLAATSEQDCQRGTRALLQTLGNLGYRASAKKAQICQKQVKYLGYLLKEGQRWLTEARKETVMGQPTPKTPRQLREFLGKAGFCRLFIPGFAEMAAPLYPLTKPGTLFNWGPDQQKAYQEIKQALLTAPALGLPDLTKPFELFVDEKQGYAKGVLTQKLGPWRRPVAYLSKKLDPVAAGWPPCLRMVAAIAVLTKDAGKLTMGQPLVILAPHAVEALVKQPPDRWLSNARMTHYQAMLLDTDRVQFGPVVALNPATLLPLPEKEAPHDCLEILAETHGTRPDLTDQPIPDADYTWYTDGSSFLQEGQRRAGAAVTTETEVIWARALPAGTSAQRAELIALTQALKMAEGKKLNVYTDSRYAFATAHVHGEIYRRRGWLTSEGREIKNKNEILALLKALFLPKRLSIIHCPGHQKGNSAEARGNRMADQAAREAAMKAVLETSTLLAGKRTADGSEFEKRTADGSEFESPKKKAKVE

SEQ ID NO: 1028 - protein, 2101 aa, synthetic construct
MPAAKRVKLDGGDKKYSIGLDIGTNSVGWAVITDEYKVPSKKFKVLGNTDRHSIKKNLIGALLFDSGETAEATRLKRTARRRYTRRKNRICYLQEIFSNEMAKVDDSFFHRLEESFLVEEDKKHERHPIFGNIVDEVAYHEKYPTIYHLRKKLVDSTDKADLRLIYLALAHMIKFRGHFLIEGDLNPDNSDVDKLFIQLVQTYNQLFEENPINASGVDAKAILSARLSKSRRLENLIAQLPGEKKNGLFGNLIALSLGLTPNFKSNFDLAEDAKLQLSKDTYDDDLDNLLAQIGDQYADLFLAAKNLSDAILLSDILRVNTEITKAPLSASMIKRYDEHHQDLTLLKALVRQQLPEKYKEIFFDQSKNGYAGYIDGGASQEEFYKFIKPILEKMDGTEELLVKLNREDLLRKQRTFDNGSIPHQIHLGELHAILRRQEDFYPFLKDNREKIEKILTFRIPYYVGPLARGNSRFAWMTRKSEETITPWNFEEVVDKGASAQSFIERMTNFDKNLPNEKVLPKHSLLYEYFTVYNELTKVKYVTEGMRKPAFLSGEQKKAIVDLLFKTNRKVTVKQLKEDYFKKIECFDSVEISGVEDRFNASLGTYHDLLKIIKDKDFLDNEENEDILEDIVLTLTLFEDREMIEERLKTYAHLFDDKVMKQLKRRRYTGWGRLSRKLINGIRDKQSGKTILDFLKSDGFANRNFMQLIHDDSLTFKEDIQKAQVSGQGDSLHEHIANLAGSPAIKKGILQTVKVVDELVKVMGRHKPENIVIEMARENQTTQKGQKNSRERMKRIEEGIKELGSQILKEHPVENTQLQNEKLYLYYLQNGRDMYVDQELDINRLSDYDVDHIVPQSFLKDDSIDNKVLTRSDKARGKSDNVPSEEVVKKMKNYWRQLLNAKLITQRKFDNLTKAERGGLSELDKAGFIKRQLVETRQITKHVAQILDSRMNTKYDENDKLIREVKVITLKSKLVSDFRKDFQFYKVREINNYHHAHDAYLNAVVGTALIKKYPKLESEFVYGDYKVYDVRKMIAKSEQEIGKATAKYFFYSNIMNFFKTEITLANGEIRKRPLIETNGETGEIVWDKGRDFATVRKVLSMPQVNIVKKTEVQTGGFSKESILPKRNSDKLIARKKDWDPKKYGGFDSPTVAYSVLVVAKVEKGKSKKLKSVKELLGITIMERSSFEKNPIDFLEAKGYKEVKKDLIIKLPKYSLFELENGRKRMLASAGELQKGNELALPSKYVNFLYLASHYEKLKGSPEDNEQKQLFVEQHKHYLDEIIEQISEFSKRVILADANLDKVLSAYNKHRDKPIREQAENIIHLFTLTNLGAPAAFKYFDTTIDRKRYTSTKEVLDATLIHQSITGLYETRIDLSQLGGDGGSGSETPGTSESATPESGGTLNIEDEYRLHETSKEPDVPLGSTWLSDFPQAWAETGGMGLAVRQAPLIIPLKATSTPVSIKQYPMSQEARLGIKPHIQRLLDQGILVPCQSPWNTPLLPVKKPGTNDYRPVQDLREVNKRVEDIHPTVPNPYNLLSGLPPSHQWYTVLDLKDAFFCLRLHPTSQPLFAFEWRDPEMGISGQLTWTRLPQGFKNSPTLFNEALHRDLADFRIQHPDLILLQYVDDLLLAATSEQDCQRGTRALLQTLGNLGYRASAKKAQICQKQVKYLGYLLKEGQRWLTEARKETVMGQPTPKTPRQLREFLGKAGFCRLFIPGFAEMAAPLYPLTKPGTLFNWGPDQQKAYQEIKQALLTAPALGLPDLTKPFELFVDEKQGYAKGVLTQKLGPWRRPVAYLSKKLDPVAAGWPPCLRMVAAIAVLTKDAGKLTMGQPLVILAPHAVEALVKQPPDRWLSNARMTHYQAMLLDTDRVQFGPVVALNPATLLPLPEKEAPHDCLEILAETHGTRPDLTDQPIPDADYTWYTDGSSFLQEGQRRAGAAVTTETEVIWARALPAGTSAQRAELIALTQALKMAEGKKLNVYTDSRYAFATAHVHGEIYRRRGWLTSEGREIKNKNEILALLKALFLPKRLSIIHCPGHQKGNSAEARGNRMADQAAREAAMKAVLETSTLLAGKRTADGSEFEKRTADGSEFESPKKKAKVE

SEQ ID NO: 1029 - protein, 2110 aa, synthetic construct
MPAAKRVKLDGGDKKYSIGLDIGTNSVGWAVITDEYKVPSKKFKVLGNTDRHSIKKNLIGALLFDSGETAEATRLKRTARRRYTRRKNRICYLQEIFSNEMAKVDDSFFHRLEESFLVEEDKKHERHPIFGNIVDEVAYHEKYPTIYHLRKKLVDSTDKADLRLIYLALAHMIKFRGHFLIEGDLNPDNSDVDKLFIQLVQTYNQLFEENPINASGVDAKAILSARLSKSRRLENLIAQLPGEKKNGLFGNLIALSLGLTPNFKSNFDLAEDAKLQLSKDTYDDDLDNLLAQIGDQYADLFLAAKNLSDAILLSDILRVNTEITKAPLSASMIKRYDEHHQDLTLLKALVRQQLPEKYKEIFFDQSKNGYAGYIDGGASQEEFYKFIKPILEKMDGTEELLVKLNREDLLRKQRTFDNGSIPHQIHLGELHAILRRQEDFYPFLKDNREKIEKILTFRIPYYVGPLARGNSRFAWMTRKSEETITPWNFEEVVDKGASAQSFIERMTNFDKNLPNEKVLPKHSLLYEYFTVYNELTKVKYVTEGMRKPAFLSGEQKKAIVDLLFKTNRKVTVKQLKEDYFKKIECFDSVEISGVEDRFNASLGTYHDLLKIIKDKDFLDNEENEDILEDIVLTLTLFEDREMIEERLKTYAHLFDDKVMKQLKRRRYTGWGRLSRKLINGIRDKQSGKTILDFLKSDGFANRNFMQLIHDDSLTFKEDIQKAQVSGQGDSLHEHIANLAGSPAIKKGILQTVKVVDELVKVMGRHKPENIVIEMARENQTTQKGQKNSRERMKRIEEGIKELGSQILKEHPVENTQLQNEKLYLYYLQNGRDMYVDQELDINRLSDYDVDHIVPQSFLKDDSIDNKVLTRSDKARGKSDNVPSEEVVKKMKNYWRQLLNAKLITQRKFDNLTKAERGGLSELDKAGFIKRQLVETRQITKHVAQILDSRMNTKYDENDKLIREVKVITLKSKLVSDFRKDFQFYKVREINNYHHAHDAYLNAVVGTALIKKYPKLESEFVYGDYKVYDVRKMIAKSEQEIGKATAKYFFYSNIMNFFKTEITLANGEIRKRPLIETNGETGEIVWDKGRDFATVRKVLSMPQVNIVKKTEVQTGGFSKESILPKRNSDKLIARKKDWDPKKYGGFDSPTVAYSVLVVAKVEKGKSKKLKSVKELLGITIMERSSFEKNPIDFLEAKGYKEVKKDLIIKLPKYSLFELENGRKRMLASAGELQKGNELALPSKYVNFLYLASHYEKLKGSPEDNEQKQLFVEQHKHYLDEIIEQISEFSKRVILADANLDKVLSAYNKHRDKPIREQAENIIHLFTLTNLGAPAAFKYFDTTIDRKRYTSTKEVLDATLIHQSITGLYETRIDLSQLGGDGGEAAAKEAAAKEAAAKEAAAKEAAAKGGTLNIEDEYRLHETSKEPDVPLGSTWLSDFPQAWAETGGMGLAVRQAPLIIPLKATSTPVSIKQYPMSQEARLGIKPHIQRLLDQGILVPCQSPWNTPLLPVKKPGTNDYRPVQDLREVNKRVEDIHPTVPNPYNLLSGLPPSHQWYTVLDLKDAFFCLRLHPTSQPLFAFEWRDPEMGISGQLTWTRLPQGFKNSPTLFNEALHRDLADFRIQHPDLILLQYVDDLLLAATSEQDCQRGTRALLQTLGNLGYRASAKKAQICQKQVKYLGYLLKEGQRWLTEARKETVMGQPTPKTPRQLREFLGKAGFCRLFIPGFAEMAAPLYPLTKPGTLFNWGPDQQKAYQEIKQALLTAPALGLPDLTKPFELFVDEKQGYAKGVLTQKLGPWRRPVAYLSKKLDPVAAGWPPCLRMVAAIAVLTKDAGKLTMGQPLVILAPHAVEALVKQPPDRWLSNARMTHYQAMLLDTDRVQFGPVVALNPATLLPLPEKEAPHDCLEILAETHGTRPDLTDQPIPDADYTWYTDGSSFLQEGQRRAGAAVTTETEVIWARALPAGTSAQRAELIALTQALKMAEGKKLNVYTDSRYAFATAHVHGEIYRRRGWLTSEGREIKNKNEILALLKALFLPKRLSIIHCPGHQKGNSAEARGNRMADQAAREAAMKAVLETSTLLAGKRTADGSEFEKRTADGSEFESPKKKAKVE

SEQ ID NO: 1030 - protein, 2091 aa, synthetic construct
MPAAKRVKLDGGDKKYSIGLDIGTNSVGWAVITDEYKVPSKKFKVLGNTDRHSIKKNLIGALLFDSGETAEATRLKRTARRRYTRRKNRICYLQEIFSNEMAKVDDSFFHRLEESFLVEEDKKHERHPIFGNIVDEVAYHEKYPTIYHLRKKLVDSTDKADLRLIYLALAHMIKFRGHFLIEGDLNPDNSDVDKLFIQLVQTYNQLFEENPINASGVDAKAILSARLSKSRRLENLIAQLPGEKKNGLFGNLIALSLGLTPNFKSNFDLAEDAKLQLSKDTYDDDLDNLLAQIGDQYADLFLAAKNLSDAILLSDILRVNTEITKAPLSASMIKRYDEHHQDLTLLKALVRQQLPEKYKEIFFDQSKNGYAGYIDGGASQEEFYKFIKPILEKMDGTEELLVKLNREDLLRKQRTFDNGSIPHQIHLGELHAILRRQEDFYPFLKDNREKIEKILTFRIPYYVGPLARGNSRFAWMTRKSEETITPWNFEEVVDKGASAQSFIERMTNFDKNLPNEKVLPKHSLLYEYFTVYNELTKVKYVTEGMRKPAFLSGEQKKAIVDLLFKTNRKVTVKQLKEDYFKKIECFDSVEISGVEDRFNASLGTYHDLLKIIKDKDFLDNEENEDILEDIVLTLTLFEDREMIEERLKTYAHLFDDKVMKQLKRRRYTGWGRLSRKLINGIRDKQSGKTILDFLKSDGFANRNFMQLIHDDSLTFKEDIQKAQVSGQGDSLHEHIANLAGSPAIKKGILQTVKVVDELVKVMGRHKPENIVIEMARENQTTQKGQKNSRERMKRIEEGIKELGSQILKEHPVENTQLQNEKLYLYYLQNGRDMYVDQELDINRLSDYDVDHIVPQSFLKDDSIDNKVLTRSDKARGKSDNVPSEEVVKKMKNYWRQLLNAKLITQRKFDNLTKAERGGLSELDKAGFIKRQLVETRQITKHVAQILDSRMNTKYDENDKLIREVKVITLKSKLVSDFRKDFQFYKVREINNYHHAHDAYLNAVVGTALIKKYPKLESEFVYGDYKVYDVRKMIAKSEQEIGKATAKYFFYSNIMNFFKTEITLANGEIRKRPLIETNGETGEIVWDKGRDFATVRKVLSMPQVNIVKKTEVQTGGFSKESILPKRNSDKLIARKKDWDPKKYGGFDSPTVAYSVLVVAKVEKGKSKKLKSVKELLGITIMERSSFEKNPIDFLEAKGYKEVKKDLIIKLPKYSLFELENGRKRMLASAGELQKGNELALPSKYVNFLYLASHYEKLKGSPEDNEQKQLFVEQHKHYLDEIIEQISEFSKRVILADANLDKVLSAYNKHRDKPIREQAENIIHLFTLTNLGAPAAFKYFDTTIDRKRYTSTKEVLDATLIHQSITGLYETRIDLSQLGGDGGPAPGGSGGTLNIEDEYRLHETSKEPDVPLGSTWLSDFPQAWAETGGMGLAVRQAPLIIPLKATSTPVSIKQYPMSQEARLGIKPHIQRLLDQGILVPCQSPWNTPLLPVKKPGTNDYRPVQDLREVNKRVEDIHPTVPNPYNLLSGLPPSHQWYTVLDLKDAFFCLRLHPTSQPLFAFEWRDPEMGISGQLTWTRLPQGFKNSPTLFNEALHRDLADFRIQHPDLILLQYVDDLLLAATSEQDCQRGTRALLQTLGNLGYRASAKKAQICQKQVKYLGYLLKEGQRWLTEARKETVMGQPTPKTPRQLREFLGKAGFCRLFIPGFAEMAAPLYPLTKPGTLFNWGPDQQKAYQEIKQALLTAPALGLPDLTKPFELFVDEKQGYAKGVLTQKLGPWRRPVAYLSKKLDPVAAGWPPCLRMVAAIAVLTKDAGKLTMGQPLVILAPHAVEALVKQPPDRWLSNARMTHYQAMLLDTDRVQFGPVVALNPATLLPLPEKEAPHDCLEILAETHGTRPDLTDQPIPDADYTWYTDGSSFLQEGQRRAGAAVTTETEVIWARALPAGTSAQRAELIALTQALKMAEGKKLNVYTDSRYAFATAHVHGEIYRRRGWLTSEGREIKNKNEILALLKALFLPKRLSIIHCPGHQKGNSAEARGNRMADQAAREAAMKAVLETSTLLAGKRTADGSEFEKRTADGSEFESPKKKAKVE

SEQ ID NO: 1031 - protein, 2091 aa, synthetic construct
MPAAKRVKLDGGDKKYSIGLDIGTNSVGWAVITDEYKVPSKKFKVLGNTDRHSIKKNLIGALLFDSGETAEATRLKRTARRRYTRRKNRICYLQEIFSNEMAKVDDSFFHRLEESFLVEEDKKHERHPIFGNIVDEVAYHEKYPTIYHLRKKLVDSTDKADLRLIYLALAHMIKFRGHFLIEGDLNPDNSDVDKLFIQLVQTYNQLFEENPINASGVDAKAILSARLSKSRRLENLIAQLPGEKKNGLFGNLIALSLGLTPNFKSNFDLAEDAKLQLSKDTYDDDLDNLLAQIGDQYADLFLAAKNLSDAILLSDILRVNTEITKAPLSASMIKRYDEHHQDLTLLKALVRQQLPEKYKEIFFDQSKNGYAGYIDGGASQEEFYKFIKPILEKMDGTEELLVKLNREDLLRKQRTFDNGSIPHQIHLGELHAILRRQEDFYPFLKDNREKIEKILTFRIPYYVGPLARGNSRFAWMTRKSEETITPWNFEEVVDKGASAQSFIERMTNFDKNLPNEKVLPKHSLLYEYFTVYNELTKVKYVTEGMRKPAFLSGEQKKAIVDLLFKTNRKVTVKQLKEDYFKKIECFDSVEISGVEDRFNASLGTYHDLLKIIKDKDFLDNEENEDILEDIVLTLTLFEDREMIEERLKTYAHLFDDKVMKQLKRRRYTGWGRLSRKLINGIRDKQSGKTILDFLKSDGFANRNFMQLIHDDSLTFKEDIQKAQVSGQGDSLHEHIANLAGSPAIKKGILQTVKVVDELVKVMGRHKPENIVIEMARENQTTQKGQKNSRERMKRIEEGIKELGSQILKEHPVENTQLQNEKLYLYYLQNGRDMYVDQELDINRLSDYDVDHIVPQSFLKDDSIDNKVLTRSDKARGKSDNVPSEEVVKKMKNYWRQLLNAKLITQRKFDNLTKAERGGLSELDKAGFIKRQLVETRQITKHVAQILDSRMNTKYDENDKLIREVKVITLKSKLVSDFRKDFQFYKVREINNYHHAHDAYLNAVVGTALIKKYPKLESEFVYGDYKVYDVRKMIAKSEQEIGKATAKYFFYSNIMNFFKTEITLANGEIRKRPLIETNGETGEIVWDKGRDFATVRKVLSMPQVNIVKKTEVQTGGFSKESILPKRNSDKLIARKKDWDPKKYGGFDSPTVAYSVLVVAKVEKGKSKKLKSVKELLGITIMERSSFEKNPIDFLEAKGYKEVKKDLIIKLPKYSLFELENGRKRMLASAGELQKGNELALPSKYVNFLYLASHYEKLKGSPEDNEQKQLFVEQHKHYLDEIIEQISEFSKRVILADANLDKVLSAYNKHRDKPIREQAENIIHLFTLTNLGAPAAFKYFDTTIDRKRYTSTKEVLDATLIHQSITGLYETRIDLSQLGGDGGGGGGSSGGTLNIEDEYRLHETSKEPDVPLGSTWLSDFPQAWAETGGMGLAVRQAPLIIPLKATSTPVSIKQYPMSQEARLGIKPHIQRLLDQGILVPCQSPWNTPLLPVKKPGTNDYRPVQDLREVNKRVEDIHPTVPNPYNLLSGLPPSHQWYTVLDLKDAFFCLRLHPTSQPLFAFEWRDPEMGISGQLTWTRLPQGFKNSPTLFNEALHRDLADFRIQHPDLILLQYVDDLLLAATSEQDCQRGTRALLQTLGNLGYRASAKKAQICQKQVKYLGYLLKEGQRWLTEARKETVMGQPTPKTPRQLREFLGKAGFCRLFIPGFAEMAAPLYPLTKPGTLFNWGPDQQKAYQEIKQALLTAPALGLPDLTKPFELFVDEKQGYAKGVLTQKLGPWRRPVAYLSKKLDPVAAGWPPCLRMVAAIAVLTKDAGKLTMGQPLVILAPHAVEALVKQPPDRWLSNARMTHYQAMLLDTDRVQFGPVVALNPATLLPLPEKEAPHDCLEILAETHGTRPDLTDQPIPDADYTWYTDGSSFLQEGQRRAGAAVTTETEVIWARALPAGTSAQRAELIALTQALKMAEGKKLNVYTDSRYAFATAHVHGEIYRRRGWLTSEGREIKNKNEILALLKALFLPKRLSIIHCPGHQKGNSAEARGNRMADQAAREAAMKAVLETSTLLAGKRTADGSEFEKRTADGSEFESPKKKAKVE

SEQ ID NO: 1032 - protein, 2094 aa, synthetic construct
MPAAKRVKLDGGDKKYSIGLDIGTNSVGWAVITDEYKVPSKKFKVLGNTDRHSIKKNLIGALLFDSGETAEATRLKRTARRRYTRRKNRICYLQEIFSNEMAKVDDSFFHRLEESFLVEEDKKHERHPIFGNIVDEVAYHEKYPTIYHLRKKLVDSTDKADLRLIYLALAHMIKFRGHFLIEGDLNPDNSDVDKLFIQLVQTYNQLFEENPINASGVDAKAILSARLSKSRRLENLIAQLPGEKKNGLFGNLIALSLGLTPNFKSNFDLAEDAKLQLSKDTYDDDLDNLLAQIGDQYADLFLAAKNLSDAILLSDILRVNTEITKAPLSASMIKRYDEHHQDLTLLKALVRQQLPEKYKEIFFDQSKNGYAGYIDGGASQEEFYKFIKPILEKMDGTEELLVKLNREDLLRKQRTFDNGSIPHQIHLGELHAILRRQEDFYPFLKDNREKIEKILTFRIPYYVGPLARGNSRFAWMTRKSEETITPWNFEEVVDKGASAQSFIERMTNFDKNLPNEKVLPKHSLLYEYFTVYNELTKVKYVTEGMRKPAFLSGEQKKAIVDLLFKTNRKVTVKQLKEDYFKKIECFDSVEISGVEDRFNASLGTYHDLLKIIKDKDFLDNEENEDILEDIVLTLTLFEDREMIEERLKTYAHLFDDKVMKQLKRRRYTGWGRLSRKLINGIRDKQSGKTILDFLKSDGFANRNFMQLIHDDSLTFKEDIQKAQVSGQGDSLHEHIANLAGSPAIKKGILQTVKVVDELVKVMGRHKPENIVIEMARENQTTQKGQKNSRERMKRIEEGIKELGSQILKEHPVENTQLQNEKLYLYYLQNGRDMYVDQELDINRLSDYDVDHIVPQSFLKDDSIDNKVLTRSDKARGKSDNVPSEEVVKKMKNYWRQLLNAKLITQRKFDNLTKAERGGLSELDKAGFIKRQLVETRQITKHVAQILDSRMNTKYDENDKLIREVKVITLKSKLVSDFRKDFQFYKVREINNYHHAHDAYLNAVVGTALIKKYPKLESEFVYGDYKVYDVRKMIAKSEQEIGKATAKYFFYSNIMNFFKTEITLANGEIRKRPLIETNGETGEIVWDKGRDFATVRKVLSMPQVNIVKKTEVQTGGFSKESILPKRNSDKLIARKKDWDPKKYGGFDSPTVAYSVLVVAKVEKGKSKKLKSVKELLGITIMERSSFEKNPIDFLEAKGYKEVKKDLIIKLPKYSLFELENGRKRMLASAGELQKGNELALPSKYVNFLYLASHYEKLKGSPEDNEQKQLFVEQHKHYLDEIIEQISEFSKRVILADANLDKVLSAYNKHRDKPIREQAENIIHLFTLTNLGAPAAFKYFDTTIDRKRYTSTKEVLDATLIHQSITGLYETRIDLSQLGGDGGPAPAPAPAPGGTLNIEDEYRLHETSKEPDVPLGSTWLSDFPQAWAETGGMGLAVRQAPLIIPLKATSTPVSIKQYPMSQEARLGIKPHIQRLLDQGILVPCQSPWNTPLLPVKKPGTNDYRPVQDLREVNKRVEDIHPTVPNPYNLLSGLPPSHQWYTVLDLKDAFFCLRLHPTSQPLFAFEWRDPEMGISGQLTWTRLPQGFKNSPTLFNEALHRDLADFRIQHPDLILLQYVDDLLLAATSEQDCQRGTRALLQTLGNLGYRASAKKAQICQKQVKYLGYLLKEGQRWLTEARKETVMGQPTPKTPRQLREFLGKAGFCRLFIPGFAEMAAPLYPLTKPGTLFNWGPDQQKAYQEIKQALLTAPALGLPDLTKPFELFVDEKQGYAKGVLTQKLGPWRRPVAYLSKKLDPVAAGWPPCLRMVAAIAVLTKDAGKLTMGQPLVILAPHAVEALVKQPPDRWLSNARMTHYQAMLLDTDRVQFGPVVALNPATLLPLPEKEAPHDCLEILAETHGTRPDLTDQPIPDADYTWYTDGSSFLQEGQRRAGAAVTTETEVIWARALPAGTSAQRAELIALTQALKMAEGKKLNVYTDSRYAFATAHVHGEIYRRRGWLTSEGREIKNKNEILALLKALFLPKRLSIIHCPGHQKGNSAEARGNRMADQAAREAAMKAVLETSTLLAGKRTADGSEFEKRTADGSEFESPKKKAKVE

SEQ ID NO: 1033 - protein, 2094 aa, synthetic construct
MPAAKRVKLDGGDKKYSIGLDIGTNSVGWAVITDEYKVPSKKFKVLGNTDRHSIKKNLIGALLFDSGETAEATRLKRTARRRYTRRKNRICYLQEIFSNEMAKVDDSFFHRLEESFLVEEDKKHERHPIFGNIVDEVAYHEKYPTIYHLRKKLVDSTDKADLRLIYLALAHMIKFRGHFLIEGDLNPDNSDVDKLFIQLVQTYNQLFEENPINASGVDAKAILSARLSKSRRLENLIAQLPGEKKNGLFGNLIALSLGLTPNFKSNFDLAEDAKLQLSKDTYDDDLDNLLAQIGDQYADLFLAAKNLSDAILLSDILRVNTEITKAPLSASMIKRYDEHHQDLTLLKALVRQQLPEKYKEIFFDQSKNGYAGYIDGGASQEEFYKFIKPILEKMDGTEELLVKLNREDLLRKQRTFDNGSIPHQIHLGELHAILRRQEDFYPFLKDNREKIEKILTFRIPYYVGPLARGNSRFAWMTRKSEETITPWNFEEVVDKGASAQSFIERMTNFDKNLPNEKVLPKHSLLYEYFTVYNELTKVKYVTEGMRKPAFLSGEQKKAIVDLLFKTNRKVTVKQLKEDYFKKIECFDSVEISGVEDRFNASLGTYHDLLKIIKDKDFLDNEENEDILEDIVLTLTLFEDREMIEERLKTYAHLFDDKVMKQLKRRRYTGWGRLSRKLINGIRDKQSGKTILDFLKSDGFANRNFMQLIHDDSLTFKEDIQKAQVSGQGDSLHEHIANLAGSPAIKKGILQTVKVVDELVKVMGRHKPENIVIEMARENQTTQKGQKNSRERMKRIEEGIKELGSQILKEHPVENTQLQNEKLYLYYLQNGRDMYVDQELDINRLSDYDVDHIVPQSFLKDDSIDNKVLTRSDKARGKSDNVPSEEVVKKMKNYWRQLLNAKLITQRKFDNLTKAERGGLSELDKAGFIKRQLVETRQITKHVAQILDSRMNTKYDENDKLIREVKVITLKSKLVSDFRKDFQFYKVREINNYHHAHDAYLNAVVGTALIKKYPKLESEFVYGDYKVYDVRKMIAKSEQEIGKATAKYFFYSNIMNFFKTEITLANGEIRKRPLIETNGETGEIVWDKGRDFATVRKVLSMPQVNIVKKTEVQTGGFSKESILPKRNSDKLIARKKDWDPKKYGGFDSPTVAYSVLVVAKVEKGKSKKLKSVKELLGITIMERSSFEKNPIDFLEAKGYKEVKKDLIIKLPKYSLFELENGRKRMLASAGELQKGNELALPSKYVNFLYLASHYEKLKGSPEDNEQKQLFVEQHKHYLDEIIEQISEFSKRVILADANLDKVLSAYNKHRDKPIREQAENIIHLFTLTNLGAPAAFKYFDTTIDRKRYTSTKEVLDATLIHQSITGLYETRIDLSQLGGDGGPAPGSSGGGGGTLNIEDEYRLHETSKEPDVPLGSTWLSDFPQAWAETGGMGLAVRQAPLIIPLKATSTPVSIKQYPMSQEARLGIKPHIQRLLDQGILVPCQSPWNTPLLPVKKPGTNDYRPVQDLREVNKRVEDIHPTVPNPYNLLSGLPPSHQWYTVLDLKDAFFCLRLHPTSQPLFAFEWRDPEMGISGQLTWTRLPQGFKNSPTLFNEALHRDLADFRIQHPDLILLQYVDDLLLAATSEQDCQRGTRALLQTLGNLGYRASAKKAQICQKQVKYLGYLLKEGQRWLTEARKETVMGQPTPKTPRQLREFLGKAGFCRLFIPGFAEMAAPLYPLTKPGTLFNWGPDQQKAYQEIKQALLTAPALGLPDLTKPFELFVDEKQGYAKGVLTQKLGPWRRPVAYLSKKLDPVAAGWPPCLRMVAAIAVLTKDAGKLTMGQPLVILAPHAVEALVKQPPDRWLSNARMTHYQAMLLDTDRVQFGPVVALNPATLLPLPEKEAPHDCLEILAETHGTRPDLTDQPIPDADYTWYTDGSSFLQEGQRRAGAAVTTETEVIWARALPAGTSAQRAELIALTQALKMAEGKKLNVYTDSRYAFATAHVHGEIYRRRGWLTSEGREIKNKNEILALLKALFLPKRLSIIHCPGHQKGNSAEARGNRMADQAAREAAMKAVLETSTLLAGKRTADGSEFEKRTADGSEFESPKKKAKVE

SEQ ID NO: 1034 - protein, 2096 aa, synthetic construct
MPAAKRVKLDGGDKKYSIGLDIGTNSVGWAVITDEYKVPSKKFKVLGNTDRHSIKKNLIGALLFDSGETAEATRLKRTARRRYTRRKNRICYLQEIFSNEMAKVDDSFFHRLEESFLVEEDKKHERHPIFGNIVDEVAYHEKYPTIYHLRKKLVDSTDKADLRLIYLALAHMIKFRGHFLIEGDLNPDNSDVDKLFIQLVQTYNQLFEENPINASGVDAKAILSARLSKSRRLENLIAQLPGEKKNGLFGNLIALSLGLTPNFKSNFDLAEDAKLQLSKDTYDDDLDNLLAQIGDQYADLFLAAKNLSDAILLSDILRVNTEITKAPLSASMIKRYDEHHQDLTLLKALVRQQLPEKYKEIFFDQSKNGYAGYIDGGASQEEFYKFIKPILEKMDGTEELLVKLNREDLLRKQRTFDNGSIPHQIHLGELHAILRRQEDFYPFLKDNREKIEKILTFRIPYYVGPLARGNSRFAWMTRKSEETITPWNFEEVVDKGASAQSFIERMTNFDKNLPNEKVLPKHSLLYEYFTVYNELTKVKYVTEGMRKPAFLSGEQKKAIVDLLFKTNRKVTVKQLKEDYFKKIECFDSVEISGVEDRFNASLGTYHDLLKIIKDKDFLDNEENEDILEDIVLTLTLFEDREMIEERLKTYAHLFDDKVMKQLKRRRYTGWGRLSRKLINGIRDKQSGKTILDFLKSDGFANRNFMQLIHDDSLTFKEDIQKAQVSGQGDSLHEHIANLAGSPAIKKGILQTVKVVDELVKVMGRHKPENIVIEMARENQTTQKGQKNSRERMKRIEEGIKELGSQILKEHPVENTQLQNEKLYLYYLQNGRDMYVDQELDINRLSDYDVDHIVPQSFLKDDSIDNKVLTRSDKARGKSDNVPSEEVVKKMKNYWRQLLNAKLITQRKFDNLTKAERGGLSELDKAGFIKRQLVETRQITKHVAQILDSRMNTKYDENDKLIREVKVITLKSKLVSDFRKDFQFYKVREINNYHHAHDAYLNAVVGTALIKKYPKLESEFVYGDYKVYDVRKMIAKSEQEIGKATAKYFFYSNIMNFFKTEITLANGEIRKRPLIETNGETGEIVWDKGRDFATVRKVLSMPQVNIVKKTEVQTGGFSKESILPKRNSDKLIARKKDWDPKKYGGFDSPTVAYSVLVVAKVEKGKSKKLKSVKELLGITIMERSSFEKNPIDFLEAKGYKEVKKDLIIKLPKYSLFELENGRKRMLASAGELQKGNELALPSKYVNFLYLASHYEKLKGSPEDNEQKQLFVEQHKHYLDEIIEQISEFSKRVILADANLDKVLSAYNKHRDKPIREQAENIIHLFTLTNLGAPAAFKYFDTTIDRKRYTSTKEVLDATLIHQSITGLYETRIDLSQLGGDGGPAPGGSEAAAKGGTLNIEDEYRLHETSKEPDVPLGSTWLSDFPQAWAETGGMGLAVRQAPLIIPLKATSTPVSIKQYPMSQEARLGIKPHIQRLLDQGILVPCQSPWNTPLLPVKKPGTNDYRPVQDLREVNKRVEDIHPTVPNPYNLLSGLPPSHQWYTVLDLKDAFFCLRLHPTSQPLFAFEWRDPEMGISGQLTWTRLPQGFKNSPTLFNEALHRDLADFRIQHPDLILLQYVDDLLLAATSEQDCQRGTRALLQTLGNLGYRASAKKAQICQKQVKYLGYLLKEGQRWLTEARKETVMGQPTPKTPRQLREFLGKAGFCRLFIPGFAEMAAPLYPLTKPGTLFNWGPDQQKAYQEIKQALLTAPALGLPDLTKPFELFVDEKQGYAKGVLTQKLGPWRRPVAYLSKKLDPVAAGWPPCLRMVAAIAVLTKDAGKLTMGQPLVILAPHAVEALVKQPPDRWLSNARMTHYQAMLLDTDRVQFGPVVALNPATLLPLPEKEAPHDCLEILAETHGTRPDLTDQPIPDADYTWYTDGSSFLQEGQRRAGAAVTTETEVIWARALPAGTSAQRAELIALTQALKMAEGKKLNVYTDSRYAFATAHVHGEIYRRRGWLTSEGREIKNKNEILALLKALFLPKRLSIIHCPGHQKGNSAEARGNRMADQAAREAAMKAVLETSTLLAGKRTADGSEFEKRTADGSEFESPKKKAKVE

SEQ ID NO: 1035 - protein, 2096 aa, synthetic construct
MPAAKRVKLDGGDKKYSIGLDIGTNSVGWAVITDEYKVPSKKFKVLGNTDRHSIKKNLIGALLFDSGETAEATRLKRTARRRYTRRKNRICYLQEIFSNEMAKVDDSFFHRLEESFLVEEDKKHERHPIFGNIVDEVAYHEKYPTIYHLRKKLVDSTDKADLRLIYLALAHMIKFRGHFLIEGDLNPDNSDVDKLFIQLVQTYNQLFEENPINASGVDAKAILSARLSKSRRLENLIAQLPGEKKNGLFGNLIALSLGLTPNFKSNFDLAEDAKLQLSKDTYDDDLDNLLAQIGDQYADLFLAAKNLSDAILLSDILRVNTEITKAPLSASMIKRYDEHHQDLTLLKALVRQQLPEKYKEIFFDQSKNGYAGYIDGGASQEEFYKFIKPILEKMDGTEELLVKLNREDLLRKQRTFDNGSIPHQIHLGELHAILRRQEDFYPFLKDNREKIEKILTFRIPYYVGPLARGNSRFAWMTRKSEETITPWNFEEVVDKGASAQSFIERMTNFDKNLPNEKVLPKHSLLYEYFTVYNELTKVKYVTEGMRKPAFLSGEQKKAIVDLLFKTNRKVTVKQLKEDYFKKIECFDSVEISGVEDRFNASLGTYHDLLKIIKDKDFLDNEENEDILEDIVLTLTLFEDREMIEERLKTYAHLFDDKVMKQLKRRRYTGWGRLSRKLINGIRDKQSGKTILDFLKSDGFANRNFMQLIHDDSLTFKEDIQKAQVSGQGDSLHEHIANLAGSPAIKKGILQTVKVVDELVKVMGRHKPENIVIEMARENQTTQKGQKNSRERMKRIEEGIKELGSQILKEHPVENTQLQNEKLYLYYLQNGRDMYVDQELDINRLSDYDVDHIVPQSFLKDDSIDNKVLTRSDKARGKSDNVPSEEVVKKMKNYWRQLLNAKLITQRKFDNLTKAERGGLSELDKAGFIKRQLVETRQITKHVAQILDSRMNTKYDENDKLIREVKVITLKSKLVSDFRKDFQFYKVREINNYHHAHDAYLNAVVGTALIKKYPKLESEFVYGDYKVYDVRKMIAKSEQEIGKATAKYFFYSNIMNFFKTEITLANGEIRKRPLIETNGETGEIVWDKGRDFATVRKVLSMPQVNIVKKTEVQTGGFSKESILPKRNSDKLIARKKDWDPKKYGGFDSPTVAYSVLVVAKVEKGKSKKLKSVKELLGITIMERSSFEKNPIDFLEAKGYKEVKKDLIIKLPKYSLFELENGRKRMLASAGELQKGNELALPSKYVNFLYLASHYEKLKGSPEDNEQKQLFVEQHKHYLDEIIEQISEFSKRVILADANLDKVLSAYNKHRDKPIREQAENIIHLFTLTNLGAPAAFKYFDTTIDRKRYTSTKEVLDATLIHQSITGLYETRIDLSQLGGDGGGGSEAAAKPAPGGTLNIEDEYRLHETSKEPDVPLGSTWLSDFPQAWAETGGMGLAVRQAPLIIPLKATSTPVSIKQYPMSQEARLGIKPHIQRLLDQGILVPCQSPWNTPLLPVKKPGTNDYRPVQDLREVNKRVEDIHPTVPNPYNLLSGLPPSHQWYTVLDLKDAFFCLRLHPTSQPLFAFEWRDPEMGISGQLTWTRLPQGFKNSPTLFNEALHRDLADFRIQHPDLILLQYVDDLLLAATSEQDCQRGTRALLQTLGNLGYRASAKKAQICQKQVKYLGYLLKEGQRWLTEARKETVMGQPTPKTPRQLREFLGKAGFCRLFIPGFAEMAAPLYPLTKPGTLFNWGPDQQKAYQEIKQALLTAPALGLPDLTKPFELFVDEKQGYAKGVLTQKLGPWRRPVAYLSKKLDPVAAGWPPCLRMVAAIAVLTKDAGKLTMGQPLVILAPHAVEALVKQPPDRWLSNARMTHYQAMLLDTDRVQFGPVVALNPATLLPLPEKEAPHDCLEILAETHGTRPDLTDQPIPDADYTWYTDGSSFLQEGQRRAGAAVTTETEVIWARALPAGTSAQRAELIALTQALKMAEGKKLNVYTDSRYAFATAHVHGEIYRRRGWLTSEGREIKNKNEILALLKALFLPKRLSIIHCPGHQKGNSAEARGNRMADQAAREAAMKAVLETSTLLAGKRTADGSEFEKRTADGSEFESPKKKAKVE

SEQ ID NO: 1036 - protein, 2118 aa, synthetic construct
MPAAKRVKLDGGDKKYSIGLDIGTNSVGWAVITDEYKVPSKKFKVLGNTDRHSIKKNLIGALLFDSGETAEATRLKRTARRRYTRRKNRICYLQEIFSNEMAKVDDSFFHRLEESFLVEEDKKHERHPIFGNIVDEVAYHEKYPTIYHLRKKLVDSTDKADLRLIYLALAHMIKFRGHFLIEGDLNPDNSDVDKLFIQLVQTYNQLFEENPINASGVDAKAILSARLSKSRRLENLIAQLPGEKKNGLFGNLIALSLGLTPNFKSNFDLAEDAKLQLSKDTYDDDLDNLLAQIGDQYADLFLAAKNLSDAILLSDILRVNTEITKAPLSASMIKRYDEHHQDLTLLKALVRQQLPEKYKEIFFDQSKNGYAGYIDGGASQEEFYKFIKPILEKMDGTEELLVKLNREDLLRKQRTFDNGSIPHQIHLGELHAILRRQEDFYPFLKDNREKIEKILTFRIPYYVGPLARGNSRFAWMTRKSEETITPWNFEEVVDKGASAQSFIERMTNFDKNLPNEKVLPKHSLLYEYFTVYNELTKVKYVTEGMRKPAFLSGEQKKAIVDLLFKTNRKVTVKQLKEDYFKKIECFDSVEISGVEDRFNASLGTYHDLLKIIKDKDFLDNEENEDILEDIVLTLTLFEDREMIEERLKTYAHLFDDKVMKQLKRRRYTGWGRLSRKLINGIRDKQSGKTILDFLKSDGFANRNFMQLIHDDSLTFKEDIQKAQVSGQGDSLHEHIANLAGSPAIKKGILQTVKVVDELVKVMGRHKPENIVIEMARENQTTQKGQKNSRERMKRIEEGIKELGSQILKEHPVENTQLQNEKLYLYYLQNGRDMYVDQELDINRLSDYDVDHIVPQSFLKDDSIDNKVLTRSDKARGKSDNVPSEEVVKKMKNYWRQLLNAKLITQRKFDNLTKAERGGLSELDKAGFIKRQLVETRQITKHVAQILDSRMNTKYDENDKLIREVKVITLKSKLVSDFRKDFQFYKVREINNYHHAHDAYLNAVVGTALIKKYPKLESEFVYGDYKVYDVRKMIAKSEQEIGKATAKYFFYSNIMNFFKTEITLANGEIRKRPLIETNGETGEIVWDKGRDFATVRKVLSMPQVNIVKKTEVQTGGFSKESILPKRNSDKLIARKKDWDPKKYGGFDSPTVAYSVLVVAKVEKGKSKKLKSVKELLGITIMERSSFEKNPIDFLEAKGYKEVKKDLIIKLPKYSLFELENGRKRMLASAGELQKGNELALPSKYVNFLYLASHYEKLKGSPEDNEQKQLFVEQHKHYLDEIIEQISEFSKRVILADANLDKVLSAYNKHRDKPIREQAENIIHLFTLTNLGAPAAFKYFDTTIDRKRYTSTKEVLDATLIHQSITGLYETRIDLSQLGGDGGSGGSSGGSSGSETPGTSESATPESSGGSSGGSSGGTLNIEDEYRLHETSKEPDVPLGSTWLSDFPQAWAETGGMGLAVRQAPLIIPLKATSTPVSIKQYPMSQEARLGIKPHIQRLLDQGILVPCQSPWNTPLLPVKKPGTNDYRPVQDLREVNKRVEDIHPTVPNPYNLLSGLPPSHQWYTVLDLKDAFFCLRLHPTSQPLFAFEWRDPEMGISGQLTWTRLPQGFKNSPTLFNEALHRDLADFRIQHPDLILLQYVDDLLLAATSEQDCQRGTRALLQTLGNLGYRASAKKAQICQKQVKYLGYLLKEGQRWLTEARKETVMGQPTPKTPRQLREFLGKAGFCRLFIPGFAEMAAPLYPLTKPGTLFNWGPDQQKAYQEIKQALLTAPALGLPDLTKPFELFVDEKQGYAKGVLTQKLGPWRRPVAYLSKKLDPVAAGWPPCLRMVAAIAVLTKDAGKLTMGQPLVILAPHAVEALVKQPPDRWLSNARMTHYQAMLLDTDRVQFGPVVALNPATLLPLPEKEAPHDCLEILAETHGTRPDLTDQPIPDADYTWYTDGSSFLQEGQRRAGAAVTTETEVIWARALPAGTSAQRAELIALTQALKMAEGKKLNVYTDSRYAFATAHVHGEIYRRRGWLTSEGREIKNKNEILALLKALFLPKRLSIIHCPGHQKGNSAEARGNRMADQAAREAAMKAVLETSTLLAGKRTADGSEFEKRTADGSEFESPKKKAKVE

SEQ ID NO: 1037 - protein, 2100 aa, synthetic construct
MPAAKRVKLDGGDKKYSIGLDIGTNSVGWAVITDEYKVPSKKFKVLGNTDRHSIKKNLIGALLFDSGETAEATRLKRTARRRYTRRKNRICYLQEIFSNEMAKVDDSFFHRLEESFLVEEDKKHERHPIFGNIVDEVAYHEKYPTIYHLRKKLVDSTDKADLRLIYLALAHMIKFRGHFLIEGDLNPDNSDVDKLFIQLVQTYNQLFEENPINASGVDAKAILSARLSKSRRLENLIAQLPGEKKNGLFGNLIALSLGLTPNFKSNFDLAEDAKLQLSKDTYDDDLDNLLAQIGDQYADLFLAAKNLSDAILLSDILRVNTEITKAPLSASMIKRYDEHHQDLTLLKALVRQQLPEKYKEIFFDQSKNGYAGYIDGGASQEEFYKFIKPILEKMDGTEELLVKLNREDLLRKQRTFDNGSIPHQIHLGELHAILRRQEDFYPFLKDNREKIEKILTFRIPYYVGPLARGNSRFAWMTRKSEETITPWNFEEVVDKGASAQSFIERMTNFDKNLPNEKVLPKHSLLYEYFTVYNELTKVKYVTEGMRKPAFLSGEQKKAIVDLLFKTNRKVTVKQLKEDYFKKIECFDSVEISGVEDRFNASLGTYHDLLKIIKDKDFLDNEENEDILEDIVLTLTLFEDREMIEERLKTYAHLFDDKVMKQLKRRRYTGWGRLSRKLINGIRDKQSGKTILDFLKSDGFANRNFMQLIHDDSLTFKEDIQKAQVSGQGDSLHEHIANLAGSPAIKKGILQTVKVVDELVKVMGRHKPENIVIEMARENQTTQKGQKNSRERMKRIEEGIKELGSQILKEHPVENTQLQNEKLYLYYLQNGRDMYVDQELDINRLSDYDVDHIVPQSFLKDDSIDNKVLTRSDKARGKSDNVPSEEVVKKMKNYWRQLLNAKLITQRKFDNLTKAERGGLSELDKAGFIKRQLVETRQITKHVAQILDSRMNTKYDENDKLIREVKVITLKSKLVSDFRKDFQFYKVREINNYHHAHDAYLNAVVGTALIKKYPKLESEFVYGDYKVYDVRKMIAKSEQEIGKATAKYFFYSNIMNFFKTEITLANGEIRKRPLIETNGETGEIVWDKGRDFATVRKVLSMPQVNIVKKTEVQTGGFSKESILPKRNSDKLIARKKDWDPKKYGGFDSPTVAYSVLVVAKVEKGKSKKLKSVKELLGITIMERSSFEKNPIDFLEAKGYKEVKKDLIIKLPKYSLFELENGRKRMLASAGELQKGNELALPSKYVNFLYLASHYEKLKGSPEDNEQKQLFVEQHKHYLDEIIEQISEFSKRVILADANLDKVLSAYNKHRDKPIREQAENIIHLFTLTNLGAPAAFKYFDTTIDRKRYTSTKEVLDATLIHQSITGLYETRIDLSQLGGDGGEAAAKGGGGSEAAAKGGTLNIEDEYRLHETSKEPDVPLGSTWLSDFPQAWAETGGMGLAVRQAPLIIPLKATSTPVSIKQYPMSQEARLGIKPHIQRLLDQGILVPCQSPWNTPLLPVKKPGTNDYRPVQDLREVNKRVEDIHPTVPNPYNLLSGLPPSHQWYTVLDLKDAFFCLRLHPTSQPLFAFEWRDPEMGISGQLTWTRLPQGFKNSPTLFNEALHRDLADFRIQHPDLILLQYVDDLLLAATSEQDCQRGTRALLQTLGNLGYRASAKKAQICQKQVKYLGYLLKEGQRWLTEARKETVMGQPTPKTPRQLREFLGKAGFCRLFIPGFAEMAAPLYPLTKPGTLFNWGPDQQKAYQEIKQALLTAPALGLPDLTKPFELFVDEKQGYAKGVLTQKLGPWRRPVAYLSKKLDPVAAGWPPCLRMVAAIAVLTKDAGKLTMGQPLVILAPHAVEALVKQPPDRWLSNARMTHYQAMLLDTDRVQFGPVVALNPATLLPLPEKEAPHDCLEILAETHGTRPDLTDQPIPDADYTWYTDGSSFLQEGQRRAGAAVTTETEVIWARALPAGTSAQRAELIALTQALKMAEGKKLNVYTDSRYAFATAHVHGEIYRRRGWLTSEGREIKNKNEILALLKALFLPKRLSIIHCPGHQKGNSAEARGNRMADQAAREAAMKAVLETSTLLAGKRTADGSEFEKRTADGSEFESPKKKAKVE

SEQ ID NO: 1038 - protein, 2094 aa, synthetic construct
MPAAKRVKLDGGDKKYSIGLDIGTNSVGWAVITDEYKVPSKKFKVLGNTDRHSIKKNLIGALLFDSGETAEATRLKRTARRRYTRRKNRICYLQEIFSNEMAKVDDSFFHRLEESFLVEEDKKHERHPIFGNIVDEVAYHEKYPTIYHLRKKLVDSTDKADLRLIYLALAHMIKFRGHFLIEGDLNPDNSDVDKLFIQLVQTYNQLFEENPINASGVDAKAILSARLSKSRRLENLIAQLPGEKKNGLFGNLIALSLGLTPNFKSNFDLAEDAKLQLSKDTYDDDLDNLLAQIGDQYADLFLAAKNLSDAILLSDILRVNTEITKAPLSASMIKRYDEHHQDLTLLKALVRQQLPEKYKEIFFDQSKNGYAGYIDGGASQEEFYKFIKPILEKMDGTEELLVKLNREDLLRKQRTFDNGSIPHQIHLGELHAILRRQEDFYPFLKDNREKIEKILTFRIPYYVGPLARGNSRFAWMTRKSEETITPWNFEEVVDKGASAQSFIERMTNFDKNLPNEKVLPKHSLLYEYFTVYNELTKVKYVTEGMRKPAFLSGEQKKAIVDLLFKTNRKVTVKQLKEDYFKKIECFDSVEISGVEDRFNASLGTYHDLLKIIKDKDFLDNEENEDILEDIVLTLTLFEDREMIEERLKTYAHLFDDKVMKQLKRRRYTGWGRLSRKLINGIRDKQSGKTILDFLKSDGFANRNFMQLIHDDSLTFKEDIQKAQVSGQGDSLHEHIANLAGSPAIKKGILQTVKVVDELVKVMGRHKPENIVIEMARENQTTQKGQKNSRERMKRIEEGIKELGSQILKEHPVENTQLQNEKLYLYYLQNGRDMYVDQELDINRLSDYDVDHIVPQSFLKDDSIDNKVLTRSDKARGKSDNVPSEEVVKKMKNYWRQLLNAKLITQRKFDNLTKAERGGLSELDKAGFIKRQLVETRQITKHVAQILDSRMNTKYDENDKLIREVKVITLKSKLVSDFRKDFQFYKVREINNYHHAHDAYLNAVVGTALIKKYPKLESEFVYGDYKVYDVRKMIAKSEQEIGKATAKYFFYSNIMNFFKTEITLANGEIRKRPLIETNGETGEIVWDKGRDFATVRKVLSMPQVNIVKKTEVQTGGFSKESILPKRNSDKLIARKKDWDPKKYGGFDSPTVAYSVLVVAKVEKGKSKKLKSVKELLGITIMERSSFEKNPIDFLEAKGYKEVKKDLIIKLPKYSLFELENGRKRMLASAGELQKGNELALPSKYVNFLYLASHYEKLKGSPEDNEQKQLFVEQHKHYLDEIIEQISEFSKRVILADANLDKVLSAYNKHRDKPIREQAENIIHLFTLTNLGAPAAFKYFDTTIDRKRYTSTKEVLDATLIHQSITGLYETRIDLSQLGGDGGGSSPAPGGGGGTLNIEDEYRLHETSKEPDVPLGSTWLSDFPQAWAETGGMGLAVRQAPLIIPLKATSTPVSIKQYPMSQEARLGIKPHIQRLLDQGILVPCQSPWNTPLLPVKKPGTNDYRPVQDLREVNKRVEDIHPTVPNPYNLLSGLPPSHQWYTVLDLKDAFFCLRLHPTSQPLFAFEWRDPEMGISGQLTWTRLPQGFKNSPTLFNEALHRDLADFRIQHPDLILLQYVDDLLLAATSEQDCQRGTRALLQTLGNLGYRASAKKAQICQKQVKYLGYLLKEGQRWLTEARKETVMGQPTPKTPRQLREFLGKAGFCRLFIPGFAEMAAPLYPLTKPGTLFNWGPDQQKAYQEIKQALLTAPALGLPDLTKPFELFVDEKQGYAKGVLTQKLGPWRRPVAYLSKKLDPVAAGWPPCLRMVAAIAVLTKDAGKLTMGQPLVILAPHAVEALVKQPPDRWLSNARMTHYQAMLLDTDRVQFGPVVALNPATLLPLPEKEAPHDCLEILAETHGTRPDLTDQPIPDADYTWYTDGSSFLQEGQRRAGAAVTTETEVIWARALPAGTSAQRAELIALTQALKMAEGKKLNVYTDSRYAFATAHVHGEIYRRRGWLTSEGREIKNKNEILALLKALFLPKRLSIIHCPGHQKGNSAEARGNRMADQAAREAAMKAVLETSTLLAGKRTADGSEFEKRTADGSEFESPKKKAKVE

SEQ ID NO: 1039 - protein, 2096 aa, synthetic construct
MPAAKRVKLDGGDKKYSIGLDIGTNSVGWAVITDEYKVPSKKFKVLGNTDRHSIKKNLIGALLFDSGETAEATRLKRTARRRYTRRKNRICYLQEIFSNEMAKVDDSFFHRLEESFLVEEDKKHERHPIFGNIVDEVAYHEKYPTIYHLRKKLVDSTDKADLRLIYLALAHMIKFRGHFLIEGDLNPDNSDVDKLFIQLVQTYNQLFEENPINASGVDAKAILSARLSKSRRLENLIAQLPGEKKNGLFGNLIALSLGLTPNFKSNFDLAEDAKLQLSKDTYDDDLDNLLAQIGDQYADLFLAAKNLSDAILLSDILRVNTEITKAPLSASMIKRYDEHHQDLTLLKALVRQQLPEKYKEIFFDQSKNGYAGYIDGGASQEEFYKFIKPILEKMDGTEELLVKLNREDLLRKQRTFDNGSIPHQIHLGELHAILRRQEDFYPFLKDNREKIEKILTFRIPYYVGPLARGNSRFAWMTRKSEETITPWNFEEVVDKGASAQSFIERMTNFDKNLPNEKVLPKHSLLYEYFTVYNELTKVKYVTEGMRKPAFLSGEQKKAIVDLLFKTNRKVTVKQLKEDYFKKIECFDSVEISGVEDRFNASLGTYHDLLKIIKDKDFLDNEENEDILEDIVLTLTLFEDREMIEERLKTYAHLFDDKVMKQLKRRRYTGWGRLSRKLINGIRDKQSGKTILDFLKSDGFANRNFMQLIHDDSLTFKEDIQKAQVSGQGDSLHEHIANLAGSPAIKKGILQTVKVVDELVKVMGRHKPENIVIEMARENQTTQKGQKNSRERMKRIEEGIKELGSQILKEHPVENTQLQNEKLYLYYLQNGRDMYVDQELDINRLSDYDVDHIVPQSFLKDDSIDNKVLTRSDKARGKSDNVPSEEVVKKMKNYWRQLLNAKLITQRKFDNLTKAERGGLSELDKAGFIKRQLVETRQITKHVAQILDSRMNTKYDENDKLIREVKVITLKSKLVSDFRKDFQFYKVREINNYHHAHDAYLNAVVGTALIKKYPKLESEFVYGDYKVYDVRKMIAKSEQEIGKATAKYFFYSNIMNFFKTEITLANGEIRKRPLIETNGETGEIVWDKGRDFATVRKVLSMPQVNIVKKTEVQTGGFSKESILPKRNSDKLIARKKDWDPKKYGGFDSPTVAYSVLVVAKVEKGKSKKLKSVKELLGITIMERSSFEKNPIDFLEAKGYKEVKKDLIIKLPKYSLFELENGRKRMLASAGELQKGNELALPSKYVNFLYLASHYEKLKGSPEDNEQKQLFVEQHKHYLDEIIEQISEFSKRVILADANLDKVLSAYNKHRDKPIREQAENIIHLFTLTNLGAPAAFKYFDTTIDRKRYTSTKEVLDATLIHQSITGLYETRIDLSQLGGDGGEAAAKGSSPAPGGTLNIEDEYRLHETSKEPDVPLGSTWLSDFPQAWAETGGMGLAVRQAPLIIPLKATSTPVSIKQYPMSQEARLGIKPHIQRLLDQGILVPCQSPWNTPLLPVKKPGTNDYRPVQDLREVNKRVEDIHPTVPNPYNLLSGLPPSHQWYTVLDLKDAFFCLRLHPTSQPLFAFEWRDPEMGISGQLTWTRLPQGFKNSPTLFNEALHRDLADFRIQHPDLILLQYVDDLLLAATSEQDCQRGTRALLQTLGNLGYRASAKKAQICQKQVKYLGYLLKEGQRWLTEARKETVMGQPTPKTPRQLREFLGKAGFCRLFIPGFAEMAAPLYPLTKPGTLFNWGPDQQKAYQEIKQALLTAPALGLPDLTKPFELFVDEKQGYAKGVLTQKLGPWRRPVAYLSKKLDPVAAGWPPCLRMVAAIAVLTKDAGKLTMGQPLVILAPHAVEALVKQPPDRWLSNARMTHYQAMLLDTDRVQFGPVVALNPATLLPLPEKEAPHDCLEILAETHGTRPDLTDQPIPDADYTWYTDGSSFLQEGQRRAGAAVTTETEVIWARALPAGTSAQRAELIALTQALKMAEGKKLNVYTDSRYAFATAHVHGEIYRRRGWLTSEGREIKNKNEILALLKALFLPKRLSIIHCPGHQKGNSAEARGNRMADQAAREAAMKAVLETSTLLAGKRTADGSEFEKRTADGSEFESPKKKAKVE

SEQ ID NO: 1040 - protein, 2091 aa, synthetic construct
MPAAKRVKLDGGDKKYSIGLDIGTNSVGWAVITDEYKVPSKKFKVLGNTDRHSIKKNLIGALLFDSGETAEATRLKRTARRRYTRRKNRICYLQEIFSNEMAKVDDSFFHRLEESFLVEEDKKHERHPIFGNIVDEVAYHEKYPTIYHLRKKLVDSTDKADLRLIYLALAHMIKFRGHFLIEGDLNPDNSDVDKLFIQLVQTYNQLFEENPINASGVDAKAILSARLSKSRRLENLIAQLPGEKKNGLFGNLIALSLGLTPNFKSNFDLAEDAKLQLSKDTYDDDLDNLLAQIGDQYADLFLAAKNLSDAILLSDILRVNTEITKAPLSASMIKRYDEHHQDLTLLKALVRQQLPEKYKEIFFDQSKNGYAGYIDGGASQEEFYKFIKPILEKMDGTEELLVKLNREDLLRKQRTFDNGSIPHQIHLGELHAILRRQEDFYPFLKDNREKIEKILTFRIPYYVGPLARGNSRFAWMTRKSEETITPWNFEEVVDKGASAQSFIERMTNFDKNLPNEKVLPKHSLLYEYFTVYNELTKVKYVTEGMRKPAFLSGEQKKAIVDLLFKTNRKVTVKQLKEDYFKKIECFDSVEISGVEDRFNASLGTYHDLLKIIKDKDFLDNEENEDILEDIVLTLTLFEDREMIEERLKTYAHLFDDKVMKQLKRRRYTGWGRLSRKLINGIRDKQSGKTILDFLKSDGFANRNFMQLIHDDSLTFKEDIQKAQVSGQGDSLHEHIANLAGSPAIKKGILQTVKVVDELVKVMGRHKPENIVIEMARENQTTQKGQKNSRERMKRIEEGIKELGSQILKEHPVENTQLQNEKLYLYYLQNGRDMYVDQELDINRLSDYDVDHIVPQSFLKDDSIDNKVLTRSDKARGKSDNVPSEEVVKKMKNYWRQLLNAKLITQRKFDNLTKAERGGLSELDKAGFIKRQLVETRQITKHVAQILDSRMNTKYDENDKLIREVKVITLKSKLVSDFRKDFQFYKVREINNYHHAHDAYLNAVVGTALIKKYPKLESEFVYGDYKVYDVRKMIAKSEQEIGKATAKYFFYSNIMNFFKTEITLANGEIRKRPLIETNGETGEIVWDKGRDFATVRKVLSMPQVNIVKKTEVQTGGFSKESILPKRNSDKLIARKKDWDPKKYGGFDSPTVAYSVLVVAKVEKGKSKKLKSVKELLGITIMERSSFEKNPIDFLEAKGYKEVKKDLIIKLPKYSLFELENGRKRMLASAGELQKGNELALPSKYVNFLYLASHYEKLKGSPEDNEQKQLFVEQHKHYLDEIIEQISEFSKRVILADANLDKVLSAYNKHRDKPIREQAENIIHLFTLTNLGAPAAFKYFDTTIDRKRYTSTKEVLDATLIHQSITGLYETRIDLSQLGGDGGGGSGGSGGTLNIEDEYRLHETSKEPDVPLGSTWLSDFPQAWAETGGMGLAVRQAPLIIPLKATSTPVSIKQYPMSQEARLGIKPHIQRLLDQGILVPCQSPWNTPLLPVKKPGTNDYRPVQDLREVNKRVEDIHPTVPNPYNLLSGLPPSHQWYTVLDLKDAFFCLRLHPTSQPLFAFEWRDPEMGISGQLTWTRLPQGFKNSPTLFNEALHRDLADFRIQHPDLILLQYVDDLLLAATSEQDCQRGTRALLQTLGNLGYRASAKKAQICQKQVKYLGYLLKEGQRWLTEARKETVMGQPTPKTPRQLREFLGKAGFCRLFIPGFAEMAAPLYPLTKPGTLFNWGPDQQKAYQEIKQALLTAPALGLPDLTKPFELFVDEKQGYAKGVLTQKLGPWRRPVAYLSKKLDPVAAGWPPCLRMVAAIAVLTKDAGKLTMGQPLVILAPHAVEALVKQPPDRWLSNARMTHYQAMLLDTDRVQFGPVVALNPATLLPLPEKEAPHDCLEILAETHGTRPDLTDQPIPDADYTWYTDGSSFLQEGQRRAGAAVTTETEVIWARALPAGTSAQRAELIALTQALKMAEGKKLNVYTDSRYAFATAHVHGEIYRRRGWLTSEGREIKNKNEILALLKALFLPKRLSIIHCPGHQKGNSAEARGNRMADQAAREAAMKAVLETSTLLAGKRTADGSEFEKRTADGSEFESPKKKAKVE

SEQ ID NO: 1041 - protein, 2096 aa, synthetic construct
MPAAKRVKLDGGDKKYSIGLDIGTNSVGWAVITDEYKVPSKKFKVLGNTDRHSIKKNLIGALLFDSGETAEATRLKRTARRRYTRRKNRICYLQEIFSNEMAKVDDSFFHRLEESFLVEEDKKHERHPIFGNIVDEVAYHEKYPTIYHLRKKLVDSTDKADLRLIYLALAHMIKFRGHFLIEGDLNPDNSDVDKLFIQLVQTYNQLFEENPINASGVDAKAILSARLSKSRRLENLIAQLPGEKKNGLFGNLIALSLGLTPNFKSNFDLAEDAKLQLSKDTYDDDLDNLLAQIGDQYADLFLAAKNLSDAILLSDILRVNTEITKAPLSASMIKRYDEHHQDLTLLKALVRQQLPEKYKEIFFDQSKNGYAGYIDGGASQEEFYKFIKPILEKMDGTEELLVKLNREDLLRKQRTFDNGSIPHQIHLGELHAILRRQEDFYPFLKDNREKIEKILTFRIPYYVGPLARGNSRFAWMTRKSEETITPWNFEEVVDKGASAQSFIERMTNFDKNLPNEKVLPKHSLLYEYFTVYNELTKVKYVTEGMRKPAFLSGEQKKAIVDLLFKTNRKVTVKQLKEDYFKKIECFDSVEISGVEDRFNASLGTYHDLLKIIKDKDFLDNEENEDILEDIVLTLTLFEDREMIEERLKTYAHLFDDKVMKQLKRRRYTGWGRLSRKLINGIRDKQSGKTILDFLKSDGFANRNFMQLIHDDSLTFKEDIQKAQVSGQGDSLHEHIANLAGSPAIKKGILQTVKVVDELVKVMGRHKPENIVIEMARENQTTQKGQKNSRERMKRIEEGIKELGSQILKEHPVENTQLQNEKLYLYYLQNGRDMYVDQELDINRLSDYDVDHIVPQSFLKDDSIDNKVLTRSDKARGKSDNVPSEEVVKKMKNYWRQLLNAKLITQRKFDNLTKAERGGLSELDKAGFIKRQLVETRQITKHVAQILDSRMNTKYDENDKLIREVKVITLKSKLVSDFRKDFQFYKVREINNYHHAHDAYLNAVVGTALIKKYPKLESEFVYGDYKVYDVRKMIAKSEQEIGKATAKYFFYSNIMNFFKTEITLANGEIRKRPLIETNGETGEIVWDKGRDFATVRKVLSMPQVNIVKKTEVQTGGFSKESILPKRNSDKLIARKKDWDPKKYGGFDSPTVAYSVLVVAKVEKGKSKKLKSVKELLGITIMERSSFEKNPIDFLEAKGYKEVKKDLIIKLPKYSLFELENGRKRMLASAGELQKGNELALPSKYVNFLYLASHYEKLKGSPEDNEQKQLFVEQHKHYLDEIIEQISEFSKRVILADANLDKVLSAYNKHRDKPIREQAENIIHLFTLTNLGAPAAFKYFDTTIDRKRYTSTKEVLDATLIHQSITGLYETRIDLSQLGGDGGEAAAKGGSPAPGGTLNIEDEYRLHETSKEPDVPLGSTWLSDFPQAWAETGGMGLAVRQAPLIIPLKATSTPVSIKQYPMSQEARLGIKPHIQRLLDQGILVPCQSPWNTPLLPVKKPGTNDYRPVQDLREVNKRVEDIHPTVPNPYNLLSGLPPSHQWYTVLDLKDAFFCLRLHPTSQPLFAFEWRDPEMGISGQLTWTRLPQGFKNSPTLFNEALHRDLADFRIQHPDLILLQYVDDLLLAATSEQDCQRGTRALLQTLGNLGYRASAKKAQICQKQVKYLGYLLKEGQRWLTEARKETVMGQPTPKTPRQLREFLGKAGFCRLFIPGFAEMAAPLYPLTKPGTLFNWGPDQQKAYQEIKQALLTAPALGLPDLTKPFELFVDEKQGYAKGVLTQKLGPWRRPVAYLSKKLDPVAAGWPPCLRMVAAIAVLTKDAGKLTMGQPLVILAPHAVEALVKQPPDRWLSNARMTHYQAMLLDTDRVQFGPVVALNPATLLPLPEKEAPHDCLEILAETHGTRPDLTDQPIPDADYTWYTDGSSFLQEGQRRAGAAVTTETEVIWARALPAGTSAQRAELIALTQALKMAEGKKLNVYTDSRYAFATAHVHGEIYRRRGWLTSEGREIKNKNEILALLKALFLPKRLSIIHCPGHQKGNSAEARGNRMADQAAREAAMKAVLETSTLLAGKRTADGSEFEKRTADGSEFESPKKKAKVE

SEQ ID NO: 1042 - protein, 2100 aa, synthetic construct
MPAAKRVKLDGGDKKYSIGLDIGTNSVGWAVITDEYKVPSKKFKVLGNTDRHSIKKNLIGALLFDSGETAEATRLKRTARRRYTRRKNRICYLQEIFSNEMAKVDDSFFHRLEESFLVEEDKKHERHPIFGNIVDEVAYHEKYPTIYHLRKKLVDSTDKADLRLIYLALAHMIKFRGHFLIEGDLNPDNSDVDKLFIQLVQTYNQLFEENPINASGVDAKAILSARLSKSRRLENLIAQLPGEKKNGLFGNLIALSLGLTPNFKSNFDLAEDAKLQLSKDTYDDDLDNLLAQIGDQYADLFLAAKNLSDAILLSDILRVNTEITKAPLSASMIKRYDEHHQDLTLLKALVRQQLPEKYKEIFFDQSKNGYAGYIDGGASQEEFYKFIKPILEKMDGTEELLVKLNREDLLRKQRTFDNGSIPHQIHLGELHAILRRQEDFYPFLKDNREKIEKILTFRIPYYVGPLARGNSRFAWMTRKSEETITPWNFEEVVDKGASAQSFIERMTNFDKNLPNEKVLPKHSLLYEYFTVYNELTKVKYVTEGMRKPAFLSGEQKKAIVDLLFKTNRKVTVKQLKEDYFKKIECFDSVEISGVEDRFNASLGTYHDLLKIIKDKDFLDNEENEDILEDIVLTLTLFEDREMIEERLKTYAHLFDDKVMKQLKRRRYTGWGRLSRKLINGIRDKQSGKTILDFLKSDGFANRNFMQLIHDDSLTFKEDIQKAQVSGQGDSLHEHIANLAGSPAIKKGILQTVKVVDELVKVMGRHKPENIVIEMARENQTTQKGQKNSRERMKRIEEGIKELGSQILKEHPVENTQLQNEKLYLYYLQNGRDMYVDQELDINRLSDYDVDHIVPQSFLKDDSIDNKVLTRSDKARGKSDNVPSEEVVKKMKNYWRQLLNAKLITQRKFDNLTKAERGGLSELDKAGFIKRQLVETRQITKHVAQILDSRMNTKYDENDKLIREVKVITLKSKLVSDFRKDFQFYKVREINNYHHAHDAYLNAVVGTALIKKYPKLESEFVYGDYKVYDVRKMIAKSEQEIGKATAKYFFYSNIMNFFKTEITLANGEIRKRPLIETNGETGEIVWDKGRDFATVRKVLSMPQVNIVKKTEVQTGGFSKESILPKRNSDKLIARKKDWDPKKYGGFDSPTVAYSVLVVAKVEKGKSKKLKSVKELLGITIMERSSFEKNPIDFLEAKGYKEVKKDLIIKLPKYSLFELENGRKRMLASAGELQKGNELALPSKYVNFLYLASHYEKLKGSPEDNEQKQLFVEQHKHYLDEIIEQISEFSKRVILADANLDKVLSAYNKHRDKPIREQAENIIHLFTLTNLGAPAAFKYFDTTIDRKRYTSTKEVLDATLIHQSITGLYETRIDLSQLGGDGGGGGGSGGGGSGGGGSGGTLNIEDEYRLHETSKEPDVPLGSTWLSDFPQAWAETGGMGLAVRQAPLIIPLKATSTPVSIKQYPMSQEARLGIKPHIQRLLDQGILVPCQSPWNTPLLPVKKPGTNDYRPVQDLREVNKRVEDIHPTVPNPYNLLSGLPPSHQWYTVLDLKDAFFCLRLHPTSQPLFAFEWRDPEMGISGQLTWTRLPQGFKNSPTLFNEALHRDLADFRIQHPDLILLQYVDDLLLAATSEQDCQRGTRALLQTLGNLGYRASAKKAQICQKQVKYLGYLLKEGQRWLTEARKETVMGQPTPKTPRQLREFLGKAGFCRLFIPGFAEMAAPLYPLTKPGTLFNWGPDQQKAYQEIKQALLTAPALGLPDLTKPFELFVDEKQGYAKGVLTQKLGPWRRPVAYLSKKLDPVAAGWPPCLRMVAAIAVLTKDAGKLTMGQPLVILAPHAVEALVKQPPDRWLSNARMTHYQAMLLDTDRVQFGPVVALNPATLLPLPEKEAPHDCLEILAETHGTRPDLTDQPIPDADYTWYTDGSSFLQEGQRRAGAAVTTETEVIWARALPAGTSAQRAELIALTQALKMAEGKKLNVYTDSRYAFATAHVHGEIYRRRGWLTSEGREIKNKNEILALLKALFLPKRLSIIHCPGHQKGNSAEARGNRMADQAAREAAMKAVLETSTLLAGKRTADGSEFEKRTADGSEFESPKKKAKVE

SEQ ID NO: 1043 - protein, 2094 aa, synthetic construct
MPAAKRVKLDGGDKKYSIGLDIGTNSVGWAVITDEYKVPSKKFKVLGNTDRHSIKKNLIGALLFDSGETAEATRLKRTARRRYTRRKNRICYLQEIFSNEMAKVDDSFFHRLEESFLVEEDKKHERHPIFGNIVDEVAYHEKYPTIYHLRKKLVDSTDKADLRLIYLALAHMIKFRGHFLIEGDLNPDNSDVDKLFIQLVQTYNQLFEENPINASGVDAKAILSARLSKSRRLENLIAQLPGEKKNGLFGNLIALSLGLTPNFKSNFDLAEDAKLQLSKDTYDDDLDNLLAQIGDQYADLFLAAKNLSDAILLSDILRVNTEITKAPLSASMIKRYDEHHQDLTLLKALVRQQLPEKYKEIFFDQSKNGYAGYIDGGASQEEFYKFIKPILEKMDGTEELLVKLNREDLLRKQRTFDNGSIPHQIHLGELHAILRRQEDFYPFLKDNREKIEKILTFRIPYYVGPLARGNSRFAWMTRKSEETITPWNFEEVVDKGASAQSFIERMTNFDKNLPNEKVLPKHSLLYEYFTVYNELTKVKYVTEGMRKPAFLSGEQKKAIVDLLFKTNRKVTVKQLKEDYFKKIECFDSVEISGVEDRFNASLGTYHDLLKIIKDKDFLDNEENEDILEDIVLTLTLFEDREMIEERLKTYAHLFDDKVMKQLKRRRYTGWGRLSRKLINGIRDKQSGKTILDFLKSDGFANRNFMQLIHDDSLTFKEDIQKAQVSGQGDSLHEHIANLAGSPAIKKGILQTVKVVDELVKVMGRHKPENIVIEMARENQTTQKGQKNSRERMKRIEEGIKELGSQILKEHPVENTQLQNEKLYLYYLQNGRDMYVDQELDINRLSDYDVDHIVPQSFLKDDSIDNKVLTRSDKARGKSDNVPSEEVVKKMKNYWRQLLNAKLITQRKFDNLTKAERGGLSELDKAGFIKRQLVETRQITKHVAQILDSRMNTKYDENDKLIREVKVITLKSKLVSDFRKDFQFYKVREINNYHHAHDAYLNAVVGTALIKKYPKLESEFVYGDYKVYDVRKMIAKSEQEIGKATAKYFFYSNIMNFFKTEITLANGEIRKRPLIETNGETGEIVWDKGRDFATVRKVLSMPQVNIVKKTEVQTGGFSKESILPKRNSDKLIARKKDWDPKKYGGFDSPTVAYSVLVVAKVEKGKSKKLKSVKELLGITIMERSSFEKNPIDFLEAKGYKEVKKDLIIKLPKYSLFELENGRKRMLASAGELQKGNELALPSKYVNFLYLASHYEKLKGSPEDNEQKQLFVEQHKHYLDEIIEQISEFSKRVILADANLDKVLSAYNKHRDKPIREQAENIIHLFTLTNLGAPAAFKYFDTTIDRKRYTSTKEVLDATLIHQSITGLYETRIDLSQLGGDGGPAPGSSGGSGGTLNIEDEYRLHETSKEPDVPLGSTWLSDFPQAWAETGGMGLAVRQAPLIIPLKATSTPVSIKQYPMSQEARLGIKPHIQRLLDQGILVPCQSPWNTPLLPVKKPGTNDYRPVQDLREVNKRVEDIHPTVPNPYNLLSGLPPSHQWYTVLDLKDAFFCLRLHPTSQPLFAFEWRDPEMGISGQLTWTRLPQGFKNSPTLFNEALHRDLADFRIQHPDLILLQYVDDLLLAATSEQDCQRGTRALLQTLGNLGYRASAKKAQICQKQVKYLGYLLKEGQRWLTEARKETVMGQPTPKTPRQLREFLGKAGFCRLFIPGFAEMAAPLYPLTKPGTLFNWGPDQQKAYQEIKQALLTAPALGLPDLTKPFELFVDEKQGYAKGVLTQKLGPWRRPVAYLSKKLDPVAAGWPPCLRMVAAIAVLTKDAGKLTMGQPLVILAPHAVEALVKQPPDRWLSNARMTHYQAMLLDTDRVQFGPVVALNPATLLPLPEKEAPHDCLEILAETHGTRPDLTDQPIPDADYTWYTDGSSFLQEGQRRAGAAVTTETEVIWARALPAGTSAQRAELIALTQALKMAEGKKLNVYTDSRYAFATAHVHGEIYRRRGWLTSEGREIKNKNEILALLKALFLPKRLSIIHCPGHQKGNSAEARGNRMADQAAREAAMKAVLETSTLLAGKRTADGSEFEKRTADGSEFESPKKKAKVE

SEQ ID NO: 1044 - protein, 2093 aa, synthetic construct
MPAAKRVKLDGGDKKYSIGLDIGTNSVGWAVITDEYKVPSKKFKVLGNTDRHSIKKNLIGALLFDSGETAEATRLKRTARRRYTRRKNRICYLQEIFSNEMAKVDDSFFHRLEESFLVEEDKKHERHPIFGNIVDEVAYHEKYPTIYHLRKKLVDSTDKADLRLIYLALAHMIKFRGHFLIEGDLNPDNSDVDKLFIQLVQTYNQLFEENPINASGVDAKAILSARLSKSRRLENLIAQLPGEKKNGLFGNLIALSLGLTPNFKSNFDLAEDAKLQLSKDTYDDDLDNLLAQIGDQYADLFLAAKNLSDAILLSDILRVNTEITKAPLSASMIKRYDEHHQDLTLLKALVRQQLPEKYKEIFFDQSKNGYAGYIDGGASQEEFYKFIKPILEKMDGTEELLVKLNREDLLRKQRTFDNGSIPHQIHLGELHAILRRQEDFYPFLKDNREKIEKILTFRIPYYVGPLARGNSRFAWMTRKSEETITPWNFEEVVDKGASAQSFIERMTNFDKNLPNEKVLPKHSLLYEYFTVYNELTKVKYVTEGMRKPAFLSGEQKKAIVDLLFKTNRKVTVKQLKEDYFKKIECFDSVEISGVEDRFNASLGTYHDLLKIIKDKDFLDNEENEDILEDIVLTLTLFEDREMIEERLKTYAHLFDDKVMKQLKRRRYTGWGRLSRKLINGIRDKQSGKTILDFLKSDGFANRNFMQLIHDDSLTFKEDIQKAQVSGQGDSLHEHIANLAGSPAIKKGILQTVKVVDELVKVMGRHKPENIVIEMARENQTTQKGQKNSRERMKRIEEGIKELGSQILKEHPVENTQLQNEKLYLYYLQNGRDMYVDQELDINRLSDYDVDHIVPQSFLKDDSIDNKVLTRSDKARGKSDNVPSEEVVKKMKNYWRQLLNAKLITQRKFDNLTKAERGGLSELDKAGFIKRQLVETRQITKHVAQILDSRMNTKYDENDKLIREVKVITLKSKLVSDFRKDFQFYKVREINNYHHAHDAYLNAVVGTALIKKYPKLESEFVYGDYKVYDVRKMIAKSEQEIGKATAKYFFYSNIMNFFKTEITLANGEIRKRPLIETNGETGEIVWDKGRDFATVRKVLSMPQVNIVKKTEVQTGGFSKESILPKRNSDKLIARKKDWDPKKYGGFDSPTVAYSVLVVAKVEKGKSKKLKSVKELLGITIMERSSFEKNPIDFLEAKGYKEVKKDLIIKLPKYSLFELENGRKRMLASAGELQKGNELALPSKYVNFLYLASHYEKLKGSPEDNEQKQLFVEQHKHYLDEIIEQISEFSKRVILADANLDKVLSAYNKHRDKPIREQAENIIHLFTLTNLGAPAAFKYFDTTIDRKRYTSTKEVLDATLIHQSITGLYETRIDLSQLGGDGGGGGEAAAKGGTLNIEDEYRLHETSKEPDVPLGSTWLSDFPQAWAETGGMGLAVRQAPLIIPLKATSTPVSIKQYPMSQEARLGIKPHIQRLLDQGILVPCQSPWNTPLLPVKKPGTNDYRPVQDLREVNKRVEDIHPTVPNPYNLLSGLPPSHQWYTVLDLKDAFFCLRLHPTSQPLFAFEWRDPEMGISGQLTWTRLPQGFKNSPTLFNEALHRDLADFRIQHPDLILLQYVDDLLLAATSEQDCQRGTRALLQTLGNLGYRASAKKAQICQKQVKYLGYLLKEGQRWLTEARKETVMGQPTPKTPRQLREFLGKAGFCRLFIPGFAEMAAPLYPLTKPGTLFNWGPDQQKAYQEIKQALLTAPALGLPDLTKPFELFVDEKQGYAKGVLTQKLGPWRRPVAYLSKKLDPVAAGWPPCLRMVAAIAVLTKDAGKLTMGQPLVILAPHAVEALVKQPPDRWLSNARMTHYQAMLLDTDRVQFGPVVALNPATLLPLPEKEAPHDCLEILAETHGTRPDLTDQPIPDADYTWYTDGSSFLQEGQRRAGAAVTTETEVIWARALPAGTSAQRAELIALTQALKMAEGKKLNVYTDSRYAFATAHVHGEIYRRRGWLTSEGREIKNKNEILALLKALFLPKRLSIIHCPGHQKGNSAEARGNRMADQAAREAAMKAVLETSTLLAGKRTADGSEFEKRTADGSEFESPKKKAKVE

SEQ ID NO: 1045 - protein, 2100 aa, synthetic construct
MPAAKRVKLDGGDKKYSIGLDIGTNSVGWAVITDEYKVPSKKFKVLGNTDRHSIKKNLIGALLFDSGETAEATRLKRTARRRYTRRKNRICYLQEIFSNEMAKVDDSFFHRLEESFLVEEDKKHERHPIFGNIVDEVAYHEKYPTIYHLRKKLVDSTDKADLRLIYLALAHMIKFRGHFLIEGDLNPDNSDVDKLFIQLVQTYNQLFEENPINASGVDAKAILSARLSKSRRLENLIAQLPGEKKNGLFGNLIALSLGLTPNFKSNFDLAEDAKLQLSKDTYDDDLDNLLAQIGDQYADLFLAAKNLSDAILLSDILRVNTEITKAPLSASMIKRYDEHHQDLTLLKALVRQQLPEKYKEIFFDQSKNGYAGYIDGGASQEEFYKFIKPILEKMDGTEELLVKLNREDLLRKQRTFDNGSIPHQIHLGELHAILRRQEDFYPFLKDNREKIEKILTFRIPYYVGPLARGNSRFAWMTRKSEETITPWNFEEVVDKGASAQSFIERMTNFDKNLPNEKVLPKHSLLYEYFTVYNELTKVKYVTEGMRKPAFLSGEQKKAIVDLLFKTNRKVTVKQLKEDYFKKIECFDSVEISGVEDRFNASLGTYHDLLKIIKDKDFLDNEENEDILEDIVLTLTLFEDREMIEERLKTYAHLFDDKVMKQLKRRRYTGWGRLSRKLINGIRDKQSGKTILDFLKSDGFANRNFMQLIHDDSLTFKEDIQKAQVSGQGDSLHEHIANLAGSPAIKKGILQTVKVVDELVKVMGRHKPENIVIEMARENQTTQKGQKNSRERMKRIEEGIKELGSQILKEHPVENTQLQNEKLYLYYLQNGRDMYVDQELDINRLSDYDVDHIVPQSFLKDDSIDNKVLTRSDKARGKSDNVPSEEVVKKMKNYWRQLLNAKLITQRKFDNLTKAERGGLSELDKAGFIKRQLVETRQITKHVAQILDSRMNTKYDENDKLIREVKVITLKSKLVSDFRKDFQFYKVREINNYHHAHDAYLNAVVGTALIKKYPKLESEFVYGDYKVYDVRKMIAKSEQEIGKATAKYFFYSNIMNFFKTEITLANGEIRKRPLIETNGETGEIVWDKGRDFATVRKVLSMPQVNIVKKTEVQTGGFSKESILPKRNSDKLIARKKDWDPKKYGGFDSPTVAYSVLVVAKVEKGKSKKLKSVKELLGITIMERSSFEKNPIDFLEAKGYKEVKKDLIIKLPKYSLFELENGRKRMLASAGELQKGNELALPSKYVNFLYLASHYEKLKGSPEDNEQKQLFVEQHKHYLDEIIEQISEFSKRVILADANLDKVLSAYNKHRDKPIREQAENIIHLFTLTNLGAPAAFKYFDTTIDRKRYTSTKEVLDATLIHQSITGLYETRIDLSQLGGDGGGSSGSSGSSGSSGSSGGTLNIEDEYRLHETSKEPDVPLGSTWLSDFPQAWAETGGMGLAVRQAPLIIPLKATSTPVSIKQYPMSQEARLGIKPHIQRLLDQGILVPCQSPWNTPLLPVKKPGTNDYRPVQDLREVNKRVEDIHPTVPNPYNLLSGLPPSHQWYTVLDLKDAFFCLRLHPTSQPLFAFEWRDPEMGISGQLTWTRLPQGFKNSPTLFNEALHRDLADFRIQHPDLILLQYVDDLLLAATSEQDCQRGTRALLQTLGNLGYRASAKKAQICQKQVKYLGYLLKEGQRWLTEARKETVMGQPTPKTPRQLREFLGKAGFCRLFIPGFAEMAAPLYPLTKPGTLFNWGPDQQKAYQEIKQALLTAPALGLPDLTKPFELFVDEKQGYAKGVLTQKLGPWRRPVAYLSKKLDPVAAGWPPCLRMVAAIAVLTKDAGKLTMGQPLVILAPHAVEALVKQPPDRWLSNARMTHYQAMLLDTDRVQFGPVVALNPATLLPLPEKEAPHDCLEILAETHGTRPDLTDQPIPDADYTWYTDGSSFLQEGQRRAGAAVTTETEVIWARALPAGTSAQRAELIALTQALKMAEGKKLNVYTDSRYAFATAHVHGEIYRRRGWLTSEGREIKNKNEILALLKALFLPKRLSIIHCPGHQKGNSAEARGNRMADQAAREAAMKAVLETSTLLAGKRTADGSEFEKRTADGSEFESPKKKAKVE

SEQ ID NO: 1046 - protein, 2096 aa, synthetic construct
MPAAKRVKLDGGDKKYSIGLDIGTNSVGWAVITDEYKVPSKKFKVLGNTDRHSIKKNLIGALLFDSGETAEATRLKRTARRRYTRRKNRICYLQEIFSNEMAKVDDSFFHRLEESFLVEEDKKHERHPIFGNIVDEVAYHEKYPTIYHLRKKLVDSTDKADLRLIYLALAHMIKFRGHFLIEGDLNPDNSDVDKLFIQLVQTYNQLFEENPINASGVDAKAILSARLSKSRRLENLIAQLPGEKKNGLFGNLIALSLGLTPNFKSNFDLAEDAKLQLSKDTYDDDLDNLLAQIGDQYADLFLAAKNLSDAILLSDILRVNTEITKAPLSASMIKRYDEHHQDLTLLKALVRQQLPEKYKEIFFDQSKNGYAGYIDGGASQEEFYKFIKPILEKMDGTEELLVKLNREDLLRKQRTFDNGSIPHQIHLGELHAILRRQEDFYPFLKDNREKIEKILTFRIPYYVGPLARGNSRFAWMTRKSEETITPWNFEEVVDKGASAQSFIERMTNFDKNLPNEKVLPKHSLLYEYFTVYNELTKVKYVTEGMRKPAFLSGEQKKAIVDLLFKTNRKVTVKQLKEDYFKKIECFDSVEISGVEDRFNASLGTYHDLLKIIKDKDFLDNEENEDILEDIVLTLTLFEDREMIEERLKTYAHLFDDKVMKQLKRRRYTGWGRLSRKLINGIRDKQSGKTILDFLKSDGFANRNFMQLIHDDSLTFKEDIQKAQVSGQGDSLHEHIANLAGSPAIKKGILQTVKVVDELVKVMGRHKPENIVIEMARENQTTQKGQKNSRERMKRIEEGIKELGSQILKEHPVENTQLQNEKLYLYYLQNGRDMYVDQELDINRLSDYDVDHIVPQSFLKDDSIDNKVLTRSDKARGKSDNVPSEEVVKKMKNYWRQLLNAKLITQRKFDNLTKAERGGLSELDKAGFIKRQLVETRQITKHVAQILDSRMNTKYDENDKLIREVKVITLKSKLVSDFRKDFQFYKVREINNYHHAHDAYLNAVVGTALIKKYPKLESEFVYGDYKVYDVRKMIAKSEQEIGKATAKYFFYSNIMNFFKTEITLANGEIRKRPLIETNGETGEIVWDKGRDFATVRKVLSMPQVNIVKKTEVQTGGFSKESILPKRNSDKLIARKKDWDPKKYGGFDSPTVAYSVLVVAKVEKGKSKKLKSVKELLGITIMERSSFEKNPIDFLEAKGYKEVKKDLIIKLPKYSLFELENGRKRMLASAGELQKGNELALPSKYVNFLYLASHYEKLKGSPEDNEQKQLFVEQHKHYLDEIIEQISEFSKRVILADANLDKVLSAYNKHRDKPIREQAENIIHLFTLTNLGAPAAFKYFDTTIDRKRYTSTKEVLDATLIHQSITGLYETRIDLSQLGGDGGGGSGGGEAAAKGGTLNIEDEYRLHETSKEPDVPLGSTWLSDFPQAWAETGGMGLAVRQAPLIIPLKATSTPVSIKQYPMSQEARLGIKPHIQRLLDQGILVPCQSPWNTPLLPVKKPGTNDYRPVQDLREVNKRVEDIHPTVPNPYNLLSGLPPSHQWYTVLDLKDAFFCLRLHPTSQPLFAFEWRDPEMGISGQLTWTRLPQGFKNSPTLFNEALHRDLADFRIQHPDLILLQYVDDLLLAATSEQDCQRGTRALLQTLGNLGYRASAKKAQICQKQVKYLGYLLKEGQRWLTEARKETVMGQPTPKTPRQLREFLGKAGFCRLFIPGFAEMAAPLYPLTKPGTLFNWGPDQQKAYQEIKQALLTAPALGLPDLTKPFELFVDEKQGYAKGVLTQKLGPWRRPVAYLSKKLDPVAAGWPPCLRMVAAIAVLTKDAGKLTMGQPLVILAPHAVEALVKQPPDRWLSNARMTHYQAMLLDTDRVQFGPVVALNPATLLPLPEKEAPHDCLEILAETHGTRPDLTDQPIPDADYTWYTDGSSFLQEGQRRAGAAVTTETEVIWARALPAGTSAQRAELIALTQALKMAEGKKLNVYTDSRYAFATAHVHGEIYRRRGWLTSEGREIKNKNEILALLKALFLPKRLSIIHCPGHQKGNSAEARGNRMADQAAREAAMKAVLETSTLLAGKRTADGSEFEKRTADGSEFESPKKKAKVE

SEQ ID NO: 1047 - protein, 2091 aa, synthetic construct
MPAAKRVKLDGGDKKYSIGLDIGTNSVGWAVITDEYKVPSKKFKVLGNTDRHSIKKNLIGALLFDSGETAEATRLKRTARRRYTRRKNRICYLQEIFSNEMAKVDDSFFHRLEESFLVEEDKKHERHPIFGNIVDEVAYHEKYPTIYHLRKKLVDSTDKADLRLIYLALAHMIKFRGHFLIEGDLNPDNSDVDKLFIQLVQTYNQLFEENPINASGVDAKAILSARLSKSRRLENLIAQLPGEKKNGLFGNLIALSLGLTPNFKSNFDLAEDAKLQLSKDTYDDDLDNLLAQIGDQYADLFLAAKNLSDAILLSDILRVNTEITKAPLSASMIKRYDEHHQDLTLLKALVRQQLPEKYKEIFFDQSKNGYAGYIDGGASQEEFYKFIKPILEKMDGTEELLVKLNREDLLRKQRTFDNGSIPHQIHLGELHAILRRQEDFYPFLKDNREKIEKILTFRIPYYVGPLARGNSRFAWMTRKSEETITPWNFEEVVDKGASAQSFIERMTNFDKNLPNEKVLPKHSLLYEYFTVYNELTKVKYVTEGMRKPAFLSGEQKKAIVDLLFKTNRKVTVKQLKEDYFKKIECFDSVEISGVEDRFNASLGTYHDLLKIIKDKDFLDNEENEDILEDIVLTLTLFEDREMIEERLKTYAHLFDDKVMKQLKRRRYTGWGRLSRKLINGIRDKQSGKTILDFLKSDGFANRNFMQLIHDDSLTFKEDIQKAQVSGQGDSLHEHIANLAGSPAIKKGILQTVKVVDELVKVMGRHKPENIVIEMARENQTTQKGQKNSRERMKRIEEGIKELGSQILKEHPVENTQLQNEKLYLYYLQNGRDMYVDQELDINRLSDYDVDHIVPQSFLKDDSIDNKVLTRSDKARGKSDNVPSEEVVKKMKNYWRQLLNAKLITQRKFDNLTKAERGGLSELDKAGFIKRQLVETRQITKHVAQILDSRMNTKYDENDKLIREVKVITLKSKLVSDFRKDFQFYKVREINNYHHAHDAYLNAVVGTALIKKYPKLESEFVYGDYKVYDVRKMIAKSEQEIGKATAKYFFYSNIMNFFKTEITLANGEIRKRPLIETNGETGEIVWDKGRDFATVRKVLSMPQVNIVKKTEVQTGGFSKESILPKRNSDKLIARKKDWDPKKYGGFDSPTVAYSVLVVAKVEKGKSKKLKSVKELLGITIMERSSFEKNPIDFLEAKGYKEVKKDLIIKLPKYSLFELENGRKRMLASAGELQKGNELALPSKYVNFLYLASHYEKLKGSPEDNEQKQLFVEQHKHYLDEIIEQISEFSKRVILADANLDKVLSAYNKHRDKPIREQAENIIHLFTLTNLGAPAAFKYFDTTIDRKRYTSTKEVLDATLIHQSITGLYETRIDLSQLGGDGGGSSGSSGGTLNIEDEYRLHETSKEPDVPLGSTWLSDFPQAWAETGGMGLAVRQAPLIIPLKATSTPVSIKQYPMSQEARLGIKPHIQRLLDQGILVPCQSPWNTPLLPVKKPGTNDYRPVQDLREVNKRVEDIHPTVPNPYNLLSGLPPSHQWYTVLDLKDAFFCLRLHPTSQPLFAFEWRDPEMGISGQLTWTRLPQGFKNSPTLFNEALHRDLADFRIQHPDLILLQYVDDLLLAATSEQDCQRGTRALLQTLGNLGYRASAKKAQICQKQVKYLGYLLKEGQRWLTEARKETVMGQPTPKTPRQLREFLGKAGFCRLFIPGFAEMAAPLYPLTKPGTLFNWGPDQQKAYQEIKQALLTAPALGLPDLTKPFELFVDEKQGYAKGVLTQKLGPWRRPVAYLSKKLDPVAAGWPPCLRMVAAIAVLTKDAGKLTMGQPLVILAPHAVEALVKQPPDRWLSNARMTHYQAMLLDTDRVQFGPVVALNPATLLPLPEKEAPHDCLEILAETHGTRPDLTDQPIPDADYTWYTDGSSFLQEGQRRAGAAVTTETEVIWARALPAGTSAQRAELIALTQALKMAEGKKLNVYTDSRYAFATAHVHGEIYRRRGWLTSEGREIKNKNEILALLKALFLPKRLSIIHCPGHQKGNSAEARGNRMADQAAREAAMKAVLETSTLLAGKRTADGSEFEKRTADGSEFESPKKKAKVE

SEQ ID NO: 1048 - protein, 2093 aa, synthetic construct
MPAAKRVKLDGGDKKYSIGLDIGTNSVGWAVITDEYKVPSKKFKVLGNTDRHSIKKNLIGALLFDSGETAEATRLKRTARRRYTRRKNRICYLQEIFSNEMAKVDDSFFHRLEESFLVEEDKKHERHPIFGNIVDEVAYHEKYPTIYHLRKKLVDSTDKADLRLIYLALAHMIKFRGHFLIEGDLNPDNSDVDKLFIQLVQTYNQLFEENPINASGVDAKAILSARLSKSRRLENLIAQLPGEKKNGLFGNLIALSLGLTPNFKSNFDLAEDAKLQLSKDTYDDDLDNLLAQIGDQYADLFLAAKNLSDAILLSDILRVNTEITKAPLSASMIKRYDEHHQDLTLLKALVRQQLPEKYKEIFFDQSKNGYAGYIDGGASQEEFYKFIKPILEKMDGTEELLVKLNREDLLRKQRTFDNGSIPHQIHLGELHAILRRQEDFYPFLKDNREKIEKILTFRIPYYVGPLARGNSRFAWMTRKSEETITPWNFEEVVDKGASAQSFIERMTNFDKNLPNEKVLPKHSLLYEYFTVYNELTKVKYVTEGMRKPAFLSGEQKKAIVDLLFKTNRKVTVKQLKEDYFKKIECFDSVEISGVEDRFNASLGTYHDLLKIIKDKDFLDNEENEDILEDIVLTLTLFEDREMIEERLKTYAHLFDDKVMKQLKRRRYTGWGRLSRKLINGIRDKQSGKTILDFLKSDGFANRNFMQLIHDDSLTFKEDIQKAQVSGQGDSLHEHIANLAGSPAIKKGILQTVKVVDELVKVMGRHKPENIVIEMARENQTTQKGQKNSRERMKRIEEGIKELGSQILKEHPVENTQLQNEKLYLYYLQNGRDMYVDQELDINRLSDYDVDHIVPQSFLKDDSIDNKVLTRSDKARGKSDNVPSEEVVKKMKNYWRQLLNAKLITQRKFDNLTKAERGGLSELDKAGFIKRQLVETRQITKHVAQILDSRMNTKYDENDKLIREVKVITLKSKLVSDFRKDFQFYKVREINNYHHAHDAYLNAVVGTALIKKYPKLESEFVYGDYKVYDVRKMIAKSEQEIGKATAKYFFYSNIMNFFKTEITLANGEIRKRPLIETNGETGEIVWDKGRDFATVRKVLSMPQVNIVKKTEVQTGGFSKESILPKRNSDKLIARKKDWDPKKYGGFDSPTVAYSVLVVAKVEKGKSKKLKSVKELLGITIMERSSFEKNPIDFLEAKGYKEVKKDLIIKLPKYSLFELENGRKRMLASAGELQKGNELALPSKYVNFLYLASHYEKLKGSPEDNEQKQLFVEQHKHYLDEIIEQISEFSKRVILADANLDKVLSAYNKHRDKPIREQAENIIHLFTLTNLGAPAAFKYFDTTIDRKRYTSTKEVLDATLIHQSITGLYETRIDLSQLGGDGGEAAAKPAPGGTLNIEDEYRLHETSKEPDVPLGSTWLSDFPQAWAETGGMGLAVRQAPLIIPLKATSTPVSIKQYPMSQEARLGIKPHIQRLLDQGILVPCQSPWNTPLLPVKKPGTNDYRPVQDLREVNKRVEDIHPTVPNPYNLLSGLPPSHQWYTVLDLKDAFFCLRLHPTSQPLFAFEWRDPEMGISGQLTWTRLPQGFKNSPTLFNEALHRDLADFRIQHPDLILLQYVDDLLLAATSEQDCQRGTRALLQTLGNLGYRASAKKAQICQKQVKYLGYLLKEGQRWLTEARKETVMGQPTPKTPRQLREFLGKAGFCRLFIPGFAEMAAPLYPLTKPGTLFNWGPDQQKAYQEIKQALLTAPALGLPDLTKPFELFVDEKQGYAKGVLTQKLGPWRRPVAYLSKKLDPVAAGWPPCLRMVAAIAVLTKDAGKLTMGQPLVILAPHAVEALVKQPPDRWLSNARMTHYQAMLLDTDRVQFGPVVALNPATLLPLPEKEAPHDCLEILAETHGTRPDLTDQPIPDADYTWYTDGSSFLQEGQRRAGAAVTTETEVIWARALPAGTSAQRAELIALTQALKMAEGKKLNVYTDSRYAFATAHVHGEIYRRRGWLTSEGREIKNKNEILALLKALFLPKRLSIIHCPGHQKGNSAEARGNRMADQAAREAAMKAVLETSTLLAGKRTADGSEFEKRTADGSEFESPKKKAKVE

SEQ ID NO: 1049 - protein, 2105 aa, synthetic construct
MPAAKRVKLDGGDKKYSIGLDIGTNSVGWAVITDEYKVPSKKFKVLGNTDRHSIKKNLIGALLFDSGETAEATRLKRTARRRYTRRKNRICYLQEIFSNEMAKVDDSFFHRLEESFLVEEDKKHERHPIFGNIVDEVAYHEKYPTIYHLRKKLVDSTDKADLRLIYLALAHMIKFRGHFLIEGDLNPDNSDVDKLFIQLVQTYNQLFEENPINASGVDAKAILSARLSKSRRLENLIAQLPGEKKNGLFGNLIALSLGLTPNFKSNFDLAEDAKLQLSKDTYDDDLDNLLAQIGDQYADLFLAAKNLSDAILLSDILRVNTEITKAPLSASMIKRYDEHHQDLTLLKALVRQQLPEKYKEIFFDQSKNGYAGYIDGGASQEEFYKFIKPILEKMDGTEELLVKLNREDLLRKQRTFDNGSIPHQIHLGELHAILRRQEDFYPFLKDNREKIEKILTFRIPYYVGPLARGNSRFAWMTRKSEETITPWNFEEVVDKGASAQSFIERMTNFDKNLPNEKVLPKHSLLYEYFTVYNELTKVKYVTEGMRKPAFLSGEQKKAIVDLLFKTNRKVTVKQLKEDYFKKIECFDSVEISGVEDRFNASLGTYHDLLKIIKDKDFLDNEENEDILEDIVLTLTLFEDREMIEERLKTYAHLFDDKVMKQLKRRRYTGWGRLSRKLINGIRDKQSGKTILDFLKSDGFANRNFMQLIHDDSLTFKEDIQKAQVSGQGDSLHEHIANLAGSPAIKKGILQTVKVVDELVKVMGRHKPENIVIEMARENQTTQKGQKNSRERMKRIEEGIKELGSQILKEHPVENTQLQNEKLYLYYLQNGRDMYVDQELDINRLSDYDVDHIVPQSFLKDDSIDNKVLTRSDKARGKSDNVPSEEVVKKMKNYWRQLLNAKLITQRKFDNLTKAERGGLSELDKAGFIKRQLVETRQITKHVAQILDSRMNTKYDENDKLIREVKVITLKSKLVSDFRKDFQFYKVREINNYHHAHDAYLNAVVGTALIKKYPKLESEFVYGDYKVYDVRKMIAKSEQEIGKATAKYFFYSNIMNFFKTEITLANGEIRKRPLIETNGETGEIVWDKGRDFATVRKVLSMPQVNIVKKTEVQTGGFSKESILPKRNSDKLIARKKDWDPKKYGGFDSPTVAYSVLVVAKVEKGKSKKLKSVKELLGITIMERSSFEKNPIDFLEAKGYKEVKKDLIIKLPKYSLFELENGRKRMLASAGELQKGNELALPSKYVNFLYLASHYEKLKGSPEDNEQKQLFVEQHKHYLDEIIEQISEFSKRVILADANLDKVLSAYNKHRDKPIREQAENIIHLFTLTNLGAPAAFKYFDTTIDRKRYTSTKEVLDATLIHQSITGLYETRIDLSQLGGDGGGGGGSGGGGSGGGGSGGGGSGGTLNIEDEYRLHETSKEPDVPLGSTWLSDFPQAWAETGGMGLAVRQAPLIIPLKATSTPVSIKQYPMSQEARLGIKPHIQRLLDQGILVPCQSPWNTPLLPVKKPGTNDYRPVQDLREVNKRVEDIHPTVPNPYNLLSGLPPSHQWYTVLDLKDAFFCLRLHPTSQPLFAFEWRDPEMGISGQLTWTRLPQGFKNSPTLFNEALHRDLADFRIQHPDLILLQYVDDLLLAATSEQDCQRGTRALLQTLGNLGYRASAKKAQICQKQVKYLGYLLKEGQRWLTEARKETVMGQPTPKTPRQLREFLGKAGFCRLFIPGFAEMAAPLYPLTKPGTLFNWGPDQQKAYQEIKQALLTAPALGLPDLTKPFELFVDEKQGYAKGVLTQKLGPWRRPVAYLSKKLDPVAAGWPPCLRMVAAIAVLTKDAGKLTMGQPLVILAPHAVEALVKQPPDRWLSNARMTHYQAMLLDTDRVQFGPVVALNPATLLPLPEKEAPHDCLEILAETHGTRPDLTDQPIPDADYTWYTDGSSFLQEGQRRAGAAVTTETEVIWARALPAGTSAQRAELIALTQALKMAEGKKLNVYTDSRYAFATAHVHGEIYRRRGWLTSEGREIKNKNEILALLKALFLPKRLSIIHCPGHQKGNSAEARGNRMADQAAREAAMKAVLETSTLLAGKRTADGSEFEKRTADGSEFESPKKKAKVE

SEQ ID NO: 1050 - protein, 2093 aa, synthetic construct
MPAAKRVKLDGGDKKYSIGLDIGTNSVGWAVITDEYKVPSKKFKVLGNTDRHSIKKNLIGALLFDSGETAEATRLKRTARRRYTRRKNRICYLQEIFSNEMAKVDDSFFHRLEESFLVEEDKKHERHPIFGNIVDEVAYHEKYPTIYHLRKKLVDSTDKADLRLIYLALAHMIKFRGHFLIEGDLNPDNSDVDKLFIQLVQTYNQLFEENPINASGVDAKAILSARLSKSRRLENLIAQLPGEKKNGLFGNLIALSLGLTPNFKSNFDLAEDAKLQLSKDTYDDDLDNLLAQIGDQYADLFLAAKNLSDAILLSDILRVNTEITKAPLSASMIKRYDEHHQDLTLLKALVRQQLPEKYKEIFFDQSKNGYAGYIDGGASQEEFYKFIKPILEKMDGTEELLVKLNREDLLRKQRTFDNGSIPHQIHLGELHAILRRQEDFYPFLKDNREKIEKILTFRIPYYVGPLARGNSRFAWMTRKSEETITPWNFEEVVDKGASAQSFIERMTNFDKNLPNEKVLPKHSLLYEYFTVYNELTKVKYVTEGMRKPAFLSGEQKKAIVDLLFKTNRKVTVKQLKEDYFKKIECFDSVEISGVEDRFNASLGTYHDLLKIIKDKDFLDNEENEDILEDIVLTLTLFEDREMIEERLKTYAHLFDDKVMKQLKRRRYTGWGRLSRKLINGIRDKQSGKTILDFLKSDGFANRNFMQLIHDDSLTFKEDIQKAQVSGQGDSLHEHIANLAGSPAIKKGILQTVKVVDELVKVMGRHKPENIVIEMARENQTTQKGQKNSRERMKRIEEGIKELGSQILKEHPVENTQLQNEKLYLYYLQNGRDMYVDQELDINRLSDYDVDHIVPQSFLKDDSIDNKVLTRSDKARGKSDNVPSEEVVKKMKNYWRQLLNAKLITQRKFDNLTKAERGGLSELDKAGFIKRQLVETRQITKHVAQILDSRMNTKYDENDKLIREVKVITLKSKLVSDFRKDFQFYKVREINNYHHAHDAYLNAVVGTALIKKYPKLESEFVYGDYKVYDVRKMIAKSEQEIGKATAKYFFYSNIMNFFKTEITLANGEIRKRPLIETNGETGEIVWDKGRDFATVRKVLSMPQVNIVKKTEVQTGGFSKESILPKRNSDKLIARKKDWDPKKYGGFDSPTVAYSVLVVAKVEKGKSKKLKSVKELLGITIMERSSFEKNPIDFLEAKGYKEVKKDLIIKLPKYSLFELENGRKRMLASAGELQKGNELALPSKYVNFLYLASHYEKLKGSPEDNEQKQLFVEQHKHYLDEIIEQISEFSKRVILADANLDKVLSAYNKHRDKPIREQAENIIHLFTLTNLGAPAAFKYFDTTIDRKRYTSTKEVLDATLIHQSITGLYETRIDLSQLGGDGGEAAAKGGGGGTLNIEDEYRLHETSKEPDVPLGSTWLSDFPQAWAETGGMGLAVRQAPLIIPLKATSTPVSIKQYPMSQEARLGIKPHIQRLLDQGILVPCQSPWNTPLLPVKKPGTNDYRPVQDLREVNKRVEDIHPTVPNPYNLLSGLPPSHQWYTVLDLKDAFFCLRLHPTSQPLFAFEWRDPEMGISGQLTWTRLPQGFKNSPTLFNEALHRDLADFRIQHPDLILLQYVDDLLLAATSEQDCQRGTRALLQTLGNLGYRASAKKAQICQKQVKYLGYLLKEGQRWLTEARKETVMGQPTPKTPRQLREFLGKAGFCRLFIPGFAEMAAPLYPLTKPGTLFNWGPDQQKAYQEIKQALLTAPALGLPDLTKPFELFVDEKQGYAKGVLTQKLGPWRRPVAYLSKKLDPVAAGWPPCLRMVAAIAVLTKDAGKLTMGQPLVILAPHAVEALVKQPPDRWLSNARMTHYQAMLLDTDRVQFGPVVALNPATLLPLPEKEAPHDCLEILAETHGTRPDLTDQPIPDADYTWYTDGSSFLQEGQRRAGAAVTTETEVIWARALPAGTSAQRAELIALTQALKMAEGKKLNVYTDSRYAFATAHVHGEIYRRRGWLTSEGREIKNKNEILALLKALFLPKRLSIIHCPGHQKGNSAEARGNRMADQAAREAAMKAVLETSTLLAGKRTADGSEFEKRTADGSEFESPKKKAKVE

SEQ ID NO: 1051 - protein, 2096 aa, synthetic construct
MPAAKRVKLDGGDKKYSIGLDIGTNSVGWAVITDEYKVPSKKFKVLGNTDRHSIKKNLIGALLFDSGETAEATRLKRTARRRYTRRKNRICYLQEIFSNEMAKVDDSFFHRLEESFLVEEDKKHERHPIFGNIVDEVAYHEKYPTIYHLRKKLVDSTDKADLRLIYLALAHMIKFRGHFLIEGDLNPDNSDVDKLFIQLVQTYNQLFEENPINASGVDAKAILSARLSKSRRLENLIAQLPGEKKNGLFGNLIALSLGLTPNFKSNFDLAEDAKLQLSKDTYDDDLDNLLAQIGDQYADLFLAAKNLSDAILLSDILRVNTEITKAPLSASMIKRYDEHHQDLTLLKALVRQQLPEKYKEIFFDQSKNGYAGYIDGGASQEEFYKFIKPILEKMDGTEELLVKLNREDLLRKQRTFDNGSIPHQIHLGELHAILRRQEDFYPFLKDNREKIEKILTFRIPYYVGPLARGNSRFAWMTRKSEETITPWNFEEVVDKGASAQSFIERMTNFDKNLPNEKVLPKHSLLYEYFTVYNELTKVKYVTEGMRKPAFLSGEQKKAIVDLLFKTNRKVTVKQLKEDYFKKIECFDSVEISGVEDRFNASLGTYHDLLKIIKDKDFLDNEENEDILEDIVLTLTLFEDREMIEERLKTYAHLFDDKVMKQLKRRRYTGWGRLSRKLINGIRDKQSGKTILDFLKSDGFANRNFMQLIHDDSLTFKEDIQKAQVSGQGDSLHEHIANLAGSPAIKKGILQTVKVVDELVKVMGRHKPENIVIEMARENQTTQKGQKNSRERMKRIEEGIKELGSQILKEHPVENTQLQNEKLYLYYLQNGRDMYVDQELDINRLSDYDVDHIVPQSFLKDDSIDNKVLTRSDKARGKSDNVPSEEVVKKMKNYWRQLLNAKLITQRKFDNLTKAERGGLSELDKAGFIKRQLVETRQITKHVAQILDSRMNTKYDENDKLIREVKVITLKSKLVSDFRKDFQFYKVREINNYHHAHDAYLNAVVGTALIKKYPKLESEFVYGDYKVYDVRKMIAKSEQEIGKATAKYFFYSNIMNFFKTEITLANGEIRKRPLIETNGETGEIVWDKGRDFATVRKVLSMPQVNIVKKTEVQTGGFSKESILPKRNSDKLIARKKDWDPKKYGGFDSPTVAYSVLVVAKVEKGKSKKLKSVKELLGITIMERSSFEKNPIDFLEAKGYKEVKKDLIIKLPKYSLFELENGRKRMLASAGELQKGNELALPSKYVNFLYLASHYEKLKGSPEDNEQKQLFVEQHKHYLDEIIEQISEFSKRVILADANLDKVLSAYNKHRDKPIREQAENIIHLFTLTNLGAPAAFKYFDTTIDRKRYTSTKEVLDATLIHQSITGLYETRIDLSQLGGDGGEAAAKGGSGGGGGTLNIEDEYRLHETSKEPDVPLGSTWLSDFPQAWAETGGMGLAVRQAPLIIPLKATSTPVSIKQYPMSQEARLGIKPHIQRLLDQGILVPCQSPWNTPLLPVKKPGTNDYRPVQDLREVNKRVEDIHPTVPNPYNLLSGLPPSHQWYTVLDLKDAFFCLRLHPTSQPLFAFEWRDPEMGISGQLTWTRLPQGFKNSPTLFNEALHRDLADFRIQHPDLILLQYVDDLLLAATSEQDCQRGTRALLQTLGNLGYRASAKKAQICQKQVKYLGYLLKEGQRWLTEARKETVMGQPTPKTPRQLREFLGKAGFCRLFIPGFAEMAAPLYPLTKPGTLFNWGPDQQKAYQEIKQALLTAPALGLPDLTKPFELFVDEKQGYAKGVLTQKLGPWRRPVAYLSKKLDPVAAGWPPCLRMVAAIAVLTKDAGKLTMGQPLVILAPHAVEALVKQPPDRWLSNARMTHYQAMLLDTDRVQFGPVVALNPATLLPLPEKEAPHDCLEILAETHGTRPDLTDQPIPDADYTWYTDGSSFLQEGQRRAGAAVTTETEVIWARALPAGTSAQRAELIALTQALKMAEGKKLNVYTDSRYAFATAHVHGEIYRRRGWLTSEGREIKNKNEILALLKALFLPKRLSIIHCPGHQKGNSAEARGNRMADQAAREAAMKAVLETSTLLAGKRTADGSEFEKRTADGSEFESPKKKAKVE

SEQ ID NO: 1052 - protein, 2115 aa, synthetic construct
MPAAKRVKLDGGDKKYSIGLDIGTNSVGWAVITDEYKVPSKKFKVLGNTDRHSIKKNLIGALLFDSGETAEATRLKRTARRRYTRRKNRICYLQEIFSNEMAKVDDSFFHRLEESFLVEEDKKHERHPIFGNIVDEVAYHEKYPTIYHLRKKLVDSTDKADLRLIYLALAHMIKFRGHFLIEGDLNPDNSDVDKLFIQLVQTYNQLFEENPINASGVDAKAILSARLSKSRRLENLIAQLPGEKKNGLFGNLIALSLGLTPNFKSNFDLAEDAKLQLSKDTYDDDLDNLLAQIGDQYADLFLAAKNLSDAILLSDILRVNTEITKAPLSASMIKRYDEHHQDLTLLKALVRQQLPEKYKEIFFDQSKNGYAGYIDGGASQEEFYKFIKPILEKMDGTEELLVKLNREDLLRKQRTFDNGSIPHQIHLGELHAILRRQEDFYPFLKDNREKIEKILTFRIPYYVGPLARGNSRFAWMTRKSEETITPWNFEEVVDKGASAQSFIERMTNFDKNLPNEKVLPKHSLLYEYFTVYNELTKVKYVTEGMRKPAFLSGEQKKAIVDLLFKTNRKVTVKQLKEDYFKKIECFDSVEISGVEDRFNASLGTYHDLLKIIKDKDFLDNEENEDILEDIVLTLTLFEDREMIEERLKTYAHLFDDKVMKQLKRRRYTGWGRLSRKLINGIRDKQSGKTILDFLKSDGFANRNFMQLIHDDSLTFKEDIQKAQVSGQGDSLHEHIANLAGSPAIKKGILQTVKVVDELVKVMGRHKPENIVIEMARENQTTQKGQKNSRERMKRIEEGIKELGSQILKEHPVENTQLQNEKLYLYYLQNGRDMYVDQELDINRLSDYDVDHIVPQSFLKDDSIDNKVLTRSDKARGKSDNVPSEEVVKKMKNYWRQLLNAKLITQRKFDNLTKAERGGLSELDKAGFIKRQLVETRQITKHVAQILDSRMNTKYDENDKLIREVKVITLKSKLVSDFRKDFQFYKVREINNYHHAHDAYLNAVVGTALIKKYPKLESEFVYGDYKVYDVRKMIAKSEQEIGKATAKYFFYSNIMNFFKTEITLANGEIRKRPLIETNGETGEIVWDKGRDFATVRKVLSMPQVNIVKKTEVQTGGFSKESILPKRNSDKLIARKKDWDPKKYGGFDSPTVAYSVLVVAKVEKGKSKKLKSVKELLGITIMERSSFEKNPIDFLEAKGYKEVKKDLIIKLPKYSLFELENGRKRMLASAGELQKGNELALPSKYVNFLYLASHYEKLKGSPEDNEQKQLFVEQHKHYLDEIIEQISEFSKRVILADANLDKVLSAYNKHRDKPIREQAENIIHLFTLTNLGAPAAFKYFDTTIDRKRYTSTKEVLDATLIHQSITGLYETRIDLSQLGGDGGEAAAKEAAAKEAAAKEAAAKEAAAKEAAAKGGTLNIEDEYRLHETSKEPDVPLGSTWLSDFPQAWAETGGMGLAVRQAPLIIPLKATSTPVSIKQYPMSQEARLGIKPHIQRLLDQGILVPCQSPWNTPLLPVKKPGTNDYRPVQDLREVNKRVEDIHPTVPNPYNLLSGLPPSHQWYTVLDLKDAFFCLRLHPTSQPLFAFEWRDPEMGISGQLTWTRLPQGFKNSPTLFNEALHRDLADFRIQHPDLILLQYVDDLLLAATSEQDCQRGTRALLQTLGNLGYRASAKKAQICQKQVKYLGYLLKEGQRWLTEARKETVMGQPTPKTPRQLREFLGKAGFCRLFIPGFAEMAAPLYPLTKPGTLFNWGPDQQKAYQEIKQALLTAPALGLPDLTKPFELFVDEKQGYAKGVLTQKLGPWRRPVAYLSKKLDPVAAGWPPCLRMVAAIAVLTKDAGKLTMGQPLVILAPHAVEALVKQPPDRWLSNARMTHYQAMLLDTDRVQFGPVVALNPATLLPLPEKEAPHDCLEILAETHGTRPDLTDQPIPDADYTWYTDGSSFLQEGQRRAGAAVTTETEVIWARALPAGTSAQRAELIALTQALKMAEGKKLNVYTDSRYAFATAHVHGEIYRRRGWLTSEGREIKNKNEILALLKALFLPKRLSIIHCPGHQKGNSAEARGNRMADQAAREAAMKAVLETSTLLAGKRTADGSEFEKRTADGSEFESPKKKAKVE

SEQ ID NO: 1053 - protein, 2096 aa, synthetic construct
MPAAKRVKLDGGDKKYSIGLDIGTNSVGWAVITDEYKVPSKKFKVLGNTDRHSIKKNLIGALLFDSGETAEATRLKRTARRRYTRRKNRICYLQEIFSNEMAKVDDSFFHRLEESFLVEEDKKHERHPIFGNIVDEVAYHEKYPTIYHLRKKLVDSTDKADLRLIYLALAHMIKFRGHFLIEGDLNPDNSDVDKLFIQLVQTYNQLFEENPINASGVDAKAILSARLSKSRRLENLIAQLPGEKKNGLFGNLIALSLGLTPNFKSNFDLAEDAKLQLSKDTYDDDLDNLLAQIGDQYADLFLAAKNLSDAILLSDILRVNTEITKAPLSASMIKRYDEHHQDLTLLKALVRQQLPEKYKEIFFDQSKNGYAGYIDGGASQEEFYKFIKPILEKMDGTEELLVKLNREDLLRKQRTFDNGSIPHQIHLGELHAILRRQEDFYPFLKDNREKIEKILTFRIPYYVGPLARGNSRFAWMTRKSEETITPWNFEEVVDKGASAQSFIERMTNFDKNLPNEKVLPKHSLLYEYFTVYNELTKVKYVTEGMRKPAFLSGEQKKAIVDLLFKTNRKVTVKQLKEDYFKKIECFDSVEISGVEDRFNASLGTYHDLLKIIKDKDFLDNEENEDILEDIVLTLTLFEDREMIEERLKTYAHLFDDKVMKQLKRRRYTGWGRLSRKLINGIRDKQSGKTILDFLKSDGFANRNFMQLIHDDSLTFKEDIQKAQVSGQGDSLHEHIANLAGSPAIKKGILQTVKVVDELVKVMGRHKPENIVIEMARENQTTQKGQKNSRERMKRIEEGIKELGSQILKEHPVENTQLQNEKLYLYYLQNGRDMYVDQELDINRLSDYDVDHIVPQSFLKDDSIDNKVLTRSDKARGKSDNVPSEEVVKKMKNYWRQLLNAKLITQRKFDNLTKAERGGLSELDKAGFIKRQLVETRQITKHVAQILDSRMNTKYDENDKLIREVKVITLKSKLVSDFRKDFQFYKVREINNYHHAHDAYLNAVVGTALIKKYPKLESEFVYGDYKVYDVRKMIAKSEQEIGKATAKYFFYSNIMNFFKTEITLANGEIRKRPLIETNGETGEIVWDKGRDFATVRKVLSMPQVNIVKKTEVQTGGFSKESILPKRNSDKLIARKKDWDPKKYGGFDSPTVAYSVLVVAKVEKGKSKKLKSVKELLGITIMERSSFEKNPIDFLEAKGYKEVKKDLIIKLPKYSLFELENGRKRMLASAGELQKGNELALPSKYVNFLYLASHYEKLKGSPEDNEQKQLFVEQHKHYLDEIIEQISEFSKRVILADANLDKVLSAYNKHRDKPIREQAENIIHLFTLTNLGAPAAFKYFDTTIDRKRYTSTKEVLDATLIHQSITGLYETRIDLSQLGGDGGGGGGSSEAAAKGGTLNIEDEYRLHETSKEPDVPLGSTWLSDFPQAWAETGGMGLAVRQAPLIIPLKATSTPVSIKQYPMSQEARLGIKPHIQRLLDQGILVPCQSPWNTPLLPVKKPGTNDYRPVQDLREVNKRVEDIHPTVPNPYNLLSGLPPSHQWYTVLDLKDAFFCLRLHPTSQPLFAFEWRDPEMGISGQLTWTRLPQGFKNSPTLFNEALHRDLADFRIQHPDLILLQYVDDLLLAATSEQDCQRGTRALLQTLGNLGYRASAKKAQICQKQVKYLGYLLKEGQRWLTEARKETVMGQPTPKTPRQLREFLGKAGFCRLFIPGFAEMAAPLYPLTKPGTLFNWGPDQQKAYQEIKQALLTAPALGLPDLTKPFELFVDEKQGYAKGVLTQKLGPWRRPVAYLSKKLDPVAAGWPPCLRMVAAIAVLTKDAGKLTMGQPLVILAPHAVEALVKQPPDRWLSNARMTHYQAMLLDTDRVQFGPVVALNPATLLPLPEKEAPHDCLEILAETHGTRPDLTDQPIPDADYTWYTDGSSFLQEGQRRAGAAVTTETEVIWARALPAGTSAQRAELIALTQALKMAEGKKLNVYTDSRYAFATAHVHGEIYRRRGWLTSEGREIKNKNEILALLKALFLPKRLSIIHCPGHQKGNSAEARGNRMADQAAREAAMKAVLETSTLLAGKRTADGSEFEKRTADGSEFESPKKKAKVE

SEQ ID NO: 1054 - protein, 2096 aa, synthetic construct
MPAAKRVKLDGGDKKYSIGLDIGTNSVGWAVITDEYKVPSKKFKVLGNTDRHSIKKNLIGALLFDSGETAEATRLKRTARRRYTRRKNRICYLQEIFSNEMAKVDDSFFHRLEESFLVEEDKKHERHPIFGNIVDEVAYHEKYPTIYHLRKKLVDSTDKADLRLIYLALAHMIKFRGHFLIEGDLNPDNSDVDKLFIQLVQTYNQLFEENPINASGVDAKAILSARLSKSRRLENLIAQLPGEKKNGLFGNLIALSLGLTPNFKSNFDLAEDAKLQLSKDTYDDDLDNLLAQIGDQYADLFLAAKNLSDAILLSDILRVNTEITKAPLSASMIKRYDEHHQDLTLLKALVRQQLPEKYKEIFFDQSKNGYAGYIDGGASQEEFYKFIKPILEKMDGTEELLVKLNREDLLRKQRTFDNGSIPHQIHLGELHAILRRQEDFYPFLKDNREKIEKILTFRIPYYVGPLARGNSRFAWMTRKSEETITPWNFEEVVDKGASAQSFIERMTNFDKNLPNEKVLPKHSLLYEYFTVYNELTKVKYVTEGMRKPAFLSGEQKKAIVDLLFKTNRKVTVKQLKEDYFKKIECFDSVEISGVEDRFNASLGTYHDLLKIIKDKDFLDNEENEDILEDIVLTLTLFEDREMIEERLKTYAHLFDDKVMKQLKRRRYTGWGRLSRKLINGIRDKQSGKTILDFLKSDGFANRNFMQLIHDDSLTFKEDIQKAQVSGQGDSLHEHIANLAGSPAIKKGILQTVKVVDELVKVMGRHKPENIVIEMARENQTTQKGQKNSRERMKRIEEGIKELGSQILKEHPVENTQLQNEKLYLYYLQNGRDMYVDQELDINRLSDYDVDHIVPQSFLKDDSIDNKVLTRSDKARGKSDNVPSEEVVKKMKNYWRQLLNAKLITQRKFDNLTKAERGGLSELDKAGFIKRQLVETRQITKHVAQILDSRMNTKYDENDKLIREVKVITLKSKLVSDFRKDFQFYKVREINNYHHAHDAYLNAVVGTALIKKYPKLESEFVYGDYKVYDVRKMIAKSEQEIGKATAKYFFYSNIMNFFKTEITLANGEIRKRPLIETNGETGEIVWDKGRDFATVRKVLSMPQVNIVKKTEVQTGGFSKESILPKRNSDKLIARKKDWDPKKYGGFDSPTVAYSVLVVAKVEKGKSKKLKSVKELLGITIMERSSFEKNPIDFLEAKGYKEVKKDLIIKLPKYSLFELENGRKRMLASAGELQKGNELALPSKYVNFLYLASHYEKLKGSPEDNEQKQLFVEQHKHYLDEIIEQISEFSKRVILADANLDKVLSAYNKHRDKPIREQAENIIHLFTLTNLGAPAAFKYFDTTIDRKRYTSTKEVLDATLIHQSITGLYETRIDLSQLGGDGGGSSGGGEAAAKGGTLNIEDEYRLHETSKEPDVPLGSTWLSDFPQAWAETGGMGLAVRQAPLIIPLKATSTPVSIKQYPMSQEARLGIKPHIQRLLDQGILVPCQSPWNTPLLPVKKPGTNDYRPVQDLREVNKRVEDIHPTVPNPYNLLSGLPPSHQWYTVLDLKDAFFCLRLHPTSQPLFAFEWRDPEMGISGQLTWTRLPQGFKNSPTLFNEALHRDLADFRIQHPDLILLQYVDDLLLAATSEQDCQRGTRALLQTLGNLGYRASAKKAQICQKQVKYLGYLLKEGQRWLTEARKETVMGQPTPKTPRQLREFLGKAGFCRLFIPGFAEMAAPLYPLTKPGTLFNWGPDQQKAYQEIKQALLTAPALGLPDLTKPFELFVDEKQGYAKGVLTQKLGPWRRPVAYLSKKLDPVAAGWPPCLRMVAAIAVLTKDAGKLTMGQPLVILAPHAVEALVKQPPDRWLSNARMTHYQAMLLDTDRVQFGPVVALNPATLLPLPEKEAPHDCLEILAETHGTRPDLTDQPIPDADYTWYTDGSSFLQEGQRRAGAAVTTETEVIWARALPAGTSAQRAELIALTQALKMAEGKKLNVYTDSRYAFATAHVHGEIYRRRGWLTSEGREIKNKNEILALLKALFLPKRLSIIHCPGHQKGNSAEARGNRMADQAAREAAMKAVLETSTLLAGKRTADGSEFEKRTADGSEFESPKKKAKVE

SEQ ID NO: 1055 - protein, 2094 aa, synthetic construct
MPAAKRVKLDGGDKKYSIGLDIGTNSVGWAVITDEYKVPSKKFKVLGNTDRHSIKKNLIGALLFDSGETAEATRLKRTARRRYTRRKNRICYLQEIFSNEMAKVDDSFFHRLEESFLVEEDKKHERHPIFGNIVDEVAYHEKYPTIYHLRKKLVDSTDKADLRLIYLALAHMIKFRGHFLIEGDLNPDNSDVDKLFIQLVQTYNQLFEENPINASGVDAKAILSARLSKSRRLENLIAQLPGEKKNGLFGNLIALSLGLTPNFKSNFDLAEDAKLQLSKDTYDDDLDNLLAQIGDQYADLFLAAKNLSDAILLSDILRVNTEITKAPLSASMIKRYDEHHQDLTLLKALVRQQLPEKYKEIFFDQSKNGYAGYIDGGASQEEFYKFIKPILEKMDGTEELLVKLNREDLLRKQRTFDNGSIPHQIHLGELHAILRRQEDFYPFLKDNREKIEKILTFRIPYYVGPLARGNSRFAWMTRKSEETITPWNFEEVVDKGASAQSFIERMTNFDKNLPNEKVLPKHSLLYEYFTVYNELTKVKYVTEGMRKPAFLSGEQKKAIVDLLFKTNRKVTVKQLKEDYFKKIECFDSVEISGVEDRFNASLGTYHDLLKIIKDKDFLDNEENEDILEDIVLTLTLFEDREMIEERLKTYAHLFDDKVMKQLKRRRYTGWGRLSRKLINGIRDKQSGKTILDFLKSDGFANRNFMQLIHDDSLTFKEDIQKAQVSGQGDSLHEHIANLAGSPAIKKGILQTVKVVDELVKVMGRHKPENIVIEMARENQTTQKGQKNSRERMKRIEEGIKELGSQILKEHPVENTQLQNEKLYLYYLQNGRDMYVDQELDINRLSDYDVDHIVPQSFLKDDSIDNKVLTRSDKARGKSDNVPSEEVVKKMKNYWRQLLNAKLITQRKFDNLTKAERGGLSELDKAGFIKRQLVETRQITKHVAQILDSRMNTKYDENDKLIREVKVITLKSKLVSDFRKDFQFYKVREINNYHHAHDAYLNAVVGTALIKKYPKLESEFVYGDYKVYDVRKMIAKSEQEIGKATAKYFFYSNIMNFFKTEITLANGEIRKRPLIETNGETGEIVWDKGRDFATVRKVLSMPQVNIVKKTEVQTGGFSKESILPKRNSDKLIARKKDWDPKKYGGFDSPTVAYSVLVVAKVEKGKSKKLKSVKELLGITIMERSSFEKNPIDFLEAKGYKEVKKDLIIKLPKYSLFELENGRKRMLASAGELQKGNELALPSKYVNFLYLASHYEKLKGSPEDNEQKQLFVEQHKHYLDEIIEQISEFSKRVILADANLDKVLSAYNKHRDKPIREQAENIIHLFTLTNLGAPAAFKYFDTTIDRKRYTSTKEVLDATLIHQSITGLYETRIDLSQLGGDGGGGSPAPGGGGGTLNIEDEYRLHETSKEPDVPLGSTWLSDFPQAWAETGGMGLAVRQAPLIIPLKATSTPVSIKQYPMSQEARLGIKPHIQRLLDQGILVPCQSPWNTPLLPVKKPGTNDYRPVQDLREVNKRVEDIHPTVPNPYNLLSGLPPSHQWYTVLDLKDAFFCLRLHPTSQPLFAFEWRDPEMGISGQLTWTRLPQGFKNSPTLFNEALHRDLADFRIQHPDLILLQYVDDLLLAATSEQDCQRGTRALLQTLGNLGYRASAKKAQICQKQVKYLGYLLKEGQRWLTEARKETVMGQPTPKTPRQLREFLGKAGFCRLFIPGFAEMAAPLYPLTKPGTLFNWGPDQQKAYQEIKQALLTAPALGLPDLTKPFELFVDEKQGYAKGVLTQKLGPWRRPVAYLSKKLDPVAAGWPPCLRMVAAIAVLTKDAGKLTMGQPLVILAPHAVEALVKQPPDRWLSNARMTHYQAMLLDTDRVQFGPVVALNPATLLPLPEKEAPHDCLEILAETHGTRPDLTDQPIPDADYTWYTDGSSFLQEGQRRAGAAVTTETEVIWARALPAGTSAQRAELIALTQALKMAEGKKLNVYTDSRYAFATAHVHGEIYRRRGWLTSEGREIKNKNEILALLKALFLPKRLSIIHCPGHQKGNSAEARGNRMADQAAREAAMKAVLETSTLLAGKRTADGSEFEKRTADGSEFESPKKKAKVE

SEQ ID NO: 1056 - protein, 2096 aa, synthetic construct
MPAAKRVKLDGGDKKYSIGLDIGTNSVGWAVITDEYKVPSKKFKVLGNTDRHSIKKNLIGALLFDSGETAEATRLKRTARRRYTRRKNRICYLQEIFSNEMAKVDDSFFHRLEESFLVEEDKKHERHPIFGNIVDEVAYHEKYPTIYHLRKKLVDSTDKADLRLIYLALAHMIKFRGHFLIEGDLNPDNSDVDKLFIQLVQTYNQLFEENPINASGVDAKAILSARLSKSRRLENLIAQLPGEKKNGLFGNLIALSLGLTPNFKSNFDLAEDAKLQLSKDTYDDDLDNLLAQIGDQYADLFLAAKNLSDAILLSDILRVNTEITKAPLSASMIKRYDEHHQDLTLLKALVRQQLPEKYKEIFFDQSKNGYAGYIDGGASQEEFYKFIKPILEKMDGTEELLVKLNREDLLRKQRTFDNGSIPHQIHLGELHAILRRQEDFYPFLKDNREKIEKILTFRIPYYVGPLARGNSRFAWMTRKSEETITPWNFEEVVDKGASAQSFIERMTNFDKNLPNEKVLPKHSLLYEYFTVYNELTKVKYVTEGMRKPAFLSGEQKKAIVDLLFKTNRKVTVKQLKEDYFKKIECFDSVEISGVEDRFNASLGTYHDLLKIIKDKDFLDNEENEDILEDIVLTLTLFEDREMIEERLKTYAHLFDDKVMKQLKRRRYTGWGRLSRKLINGIRDKQSGKTILDFLKSDGFANRNFMQLIHDDSLTFKEDIQKAQVSGQGDSLHEHIANLAGSPAIKKGILQTVKVVDELVKVMGRHKPENIVIEMARENQTTQKGQKNSRERMKRIEEGIKELGSQILKEHPVENTQLQNEKLYLYYLQNGRDMYVDQELDINRLSDYDVDHIVPQSFLKDDSIDNKVLTRSDKARGKSDNVPSEEVVKKMKNYWRQLLNAKLITQRKFDNLTKAERGGLSELDKAGFIKRQLVETRQITKHVAQILDSRMNTKYDENDKLIREVKVITLKSKLVSDFRKDFQFYKVREINNYHHAHDAYLNAVVGTALIKKYPKLESEFVYGDYKVYDVRKMIAKSEQEIGKATAKYFFYSNIMNFFKTEITLANGEIRKRPLIETNGETGEIVWDKGRDFATVRKVLSMPQVNIVKKTEVQTGGFSKESILPKRNSDKLIARKKDWDPKKYGGFDSPTVAYSVLVVAKVEKGKSKKLKSVKELLGITIMERSSFEKNPIDFLEAKGYKEVKKDLIIKLPKYSLFELENGRKRMLASAGELQKGNELALPSKYVNFLYLASHYEKLKGSPEDNEQKQLFVEQHKHYLDEIIEQISEFSKRVILADANLDKVLSAYNKHRDKPIREQAENIIHLFTLTNLGAPAAFKYFDTTIDRKRYTSTKEVLDATLIHQSITGLYETRIDLSQLGGDGGEAAAKGGGGSSGGTLNIEDEYRLHETSKEPDVPLGSTWLSDFPQAWAETGGMGLAVRQAPLIIPLKATSTPVSIKQYPMSQEARLGIKPHIQRLLDQGILVPCQSPWNTPLLPVKKPGTNDYRPVQDLREVNKRVEDIHPTVPNPYNLLSGLPPSHQWYTVLDLKDAFFCLRLHPTSQPLFAFEWRDPEMGISGQLTWTRLPQGFKNSPTLFNEALHRDLADFRIQHPDLILLQYVDDLLLAATSEQDCQRGTRALLQTLGNLGYRASAKKAQICQKQVKYLGYLLKEGQRWLTEARKETVMGQPTPKTPRQLREFLGKAGFCRLFIPGFAEMAAPLYPLTKPGTLFNWGPDQQKAYQEIKQALLTAPALGLPDLTKPFELFVDEKQGYAKGVLTQKLGPWRRPVAYLSKKLDPVAAGWPPCLRMVAAIAVLTKDAGKLTMGQPLVILAPHAVEALVKQPPDRWLSNARMTHYQAMLLDTDRVQFGPVVALNPATLLPLPEKEAPHDCLEILAETHGTRPDLTDQPIPDADYTWYTDGSSFLQEGQRRAGAAVTTETEVIWARALPAGTSAQRAELIALTQALKMAEGKKLNVYTDSRYAFATAHVHGEIYRRRGWLTSEGREIKNKNEILALLKALFLPKRLSIIHCPGHQKGNSAEARGNRMADQAAREAAMKAVLETSTLLAGKRTADGSEFEKRTADGSEFESPKKKAKVE

SEQ ID NO: 1057 - protein, 2089 aa, synthetic construct
MPAAKRVKLDGGDKKYSIGLDIGTNSVGWAVITDEYKVPSKKFKVLGNTDRHSIKKNLIGALLFDSGETAEATRLKRTARRRYTRRKNRICYLQEIFSNEMAKVDDSFFHRLEESFLVEEDKKHERHPIFGNIVDEVAYHEKYPTIYHLRKKLVDSTDKADLRLIYLALAHMIKFRGHFLIEGDLNPDNSDVDKLFIQLVQTYNQLFEENPINASGVDAKAILSARLSKSRRLENLIAQLPGEKKNGLFGNLIALSLGLTPNFKSNFDLAEDAKLQLSKDTYDDDLDNLLAQIGDQYADLFLAAKNLSDAILLSDILRVNTEITKAPLSASMIKRYDEHHQDLTLLKALVRQQLPEKYKEIFFDQSKNGYAGYIDGGASQEEFYKFIKPILEKMDGTEELLVKLNREDLLRKQRTFDNGSIPHQIHLGELHAILRRQEDFYPFLKDNREKIEKILTFRIPYYVGPLARGNSRFAWMTRKSEETITPWNFEEVVDKGASAQSFIERMTNFDKNLPNEKVLPKHSLLYEYFTVYNELTKVKYVTEGMRKPAFLSGEQKKAIVDLLFKTNRKVTVKQLKEDYFKKIECFDSVEISGVEDRFNASLGTYHDLLKIIKDKDFLDNEENEDILEDIVLTLTLFEDREMIEERLKTYAHLFDDKVMKQLKRRRYTGWGRLSRKLINGIRDKQSGKTILDFLKSDGFANRNFMQLIHDDSLTFKEDIQKAQVSGQGDSLHEHIANLAGSPAIKKGILQTVKVVDELVKVMGRHKPENIVIEMARENQTTQKGQKNSRERMKRIEEGIKELGSQILKEHPVENTQLQNEKLYLYYLQNGRDMYVDQELDINRLSDYDVDHIVPQSFLKDDSIDNKVLTRSDKARGKSDNVPSEEVVKKMKNYWRQLLNAKLITQRKFDNLTKAERGGLSELDKAGFIKRQLVETRQITKHVAQILDSRMNTKYDENDKLIREVKVITLKSKLVSDFRKDFQFYKVREINNYHHAHDAYLNAVVGTALIKKYPKLESEFVYGDYKVYDVRKMIAKSEQEIGKATAKYFFYSNIMNFFKTEITLANGEIRKRPLIETNGETGEIVWDKGRDFATVRKVLSMPQVNIVKKTEVQTGGFSKESILPKRNSDKLIARKKDWDPKKYGGFDSPTVAYSVLVVAKVEKGKSKKLKSVKELLGITIMERSSFEKNPIDFLEAKGYKEVKKDLIIKLPKYSLFELENGRKRMLASAGELQKGNELALPSKYVNFLYLASHYEKLKGSPEDNEQKQLFVEQHKHYLDEIIEQISEFSKRVILADANLDKVLSAYNKHRDKPIREQAENIIHLFTLTNLGAPAAFKYFDTTIDRKRYTSTKEVLDATLIHQSITGLYETRIDLSQLGGDGGGGGGGGTLNIEDEYRLHETSKEPDVPLGSTWLSDFPQAWAETGGMGLAVRQAPLIIPLKATSTPVSIKQYPMSQEARLGIKPHIQRLLDQGILVPCQSPWNTPLLPVKKPGTNDYRPVQDLREVNKRVEDIHPTVPNPYNLLSGLPPSHQWYTVLDLKDAFFCLRLHPTSQPLFAFEWRDPEMGISGQLTWTRLPQGFKNSPTLFNEALHRDLADFRIQHPDLILLQYVDDLLLAATSEQDCQRGTRALLQTLGNLGYRASAKKAQICQKQVKYLGYLLKEGQRWLTEARKETVMGQPTPKTPRQLREFLGKAGFCRLFIPGFAEMAAPLYPLTKPGTLFNWGPDQQKAYQEIKQALLTAPALGLPDLTKPFELFVDEKQGYAKGVLTQKLGPWRRPVAYLSKKLDPVAAGWPPCLRMVAAIAVLTKDAGKLTMGQPLVILAPHAVEALVKQPPDRWLSNARMTHYQAMLLDTDRVQFGPVVALNPATLLPLPEKEAPHDCLEILAETHGTRPDLTDQPIPDADYTWYTDGSSFLQEGQRRAGAAVTTETEVIWARALPAGTSAQRAELIALTQALKMAEGKKLNVYTDSRYAFATAHVHGEIYRRRGWLTSEGREIKNKNEILALLKALFLPKRLSIIHCPGHQKGNSAEARGNRMADQAAREAAMKAVLETSTLLAGKRTADGSEFEKRTADGSEFESPKKKAKVE

SEQ ID NO: 1058 - protein, 2096 aa, synthetic construct
MPAAKRVKLDGGDKKYSIGLDIGTNSVGWAVITDEYKVPSKKFKVLGNTDRHSIKKNLIGALLFDSGETAEATRLKRTARRRYTRRKNRICYLQEIFSNEMAKVDDSFFHRLEESFLVEEDKKHERHPIFGNIVDEVAYHEKYPTIYHLRKKLVDSTDKADLRLIYLALAHMIKFRGHFLIEGDLNPDNSDVDKLFIQLVQTYNQLFEENPINASGVDAKAILSARLSKSRRLENLIAQLPGEKKNGLFGNLIALSLGLTPNFKSNFDLAEDAKLQLSKDTYDDDLDNLLAQIGDQYADLFLAAKNLSDAILLSDILRVNTEITKAPLSASMIKRYDEHHQDLTLLKALVRQQLPEKYKEIFFDQSKNGYAGYIDGGASQEEFYKFIKPILEKMDGTEELLVKLNREDLLRKQRTFDNGSIPHQIHLGELHAILRRQEDFYPFLKDNREKIEKILTFRIPYYVGPLARGNSRFAWMTRKSEETITPWNFEEVVDKGASAQSFIERMTNFDKNLPNEKVLPKHSLLYEYFTVYNELTKVKYVTEGMRKPAFLSGEQKKAIVDLLFKTNRKVTVKQLKEDYFKKIECFDSVEISGVEDRFNASLGTYHDLLKIIKDKDFLDNEENEDILEDIVLTLTLFEDREMIEERLKTYAHLFDDKVMKQLKRRRYTGWGRLSRKLINGIRDKQSGKTILDFLKSDGFANRNFMQLIHDDSLTFKEDIQKAQVSGQGDSLHEHIANLAGSPAIKKGILQTVKVVDELVKVMGRHKPENIVIEMARENQTTQKGQKNSRERMKRIEEGIKELGSQILKEHPVENTQLQNEKLYLYYLQNGRDMYVDQELDINRLSDYDVDHIVPQSFLKDDSIDNKVLTRSDKARGKSDNVPSEEVVKKMKNYWRQLLNAKLITQRKFDNLTKAERGGLSELDKAGFIKRQLVETRQITKHVAQILDSRMNTKYDENDKLIREVKVITLKSKLVSDFRKDFQFYKVREINNYHHAHDAYLNAVVGTALIKKYPKLESEFVYGDYKVYDVRKMIAKSEQEIGKATAKYFFYSNIMNFFKTEITLANGEIRKRPLIETNGETGEIVWDKGRDFATVRKVLSMPQVNIVKKTEVQTGGFSKESILPKRNSDKLIARKKDWDPKKYGGFDSPTVAYSVLVVAKVEKGKSKKLKSVKELLGITIMERSSFEKNPIDFLEAKGYKEVKKDLIIKLPKYSLFELENGRKRMLASAGELQKGNELALPSKYVNFLYLASHYEKLKGSPEDNEQKQLFVEQHKHYLDEIIEQISEFSKRVILADANLDKVLSAYNKHRDKPIREQAENIIHLFTLTNLGAPAAFKYFDTTIDRKRYTSTKEVLDATLIHQSITGLYETRIDLSQLGGDGGEAAAKGGGPAPGGTLNIEDEYRLHETSKEPDVPLGSTWLSDFPQAWAETGGMGLAVRQAPLIIPLKATSTPVSIKQYPMSQEARLGIKPHIQRLLDQGILVPCQSPWNTPLLPVKKPGTNDYRPVQDLREVNKRVEDIHPTVPNPYNLLSGLPPSHQWYTVLDLKDAFFCLRLHPTSQPLFAFEWRDPEMGISGQLTWTRLPQGFKNSPTLFNEALHRDLADFRIQHPDLILLQYVDDLLLAATSEQDCQRGTRALLQTLGNLGYRASAKKAQICQKQVKYLGYLLKEGQRWLTEARKETVMGQPTPKTPRQLREFLGKAGFCRLFIPGFAEMAAPLYPLTKPGTLFNWGPDQQKAYQEIKQALLTAPALGLPDLTKPFELFVDEKQGYAKGVLTQKLGPWRRPVAYLSKKLDPVAAGWPPCLRMVAAIAVLTKDAGKLTMGQPLVILAPHAVEALVKQPPDRWLSNARMTHYQAMLLDTDRVQFGPVVALNPATLLPLPEKEAPHDCLEILAETHGTRPDLTDQPIPDADYTWYTDGSSFLQEGQRRAGAAVTTETEVIWARALPAGTSAQRAELIALTQALKMAEGKKLNVYTDSRYAFATAHVHGEIYRRRGWLTSEGREIKNKNEILALLKALFLPKRLSIIHCPGHQKGNSAEARGNRMADQAAREAAMKAVLETSTLLAGKRTADGSEFEKRTADGSEFESPKKKAKVE

SEQ ID NO: 1059 - protein, 2096 aa, synthetic construct
MPAAKRVKLDGGDKKYSIGLDIGTNSVGWAVITDEYKVPSKKFKVLGNTDRHSIKKNLIGALLFDSGETAEATRLKRTARRRYTRRKNRICYLQEIFSNEMAKVDDSFFHRLEESFLVEEDKKHERHPIFGNIVDEVAYHEKYPTIYHLRKKLVDSTDKADLRLIYLALAHMIKFRGHFLIEGDLNPDNSDVDKLFIQLVQTYNQLFEENPINASGVDAKAILSARLSKSRRLENLIAQLPGEKKNGLFGNLIALSLGLTPNFKSNFDLAEDAKLQLSKDTYDDDLDNLLAQIGDQYADLFLAAKNLSDAILLSDILRVNTEITKAPLSASMIKRYDEHHQDLTLLKALVRQQLPEKYKEIFFDQSKNGYAGYIDGGASQEEFYKFIKPILEKMDGTEELLVKLNREDLLRKQRTFDNGSIPHQIHLGELHAILRRQEDFYPFLKDNREKIEKILTFRIPYYVGPLARGNSRFAWMTRKSEETITPWNFEEVVDKGASAQSFIERMTNFDKNLPNEKVLPKHSLLYEYFTVYNELTKVKYVTEGMRKPAFLSGEQKKAIVDLLFKTNRKVTVKQLKEDYFKKIECFDSVEISGVEDRFNASLGTYHDLLKIIKDKDFLDNEENEDILEDIVLTLTLFEDREMIEERLKTYAHLFDDKVMKQLKRRRYTGWGRLSRKLINGIRDKQSGKTILDFLKSDGFANRNFMQLIHDDSLTFKEDIQKAQVSGQGDSLHEHIANLAGSPAIKKGILQTVKVVDELVKVMGRHKPENIVIEMARENQTTQKGQKNSRERMKRIEEGIKELGSQILKEHPVENTQLQNEKLYLYYLQNGRDMYVDQELDINRLSDYDVDHIVPQSFLKDDSIDNKVLTRSDKARGKSDNVPSEEVVKKMKNYWRQLLNAKLITQRKFDNLTKAERGGLSELDKAGFIKRQLVETRQITKHVAQILDSRMNTKYDENDKLIREVKVITLKSKLVSDFRKDFQFYKVREINNYHHAHDAYLNAVVGTALIKKYPKLESEFVYGDYKVYDVRKMIAKSEQEIGKATAKYFFYSNIMNFFKTEITLANGEIRKRPLIETNGETGEIVWDKGRDFATVRKVLSMPQVNIVKKTEVQTGGFSKESILPKRNSDKLIARKKDWDPKKYGGFDSPTVAYSVLVVAKVEKGKSKKLKSVKELLGITIMERSSFEKNPIDFLEAKGYKEVKKDLIIKLPKYSLFELENGRKRMLASAGELQKGNELALPSKYVNFLYLASHYEKLKGSPEDNEQKQLFVEQHKHYLDEIIEQISEFSKRVILADANLDKVLSAYNKHRDKPIREQAENIIHLFTLTNLGAPAAFKYFDTTIDRKRYTSTKEVLDATLIHQSITGLYETRIDLSQLGGDGGGGSGSSEAAAKGGTLNIEDEYRLHETSKEPDVPLGSTWLSDFPQAWAETGGMGLAVRQAPLIIPLKATSTPVSIKQYPMSQEARLGIKPHIQRLLDQGILVPCQSPWNTPLLPVKKPGTNDYRPVQDLREVNKRVEDIHPTVPNPYNLLSGLPPSHQWYTVLDLKDAFFCLRLHPTSQPLFAFEWRDPEMGISGQLTWTRLPQGFKNSPTLFNEALHRDLADFRIQHPDLILLQYVDDLLLAATSEQDCQRGTRALLQTLGNLGYRASAKKAQICQKQVKYLGYLLKEGQRWLTEARKETVMGQPTPKTPRQLREFLGKAGFCRLFIPGFAEMAAPLYPLTKPGTLFNWGPDQQKAYQEIKQALLTAPALGLPDLTKPFELFVDEKQGYAKGVLTQKLGPWRRPVAYLSKKLDPVAAGWPPCLRMVAAIAVLTKDAGKLTMGQPLVILAPHAVEALVKQPPDRWLSNARMTHYQAMLLDTDRVQFGPVVALNPATLLPLPEKEAPHDCLEILAETHGTRPDLTDQPIPDADYTWYTDGSSFLQEGQRRAGAAVTTETEVIWARALPAGTSAQRAELIALTQALKMAEGKKLNVYTDSRYAFATAHVHGEIYRRRGWLTSEGREIKNKNEILALLKALFLPKRLSIIHCPGHQKGNSAEARGNRMADQAAREAAMKAVLETSTLLAGKRTADGSEFEKRTADGSEFESPKKKAKVE

SEQ ID NO: 1060 - protein, 2096 aa, synthetic construct
MPAAKRVKLDGGDKKYSIGLDIGTNSVGWAVITDEYKVPSKKFKVLGNTDRHSIKKNLIGALLFDSGETAEATRLKRTARRRYTRRKNRICYLQEIFSNEMAKVDDSFFHRLEESFLVEEDKKHERHPIFGNIVDEVAYHEKYPTIYHLRKKLVDSTDKADLRLIYLALAHMIKFRGHFLIEGDLNPDNSDVDKLFIQLVQTYNQLFEENPINASGVDAKAILSARLSKSRRLENLIAQLPGEKKNGLFGNLIALSLGLTPNFKSNFDLAEDAKLQLSKDTYDDDLDNLLAQIGDQYADLFLAAKNLSDAILLSDILRVNTEITKAPLSASMIKRYDEHHQDLTLLKALVRQQLPEKYKEIFFDQSKNGYAGYIDGGASQEEFYKFIKPILEKMDGTEELLVKLNREDLLRKQRTFDNGSIPHQIHLGELHAILRRQEDFYPFLKDNREKIEKILTFRIPYYVGPLARGNSRFAWMTRKSEETITPWNFEEVVDKGASAQSFIERMTNFDKNLPNEKVLPKHSLLYEYFTVYNELTKVKYVTEGMRKPAFLSGEQKKAIVDLLFKTNRKVTVKQLKEDYFKKIECFDSVEISGVEDRFNASLGTYHDLLKIIKDKDFLDNEENEDILEDIVLTLTLFEDREMIEERLKTYAHLFDDKVMKQLKRRRYTGWGRLSRKLINGIRDKQSGKTILDFLKSDGFANRNFMQLIHDDSLTFKEDIQKAQVSGQGDSLHEHIANLAGSPAIKKGILQTVKVVDELVKVMGRHKPENIVIEMARENQTTQKGQKNSRERMKRIEEGIKELGSQILKEHPVENTQLQNEKLYLYYLQNGRDMYVDQELDINRLSDYDVDHIVPQSFLKDDSIDNKVLTRSDKARGKSDNVPSEEVVKKMKNYWRQLLNAKLITQRKFDNLTKAERGGLSELDKAGFIKRQLVETRQITKHVAQILDSRMNTKYDENDKLIREVKVITLKSKLVSDFRKDFQFYKVREINNYHHAHDAYLNAVVGTALIKKYPKLESEFVYGDYKVYDVRKMIAKSEQEIGKATAKYFFYSNIMNFFKTEITLANGEIRKRPLIETNGETGEIVWDKGRDFATVRKVLSMPQVNIVKKTEVQTGGFSKESILPKRNSDKLIARKKDWDPKKYGGFDSPTVAYSVLVVAKVEKGKSKKLKSVKELLGITIMERSSFEKNPIDFLEAKGYKEVKKDLIIKLPKYSLFELENGRKRMLASAGELQKGNELALPSKYVNFLYLASHYEKLKGSPEDNEQKQLFVEQHKHYLDEIIEQISEFSKRVILADANLDKVLSAYNKHRDKPIREQAENIIHLFTLTNLGAPAAFKYFDTTIDRKRYTSTKEVLDATLIHQSITGLYETRIDLSQLGGDGGGSSGGSEAAAKGGTLNIEDEYRLHETSKEPDVPLGSTWLSDFPQAWAETGGMGLAVRQAPLIIPLKATSTPVSIKQYPMSQEARLGIKPHIQRLLDQGILVPCQSPWNTPLLPVKKPGTNDYRPVQDLREVNKRVEDIHPTVPNPYNLLSGLPPSHQWYTVLDLKDAFFCLRLHPTSQPLFAFEWRDPEMGISGQLTWTRLPQGFKNSPTLFNEALHRDLADFRIQHPDLILLQYVDDLLLAATSEQDCQRGTRALLQTLGNLGYRASAKKAQICQKQVKYLGYLLKEGQRWLTEARKETVMGQPTPKTPRQLREFLGKAGFCRLFIPGFAEMAAPLYPLTKPGTLFNWGPDQQKAYQEIKQALLTAPALGLPDLTKPFELFVDEKQGYAKGVLTQKLGPWRRPVAYLSKKLDPVAAGWPPCLRMVAAIAVLTKDAGKLTMGQPLVILAPHAVEALVKQPPDRWLSNARMTHYQAMLLDTDRVQFGPVVALNPATLLPLPEKEAPHDCLEILAETHGTRPDLTDQPIPDADYTWYTDGSSFLQEGQRRAGAAVTTETEVIWARALPAGTSAQRAELIALTQALKMAEGKKLNVYTDSRYAFATAHVHGEIYRRRGWLTSEGREIKNKNEILALLKALFLPKRLSIIHCPGHQKGNSAEARGNRMADQAAREAAMKAVLETSTLLAGKRTADGSEFEKRTADGSEFESPKKKAKVE

SEQ ID NO: 1061 - protein, 2094 aa, synthetic construct
MPAAKRVKLDGGDKKYSIGLDIGTNSVGWAVITDEYKVPSKKFKVLGNTDRHSIKKNLIGALLFDSGETAEATRLKRTARRRYTRRKNRICYLQEIFSNEMAKVDDSFFHRLEESFLVEEDKKHERHPIFGNIVDEVAYHEKYPTIYHLRKKLVDSTDKADLRLIYLALAHMIKFRGHFLIEGDLNPDNSDVDKLFIQLVQTYNQLFEENPINASGVDAKAILSARLSKSRRLENLIAQLPGEKKNGLFGNLIALSLGLTPNFKSNFDLAEDAKLQLSKDTYDDDLDNLLAQIGDQYADLFLAAKNLSDAILLSDILRVNTEITKAPLSASMIKRYDEHHQDLTLLKALVRQQLPEKYKEIFFDQSKNGYAGYIDGGASQEEFYKFIKPILEKMDGTEELLVKLNREDLLRKQRTFDNGSIPHQIHLGELHAILRRQEDFYPFLKDNREKIEKILTFRIPYYVGPLARGNSRFAWMTRKSEETITPWNFEEVVDKGASAQSFIERMTNFDKNLPNEKVLPKHSLLYEYFTVYNELTKVKYVTEGMRKPAFLSGEQKKAIVDLLFKTNRKVTVKQLKEDYFKKIECFDSVEISGVEDRFNASLGTYHDLLKIIKDKDFLDNEENEDILEDIVLTLTLFEDREMIEERLKTYAHLFDDKVMKQLKRRRYTGWGRLSRKLINGIRDKQSGKTILDFLKSDGFANRNFMQLIHDDSLTFKEDIQKAQVSGQGDSLHEHIANLAGSPAIKKGILQTVKVVDELVKVMGRHKPENIVIEMARENQTTQKGQKNSRERMKRIEEGIKELGSQILKEHPVENTQLQNEKLYLYYLQNGRDMYVDQELDINRLSDYDVDHIVPQSFLKDDSIDNKVLTRSDKARGKSDNVPSEEVVKKMKNYWRQLLNAKLITQRKFDNLTKAERGGLSELDKAGFIKRQLVETRQITKHVAQILDSRMNTKYDENDKLIREVKVITLKSKLVSDFRKDFQFYKVREINNYHHAHDAYLNAVVGTALIKKYPKLESEFVYGDYKVYDVRKMIAKSEQEIGKATAKYFFYSNIMNFFKTEITLANGEIRKRPLIETNGETGEIVWDKGRDFATVRKVLSMPQVNIVKKTEVQTGGFSKESILPKRNSDKLIARKKDWDPKKYGGFDSPTVAYSVLVVAKVEKGKSKKLKSVKELLGITIMERSSFEKNPIDFLEAKGYKEVKKDLIIKLPKYSLFELENGRKRMLASAGELQKGNELALPSKYVNFLYLASHYEKLKGSPEDNEQKQLFVEQHKHYLDEIIEQISEFSKRVILADANLDKVLSAYNKHRDKPIREQAENIIHLFTLTNLGAPAAFKYFDTTIDRKRYTSTKEVLDATLIHQSITGLYETRIDLSQLGGDGGGSSGGSPAPGGTLNIEDEYRLHETSKEPDVPLGSTWLSDFPQAWAETGGMGLAVRQAPLIIPLKATSTPVSIKQYPMSQEARLGIKPHIQRLLDQGILVPCQSPWNTPLLPVKKPGTNDYRPVQDLREVNKRVEDIHPTVPNPYNLLSGLPPSHQWYTVLDLKDAFFCLRLHPTSQPLFAFEWRDPEMGISGQLTWTRLPQGFKNSPTLFNEALHRDLADFRIQHPDLILLQYVDDLLLAATSEQDCQRGTRALLQTLGNLGYRASAKKAQICQKQVKYLGYLLKEGQRWLTEARKETVMGQPTPKTPRQLREFLGKAGFCRLFIPGFAEMAAPLYPLTKPGTLFNWGPDQQKAYQEIKQALLTAPALGLPDLTKPFELFVDEKQGYAKGVLTQKLGPWRRPVAYLSKKLDPVAAGWPPCLRMVAAIAVLTKDAGKLTMGQPLVILAPHAVEALVKQPPDRWLSNARMTHYQAMLLDTDRVQFGPVVALNPATLLPLPEKEAPHDCLEILAETHGTRPDLTDQPIPDADYTWYTDGSSFLQEGQRRAGAAVTTETEVIWARALPAGTSAQRAELIALTQALKMAEGKKLNVYTDSRYAFATAHVHGEIYRRRGWLTSEGREIKNKNEILALLKALFLPKRLSIIHCPGHQKGNSAEARGNRMADQAAREAAMKAVLETSTLLAGKRTADGSEFEKRTADGSEFESPKKKAKVE

SEQ ID NO: 1062 - protein, 2091 aa, synthetic construct
MPAAKRVKLDGGDKKYSIGLDIGTNSVGWAVITDEYKVPSKKFKVLGNTDRHSIKKNLIGALLFDSGETAEATRLKRTARRRYTRRKNRICYLQEIFSNEMAKVDDSFFHRLEESFLVEEDKKHERHPIFGNIVDEVAYHEKYPTIYHLRKKLVDSTDKADLRLIYLALAHMIKFRGHFLIEGDLNPDNSDVDKLFIQLVQTYNQLFEENPINASGVDAKAILSARLSKSRRLENLIAQLPGEKKNGLFGNLIALSLGLTPNFKSNFDLAEDAKLQLSKDTYDDDLDNLLAQIGDQYADLFLAAKNLSDAILLSDILRVNTEITKAPLSASMIKRYDEHHQDLTLLKALVRQQLPEKYKEIFFDQSKNGYAGYIDGGASQEEFYKFIKPILEKMDGTEELLVKLNREDLLRKQRTFDNGSIPHQIHLGELHAILRRQEDFYPFLKDNREKIEKILTFRIPYYVGPLARGNSRFAWMTRKSEETITPWNFEEVVDKGASAQSFIERMTNFDKNLPNEKVLPKHSLLYEYFTVYNELTKVKYVTEGMRKPAFLSGEQKKAIVDLLFKTNRKVTVKQLKEDYFKKIECFDSVEISGVEDRFNASLGTYHDLLKIIKDKDFLDNEENEDILEDIVLTLTLFEDREMIEERLKTYAHLFDDKVMKQLKRRRYTGWGRLSRKLINGIRDKQSGKTILDFLKSDGFANRNFMQLIHDDSLTFKEDIQKAQVSGQGDSLHEHIANLAGSPAIKKGILQTVKVVDELVKVMGRHKPENIVIEMARENQTTQKGQKNSRERMKRIEEGIKELGSQILKEHPVENTQLQNEKLYLYYLQNGRDMYVDQELDINRLSDYDVDHIVPQSFLKDDSIDNKVLTRSDKARGKSDNVPSEEVVKKMKNYWRQLLNAKLITQRKFDNLTKAERGGLSELDKAGFIKRQLVETRQITKHVAQILDSRMNTKYDENDKLIREVKVITLKSKLVSDFRKDFQFYKVREINNYHHAHDAYLNAVVGTALIKKYPKLESEFVYGDYKVYDVRKMIAKSEQEIGKATAKYFFYSNIMNFFKTEITLANGEIRKRPLIETNGETGEIVWDKGRDFATVRKVLSMPQVNIVKKTEVQTGGFSKESILPKRNSDKLIARKKDWDPKKYGGFDSPTVAYSVLVVAKVEKGKSKKLKSVKELLGITIMERSSFEKNPIDFLEAKGYKEVKKDLIIKLPKYSLFELENGRKRMLASAGELQKGNELALPSKYVNFLYLASHYEKLKGSPEDNEQKQLFVEQHKHYLDEIIEQISEFSKRVILADANLDKVLSAYNKHRDKPIREQAENIIHLFTLTNLGAPAAFKYFDTTIDRKRYTSTKEVLDATLIHQSITGLYETRIDLSQLGGDGGGSSGGSGGTLNIEDEYRLHETSKEPDVPLGSTWLSDFPQAWAETGGMGLAVRQAPLIIPLKATSTPVSIKQYPMSQEARLGIKPHIQRLLDQGILVPCQSPWNTPLLPVKKPGTNDYRPVQDLREVNKRVEDIHPTVPNPYNLLSGLPPSHQWYTVLDLKDAFFCLRLHPTSQPLFAFEWRDPEMGISGQLTWTRLPQGFKNSPTLFNEALHRDLADFRIQHPDLILLQYVDDLLLAATSEQDCQRGTRALLQTLGNLGYRASAKKAQICQKQVKYLGYLLKEGQRWLTEARKETVMGQPTPKTPRQLREFLGKAGFCRLFIPGFAEMAAPLYPLTKPGTLFNWGPDQQKAYQEIKQALLTAPALGLPDLTKPFELFVDEKQGYAKGVLTQKLGPWRRPVAYLSKKLDPVAAGWPPCLRMVAAIAVLTKDAGKLTMGQPLVILAPHAVEALVKQPPDRWLSNARMTHYQAMLLDTDRVQFGPVVALNPATLLPLPEKEAPHDCLEILAETHGTRPDLTDQPIPDADYTWYTDGSSFLQEGQRRAGAAVTTETEVIWARALPAGTSAQRAELIALTQALKMAEGKKLNVYTDSRYAFATAHVHGEIYRRRGWLTSEGREIKNKNEILALLKALFLPKRLSIIHCPGHQKGNSAEARGNRMADQAAREAAMKAVLETSTLLAGKRTADGSEFEKRTADGSEFESPKKKAKVE

SEQ ID NO: 1063 - protein, 2094 aa, synthetic construct
MPAAKRVKLDGGDKKYSIGLDIGTNSVGWAVITDEYKVPSKKFKVLGNTDRHSIKKNLIGALLFDSGETAEATRLKRTARRRYTRRKNRICYLQEIFSNEMAKVDDSFFHRLEESFLVEEDKKHERHPIFGNIVDEVAYHEKYPTIYHLRKKLVDSTDKADLRLIYLALAHMIKFRGHFLIEGDLNPDNSDVDKLFIQLVQTYNQLFEENPINASGVDAKAILSARLSKSRRLENLIAQLPGEKKNGLFGNLIALSLGLTPNFKSNFDLAEDAKLQLSKDTYDDDLDNLLAQIGDQYADLFLAAKNLSDAILLSDILRVNTEITKAPLSASMIKRYDEHHQDLTLLKALVRQQLPEKYKEIFFDQSKNGYAGYIDGGASQEEFYKFIKPILEKMDGTEELLVKLNREDLLRKQRTFDNGSIPHQIHLGELHAILRRQEDFYPFLKDNREKIEKILTFRIPYYVGPLARGNSRFAWMTRKSEETITPWNFEEVVDKGASAQSFIERMTNFDKNLPNEKVLPKHSLLYEYFTVYNELTKVKYVTEGMRKPAFLSGEQKKAIVDLLFKTNRKVTVKQLKEDYFKKIECFDSVEISGVEDRFNASLGTYHDLLKIIKDKDFLDNEENEDILEDIVLTLTLFEDREMIEERLKTYAHLFDDKVMKQLKRRRYTGWGRLSRKLINGIRDKQSGKTILDFLKSDGFANRNFMQLIHDDSLTFKEDIQKAQVSGQGDSLHEHIANLAGSPAIKKGILQTVKVVDELVKVMGRHKPENIVIEMARENQTTQKGQKNSRERMKRIEEGIKELGSQILKEHPVENTQLQNEKLYLYYLQNGRDMYVDQELDINRLSDYDVDHIVPQSFLKDDSIDNKVLTRSDKARGKSDNVPSEEVVKKMKNYWRQLLNAKLITQRKFDNLTKAERGGLSELDKAGFIKRQLVETRQITKHVAQILDSRMNTKYDENDKLIREVKVITLKSKLVSDFRKDFQFYKVREINNYHHAHDAYLNAVVGTALIKKYPKLESEFVYGDYKVYDVRKMIAKSEQEIGKATAKYFFYSNIMNFFKTEITLANGEIRKRPLIETNGETGEIVWDKGRDFATVRKVLSMPQVNIVKKTEVQTGGFSKESILPKRNSDKLIARKKDWDPKKYGGFDSPTVAYSVLVVAKVEKGKSKKLKSVKELLGITIMERSSFEKNPIDFLEAKGYKEVKKDLIIKLPKYSLFELENGRKRMLASAGELQKGNELALPSKYVNFLYLASHYEKLKGSPEDNEQKQLFVEQHKHYLDEIIEQISEFSKRVILADANLDKVLSAYNKHRDKPIREQAENIIHLFTLTNLGAPAAFKYFDTTIDRKRYTSTKEVLDATLIHQSITGLYETRIDLSQLGGDGGGGSGSSPAPGGTLNIEDEYRLHETSKEPDVPLGSTWLSDFPQAWAETGGMGLAVRQAPLIIPLKATSTPVSIKQYPMSQEARLGIKPHIQRLLDQGILVPCQSPWNTPLLPVKKPGTNDYRPVQDLREVNKRVEDIHPTVPNPYNLLSGLPPSHQWYTVLDLKDAFFCLRLHPTSQPLFAFEWRDPEMGISGQLTWTRLPQGFKNSPTLFNEALHRDLADFRIQHPDLILLQYVDDLLLAATSEQDCQRGTRALLQTLGNLGYRASAKKAQICQKQVKYLGYLLKEGQRWLTEARKETVMGQPTPKTPRQLREFLGKAGFCRLFIPGFAEMAAPLYPLTKPGTLFNWGPDQQKAYQEIKQALLTAPALGLPDLTKPFELFVDEKQGYAKGVLTQKLGPWRRPVAYLSKKLDPVAAGWPPCLRMVAAIAVLTKDAGKLTMGQPLVILAPHAVEALVKQPPDRWLSNARMTHYQAMLLDTDRVQFGPVVALNPATLLPLPEKEAPHDCLEILAETHGTRPDLTDQPIPDADYTWYTDGSSFLQEGQRRAGAAVTTETEVIWARALPAGTSAQRAELIALTQALKMAEGKKLNVYTDSRYAFATAHVHGEIYRRRGWLTSEGREIKNKNEILALLKALFLPKRLSIIHCPGHQKGNSAEARGNRMADQAAREAAMKAVLETSTLLAGKRTADGSEFEKRTADGSEFESPKKKAKVE

SEQ ID NO: 1064 - protein, 2096 aa, synthetic construct
MPAAKRVKLDGGDKKYSIGLDIGTNSVGWAVITDEYKVPSKKFKVLGNTDRHSIKKNLIGALLFDSGETAEATRLKRTARRRYTRRKNRICYLQEIFSNEMAKVDDSFFHRLEESFLVEEDKKHERHPIFGNIVDEVAYHEKYPTIYHLRKKLVDSTDKADLRLIYLALAHMIKFRGHFLIEGDLNPDNSDVDKLFIQLVQTYNQLFEENPINASGVDAKAILSARLSKSRRLENLIAQLPGEKKNGLFGNLIALSLGLTPNFKSNFDLAEDAKLQLSKDTYDDDLDNLLAQIGDQYADLFLAAKNLSDAILLSDILRVNTEITKAPLSASMIKRYDEHHQDLTLLKALVRQQLPEKYKEIFFDQSKNGYAGYIDGGASQEEFYKFIKPILEKMDGTEELLVKLNREDLLRKQRTFDNGSIPHQIHLGELHAILRRQEDFYPFLKDNREKIEKILTFRIPYYVGPLARGNSRFAWMTRKSEETITPWNFEEVVDKGASAQSFIERMTNFDKNLPNEKVLPKHSLLYEYFTVYNELTKVKYVTEGMRKPAFLSGEQKKAIVDLLFKTNRKVTVKQLKEDYFKKIECFDSVEISGVEDRFNASLGTYHDLLKIIKDKDFLDNEENEDILEDIVLTLTLFEDREMIEERLKTYAHLFDDKVMKQLKRRRYTGWGRLSRKLINGIRDKQSGKTILDFLKSDGFANRNFMQLIHDDSLTFKEDIQKAQVSGQGDSLHEHIANLAGSPAIKKGILQTVKVVDELVKVMGRHKPENIVIEMARENQTTQKGQKNSRERMKRIEEGIKELGSQILKEHPVENTQLQNEKLYLYYLQNGRDMYVDQELDINRLSDYDVDHIVPQSFLKDDSIDNKVLTRSDKARGKSDNVPSEEVVKKMKNYWRQLLNAKLITQRKFDNLTKAERGGLSELDKAGFIKRQLVETRQITKHVAQILDSRMNTKYDENDKLIREVKVITLKSKLVSDFRKDFQFYKVREINNYHHAHDAYLNAVVGTALIKKYPKLESEFVYGDYKVYDVRKMIAKSEQEIGKATAKYFFYSNIMNFFKTEITLANGEIRKRPLIETNGETGEIVWDKGRDFATVRKVLSMPQVNIVKKTEVQTGGFSKESILPKRNSDKLIARKKDWDPKKYGGFDSPTVAYSVLVVAKVEKGKSKKLKSVKELLGITIMERSSFEKNPIDFLEAKGYKEVKKDLIIKLPKYSLFELENGRKRMLASAGELQKGNELALPSKYVNFLYLASHYEKLKGSPEDNEQKQLFVEQHKHYLDEIIEQISEFSKRVILADANLDKVLSAYNKHRDKPIREQAENIIHLFTLTNLGAPAAFKYFDTTIDRKRYTSTKEVLDATLIHQSITGLYETRIDLSQLGGDGGEAAAKPAPGSSGGTLNIEDEYRLHETSKEPDVPLGSTWLSDFPQAWAETGGMGLAVRQAPLIIPLKATSTPVSIKQYPMSQEARLGIKPHIQRLLDQGILVPCQSPWNTPLLPVKKPGTNDYRPVQDLREVNKRVEDIHPTVPNPYNLLSGLPPSHQWYTVLDLKDAFFCLRLHPTSQPLFAFEWRDPEMGISGQLTWTRLPQGFKNSPTLFNEALHRDLADFRIQHPDLILLQYVDDLLLAATSEQDCQRGTRALLQTLGNLGYRASAKKAQICQKQVKYLGYLLKEGQRWLTEARKETVMGQPTPKTPRQLREFLGKAGFCRLFIPGFAEMAAPLYPLTKPGTLFNWGPDQQKAYQEIKQALLTAPALGLPDLTKPFELFVDEKQGYAKGVLTQKLGPWRRPVAYLSKKLDPVAAGWPPCLRMVAAIAVLTKDAGKLTMGQPLVILAPHAVEALVKQPPDRWLSNARMTHYQAMLLDTDRVQFGPVVALNPATLLPLPEKEAPHDCLEILAETHGTRPDLTDQPIPDADYTWYTDGSSFLQEGQRRAGAAVTTETEVIWARALPAGTSAQRAELIALTQALKMAEGKKLNVYTDSRYAFATAHVHGEIYRRRGWLTSEGREIKNKNEILALLKALFLPKRLSIIHCPGHQKGNSAEARGNRMADQAAREAAMKAVLETSTLLAGKRTADGSEFEKRTADGSEFESPKKKAKVE

SEQ ID NO: 1065 - protein, 2094 aa, synthetic construct
MPAAKRVKLDGGDKKYSIGLDIGTNSVGWAVITDEYKVPSKKFKVLGNTDRHSIKKNLIGALLFDSGETAEATRLKRTARRRYTRRKNRICYLQEIFSNEMAKVDDSFFHRLEESFLVEEDKKHERHPIFGNIVDEVAYHEKYPTIYHLRKKLVDSTDKADLRLIYLALAHMIKFRGHFLIEGDLNPDNSDVDKLFIQLVQTYNQLFEENPINASGVDAKAILSARLSKSRRLENLIAQLPGEKKNGLFGNLIALSLGLTPNFKSNFDLAEDAKLQLSKDTYDDDLDNLLAQIGDQYADLFLAAKNLSDAILLSDILRVNTEITKAPLSASMIKRYDEHHQDLTLLKALVRQQLPEKYKEIFFDQSKNGYAGYIDGGASQEEFYKFIKPILEKMDGTEELLVKLNREDLLRKQRTFDNGSIPHQIHLGELHAILRRQEDFYPFLKDNREKIEKILTFRIPYYVGPLARGNSRFAWMTRKSEETITPWNFEEVVDKGASAQSFIERMTNFDKNLPNEKVLPKHSLLYEYFTVYNELTKVKYVTEGMRKPAFLSGEQKKAIVDLLFKTNRKVTVKQLKEDYFKKIECFDSVEISGVEDRFNASLGTYHDLLKIIKDKDFLDNEENEDILEDIVLTLTLFEDREMIEERLKTYAHLFDDKVMKQLKRRRYTGWGRLSRKLINGIRDKQSGKTILDFLKSDGFANRNFMQLIHDDSLTFKEDIQKAQVSGQGDSLHEHIANLAGSPAIKKGILQTVKVVDELVKVMGRHKPENIVIEMARENQTTQKGQKNSRERMKRIEEGIKELGSQILKEHPVENTQLQNEKLYLYYLQNGRDMYVDQELDINRLSDYDVDHIVPQSFLKDDSIDNKVLTRSDKARGKSDNVPSEEVVKKMKNYWRQLLNAKLITQRKFDNLTKAERGGLSELDKAGFIKRQLVETRQITKHVAQILDSRMNTKYDENDKLIREVKVITLKSKLVSDFRKDFQFYKVREINNYHHAHDAYLNAVVGTALIKKYPKLESEFVYGDYKVYDVRKMIAKSEQEIGKATAKYFFYSNIMNFFKTEITLANGEIRKRPLIETNGETGEIVWDKGRDFATVRKVLSMPQVNIVKKTEVQTGGFSKESILPKRNSDKLIARKKDWDPKKYGGFDSPTVAYSVLVVAKVEKGKSKKLKSVKELLGITIMERSSFEKNPIDFLEAKGYKEVKKDLIIKLPKYSLFELENGRKRMLASAGELQKGNELALPSKYVNFLYLASHYEKLKGSPEDNEQKQLFVEQHKHYLDEIIEQISEFSKRVILADANLDKVLSAYNKHRDKPIREQAENIIHLFTLTNLGAPAAFKYFDTTIDRKRYTSTKEVLDATLIHQSITGLYETRIDLSQLGGDGGGGSGGSGGSGGTLNIEDEYRLHETSKEPDVPLGSTWLSDFPQAWAETGGMGLAVRQAPLIIPLKATSTPVSIKQYPMSQEARLGIKPHIQRLLDQGILVPCQSPWNTPLLPVKKPGTNDYRPVQDLREVNKRVEDIHPTVPNPYNLLSGLPPSHQWYTVLDLKDAFFCLRLHPTSQPLFAFEWRDPEMGISGQLTWTRLPQGFKNSPTLFNEALHRDLADFRIQHPDLILLQYVDDLLLAATSEQDCQRGTRALLQTLGNLGYRASAKKAQICQKQVKYLGYLLKEGQRWLTEARKETVMGQPTPKTPRQLREFLGKAGFCRLFIPGFAEMAAPLYPLTKPGTLFNWGPDQQKAYQEIKQALLTAPALGLPDLTKPFELFVDEKQGYAKGVLTQKLGPWRRPVAYLSKKLDPVAAGWPPCLRMVAAIAVLTKDAGKLTMGQPLVILAPHAVEALVKQPPDRWLSNARMTHYQAMLLDTDRVQFGPVVALNPATLLPLPEKEAPHDCLEILAETHGTRPDLTDQPIPDADYTWYTDGSSFLQEGQRRAGAAVTTETEVIWARALPAGTSAQRAELIALTQALKMAEGKKLNVYTDSRYAFATAHVHGEIYRRRGWLTSEGREIKNKNEILALLKALFLPKRLSIIHCPGHQKGNSAEARGNRMADQAAREAAMKAVLETSTLLAGKRTADGSEFEKRTADGSEFESPKKKAKVE

SEQ ID NO: 1066 - protein, 2096 aa, synthetic construct
MPAAKRVKLDGGDKKYSIGLDIGTNSVGWAVITDEYKVPSKKFKVLGNTDRHSIKKNLIGALLFDSGETAEATRLKRTARRRYTRRKNRICYLQEIFSNEMAKVDDSFFHRLEESFLVEEDKKHERHPIFGNIVDEVAYHEKYPTIYHLRKKLVDSTDKADLRLIYLALAHMIKFRGHFLIEGDLNPDNSDVDKLFIQLVQTYNQLFEENPINASGVDAKAILSARLSKSRRLENLIAQLPGEKKNGLFGNLIALSLGLTPNFKSNFDLAEDAKLQLSKDTYDDDLDNLLAQIGDQYADLFLAAKNLSDAILLSDILRVNTEITKAPLSASMIKRYDEHHQDLTLLKALVRQQLPEKYKEIFFDQSKNGYAGYIDGGASQEEFYKFIKPILEKMDGTEELLVKLNREDLLRKQRTFDNGSIPHQIHLGELHAILRRQEDFYPFLKDNREKIEKILTFRIPYYVGPLARGNSRFAWMTRKSEETITPWNFEEVVDKGASAQSFIERMTNFDKNLPNEKVLPKHSLLYEYFTVYNELTKVKYVTEGMRKPAFLSGEQKKAIVDLLFKTNRKVTVKQLKEDYFKKIECFDSVEISGVEDRFNASLGTYHDLLKIIKDKDFLDNEENEDILEDIVLTLTLFEDREMIEERLKTYAHLFDDKVMKQLKRRRYTGWGRLSRKLINGIRDKQSGKTILDFLKSDGFANRNFMQLIHDDSLTFKEDIQKAQVSGQGDSLHEHIANLAGSPAIKKGILQTVKVVDELVKVMGRHKPENIVIEMARENQTTQKGQKNSRERMKRIEEGIKELGSQILKEHPVENTQLQNEKLYLYYLQNGRDMYVDQELDINRLSDYDVDHIVPQSFLKDDSIDNKVLTRSDKARGKSDNVPSEEVVKKMKNYWRQLLNAKLITQRKFDNLTKAERGGLSELDKAGFIKRQLVETRQITKHVAQILDSRMNTKYDENDKLIREVKVITLKSKLVSDFRKDFQFYKVREINNYHHAHDAYLNAVVGTALIKKYPKLESEFVYGDYKVYDVRKMIAKSEQEIGKATAKYFFYSNIMNFFKTEITLANGEIRKRPLIETNGETGEIVWDKGRDFATVRKVLSMPQVNIVKKTEVQTGGFSKESILPKRNSDKLIARKKDWDPKKYGGFDSPTVAYSVLVVAKVEKGKSKKLKSVKELLGITIMERSSFEKNPIDFLEAKGYKEVKKDLIIKLPKYSLFELENGRKRMLASAGELQKGNELALPSKYVNFLYLASHYEKLKGSPEDNEQKQLFVEQHKHYLDEIIEQISEFSKRVILADANLDKVLSAYNKHRDKPIREQAENIIHLFTLTNLGAPAAFKYFDTTIDRKRYTSTKEVLDATLIHQSITGLYETRIDLSQLGGDGGPAPEAAAKGGSGGTLNIEDEYRLHETSKEPDVPLGSTWLSDFPQAWAETGGMGLAVRQAPLIIPLKATSTPVSIKQYPMSQEARLGIKPHIQRLLDQGILVPCQSPWNTPLLPVKKPGTNDYRPVQDLREVNKRVEDIHPTVPNPYNLLSGLPPSHQWYTVLDLKDAFFCLRLHPTSQPLFAFEWRDPEMGISGQLTWTRLPQGFKNSPTLFNEALHRDLADFRIQHPDLILLQYVDDLLLAATSEQDCQRGTRALLQTLGNLGYRASAKKAQICQKQVKYLGYLLKEGQRWLTEARKETVMGQPTPKTPRQLREFLGKAGFCRLFIPGFAEMAAPLYPLTKPGTLFNWGPDQQKAYQEIKQALLTAPALGLPDLTKPFELFVDEKQGYAKGVLTQKLGPWRRPVAYLSKKLDPVAAGWPPCLRMVAAIAVLTKDAGKLTMGQPLVILAPHAVEALVKQPPDRWLSNARMTHYQAMLLDTDRVQFGPVVALNPATLLPLPEKEAPHDCLEILAETHGTRPDLTDQPIPDADYTWYTDGSSFLQEGQRRAGAAVTTETEVIWARALPAGTSAQRAELIALTQALKMAEGKKLNVYTDSRYAFATAHVHGEIYRRRGWLTSEGREIKNKNEILALLKALFLPKRLSIIHCPGHQKGNSAEARGNRMADQAAREAAMKAVLETSTLLAGKRTADGSEFEKRTADGSEFESPKKKAKVE

SEQ ID NO: 1067 - protein, 2103 aa, synthetic construct
MPAAKRVKLDGGDKKYSIGLDIGTNSVGWAVITDEYKVPSKKFKVLGNTDRHSIKKNLIGALLFDSGETAEATRLKRTARRRYTRRKNRICYLQEIFSNEMAKVDDSFFHRLEESFLVEEDKKHERHPIFGNIVDEVAYHEKYPTIYHLRKKLVDSTDKADLRLIYLALAHMIKFRGHFLIEGDLNPDNSDVDKLFIQLVQTYNQLFEENPINASGVDAKAILSARLSKSRRLENLIAQLPGEKKNGLFGNLIALSLGLTPNFKSNFDLAEDAKLQLSKDTYDDDLDNLLAQIGDQYADLFLAAKNLSDAILLSDILRVNTEITKAPLSASMIKRYDEHHQDLTLLKALVRQQLPEKYKEIFFDQSKNGYAGYIDGGASQEEFYKFIKPILEKMDGTEELLVKLNREDLLRKQRTFDNGSIPHQIHLGELHAILRRQEDFYPFLKDNREKIEKILTFRIPYYVGPLARGNSRFAWMTRKSEETITPWNFEEVVDKGASAQSFIERMTNFDKNLPNEKVLPKHSLLYEYFTVYNELTKVKYVTEGMRKPAFLSGEQKKAIVDLLFKTNRKVTVKQLKEDYFKKIECFDSVEISGVEDRFNASLGTYHDLLKIIKDKDFLDNEENEDILEDIVLTLTLFEDREMIEERLKTYAHLFDDKVMKQLKRRRYTGWGRLSRKLINGIRDKQSGKTILDFLKSDGFANRNFMQLIHDDSLTFKEDIQKAQVSGQGDSLHEHIANLAGSPAIKKGILQTVKVVDELVKVMGRHKPENIVIEMARENQTTQKGQKNSRERMKRIEEGIKELGSQILKEHPVENTQLQNEKLYLYYLQNGRDMYVDQELDINRLSDYDVDHIVPQSFLKDDSIDNKVLTRSDKARGKSDNVPSEEVVKKMKNYWRQLLNAKLITQRKFDNLTKAERGGLSELDKAGFIKRQLVETRQITKHVAQILDSRMNTKYDENDKLIREVKVITLKSKLVSDFRKDFQFYKVREINNYHHAHDAYLNAVVGTALIKKYPKLESEFVYGDYKVYDVRKMIAKSEQEIGKATAKYFFYSNIMNFFKTEITLANGEIRKRPLIETNGETGEIVWDKGRDFATVRKVLSMPQVNIVKKTEVQTGGFSKESILPKRNSDKLIARKKDWDPKKYGGFDSPTVAYSVLVVAKVEKGKSKKLKSVKELLGITIMERSSFEKNPIDFLEAKGYKEVKKDLIIKLPKYSLFELENGRKRMLASAGELQKGNELALPSKYVNFLYLASHYEKLKGSPEDNEQKQLFVEQHKHYLDEIIEQISEFSKRVILADANLDKVLSAYNKHRDKPIREQAENIIHLFTLTNLGAPAAFKYFDTTIDRKRYTSTKEVLDATLIHQSITGLYETRIDLSQLGGDGGGSSGSSGSSGSSGSSGSSGGTLNIEDEYRLHETSKEPDVPLGSTWLSDFPQAWAETGGMGLAVRQAPLIIPLKATSTPVSIKQYPMSQEARLGIKPHIQRLLDQGILVPCQSPWNTPLLPVKKPGTNDYRPVQDLREVNKRVEDIHPTVPNPYNLLSGLPPSHQWYTVLDLKDAFFCLRLHPTSQPLFAFEWRDPEMGISGQLTWTRLPQGFKNSPTLFNEALHRDLADFRIQHPDLILLQYVDDLLLAATSEQDCQRGTRALLQTLGNLGYRASAKKAQICQKQVKYLGYLLKEGQRWLTEARKETVMGQPTPKTPRQLREFLGKAGFCRLFIPGFAEMAAPLYPLTKPGTLFNWGPDQQKAYQEIKQALLTAPALGLPDLTKPFELFVDEKQGYAKGVLTQKLGPWRRPVAYLSKKLDPVAAGWPPCLRMVAAIAVLTKDAGKLTMGQPLVILAPHAVEALVKQPPDRWLSNARMTHYQAMLLDTDRVQFGPVVALNPATLLPLPEKEAPHDCLEILAETHGTRPDLTDQPIPDADYTWYTDGSSFLQEGQRRAGAAVTTETEVIWARALPAGTSAQRAELIALTQALKMAEGKKLNVYTDSRYAFATAHVHGEIYRRRGWLTSEGREIKNKNEILALLKALFLPKRLSIIHCPGHQKGNSAEARGNRMADQAAREAAMKAVLETSTLLAGKRTADGSEFEKRTADGSEFESPKKKAKVE

SEQ ID NO: 1068 - protein, 2096 aa, synthetic construct
MPAAKRVKLDGGDKKYSIGLDIGTNSVGWAVITDEYKVPSKKFKVLGNTDRHSIKKNLIGALLFDSGETAEATRLKRTARRRYTRRKNRICYLQEIFSNEMAKVDDSFFHRLEESFLVEEDKKHERHPIFGNIVDEVAYHEKYPTIYHLRKKLVDSTDKADLRLIYLALAHMIKFRGHFLIEGDLNPDNSDVDKLFIQLVQTYNQLFEENPINASGVDAKAILSARLSKSRRLENLIAQLPGEKKNGLFGNLIALSLGLTPNFKSNFDLAEDAKLQLSKDTYDDDLDNLLAQIGDQYADLFLAAKNLSDAILLSDILRVNTEITKAPLSASMIKRYDEHHQDLTLLKALVRQQLPEKYKEIFFDQSKNGYAGYIDGGASQEEFYKFIKPILEKMDGTEELLVKLNREDLLRKQRTFDNGSIPHQIHLGELHAILRRQEDFYPFLKDNREKIEKILTFRIPYYVGPLARGNSRFAWMTRKSEETITPWNFEEVVDKGASAQSFIERMTNFDKNLPNEKVLPKHSLLYEYFTVYNELTKVKYVTEGMRKPAFLSGEQKKAIVDLLFKTNRKVTVKQLKEDYFKKIECFDSVEISGVEDRFNASLGTYHDLLKIIKDKDFLDNEENEDILEDIVLTLTLFEDREMIEERLKTYAHLFDDKVMKQLKRRRYTGWGRLSRKLINGIRDKQSGKTILDFLKSDGFANRNFMQLIHDDSLTFKEDIQKAQVSGQGDSLHEHIANLAGSPAIKKGILQTVKVVDELVKVMGRHKPENIVIEMARENQTTQKGQKNSRERMKRIEEGIKELGSQILKEHPVENTQLQNEKLYLYYLQNGRDMYVDQELDINRLSDYDVDHIVPQSFLKDDSIDNKVLTRSDKARGKSDNVPSEEVVKKMKNYWRQLLNAKLITQRKFDNLTKAERGGLSELDKAGFIKRQLVETRQITKHVAQILDSRMNTKYDENDKLIREVKVITLKSKLVSDFRKDFQFYKVREINNYHHAHDAYLNAVVGTALIKKYPKLESEFVYGDYKVYDVRKMIAKSEQEIGKATAKYFFYSNIMNFFKTEITLANGEIRKRPLIETNGETGEIVWDKGRDFATVRKVLSMPQVNIVKKTEVQTGGFSKESILPKRNSDKLIARKKDWDPKKYGGFDSPTVAYSVLVVAKVEKGKSKKLKSVKELLGITIMERSSFEKNPIDFLEAKGYKEVKKDLIIKLPKYSLFELENGRKRMLASAGELQKGNELALPSKYVNFLYLASHYEKLKGSPEDNEQKQLFVEQHKHYLDEIIEQISEFSKRVILADANLDKVLSAYNKHRDKPIREQAENIIHLFTLTNLGAPAAFKYFDTTIDRKRYTSTKEVLDATLIHQSITGLYETRIDLSQLGGDGGEAAAKGSSGGSGGTLNIEDEYRLHETSKEPDVPLGSTWLSDFPQAWAETGGMGLAVRQAPLIIPLKATSTPVSIKQYPMSQEARLGIKPHIQRLLDQGILVPCQSPWNTPLLPVKKPGTNDYRPVQDLREVNKRVEDIHPTVPNPYNLLSGLPPSHQWYTVLDLKDAFFCLRLHPTSQPLFAFEWRDPEMGISGQLTWTRLPQGFKNSPTLFNEALHRDLADFRIQHPDLILLQYVDDLLLAATSEQDCQRGTRALLQTLGNLGYRASAKKAQICQKQVKYLGYLLKEGQRWLTEARKETVMGQPTPKTPRQLREFLGKAGFCRLFIPGFAEMAAPLYPLTKPGTLFNWGPDQQKAYQEIKQALLTAPALGLPDLTKPFELFVDEKQGYAKGVLTQKLGPWRRPVAYLSKKLDPVAAGWPPCLRMVAAIAVLTKDAGKLTMGQPLVILAPHAVEALVKQPPDRWLSNARMTHYQAMLLDTDRVQFGPVVALNPATLLPLPEKEAPHDCLEILAETHGTRPDLTDQPIPDADYTWYTDGSSFLQEGQRRAGAAVTTETEVIWARALPAGTSAQRAELIALTQALKMAEGKKLNVYTDSRYAFATAHVHGEIYRRRGWLTSEGREIKNKNEILALLKALFLPKRLSIIHCPGHQKGNSAEARGNRMADQAAREAAMKAVLETSTLLAGKRTADGSEFEKRTADGSEFESPKKKAKVE

SEQ ID NO: 1069 - protein, 2096 aa, synthetic construct
MPAAKRVKLDGGDKKYSIGLDIGTNSVGWAVITDEYKVPSKKFKVLGNTDRHSIKKNLIGALLFDSGETAEATRLKRTARRRYTRRKNRICYLQEIFSNEMAKVDDSFFHRLEESFLVEEDKKHERHPIFGNIVDEVAYHEKYPTIYHLRKKLVDSTDKADLRLIYLALAHMIKFRGHFLIEGDLNPDNSDVDKLFIQLVQTYNQLFEENPINASGVDAKAILSARLSKSRRLENLIAQLPGEKKNGLFGNLIALSLGLTPNFKSNFDLAEDAKLQLSKDTYDDDLDNLLAQIGDQYADLFLAAKNLSDAILLSDILRVNTEITKAPLSASMIKRYDEHHQDLTLLKALVRQQLPEKYKEIFFDQSKNGYAGYIDGGASQEEFYKFIKPILEKMDGTEELLVKLNREDLLRKQRTFDNGSIPHQIHLGELHAILRRQEDFYPFLKDNREKIEKILTFRIPYYVGPLARGNSRFAWMTRKSEETITPWNFEEVVDKGASAQSFIERMTNFDKNLPNEKVLPKHSLLYEYFTVYNELTKVKYVTEGMRKPAFLSGEQKKAIVDLLFKTNRKVTVKQLKEDYFKKIECFDSVEISGVEDRFNASLGTYHDLLKIIKDKDFLDNEENEDILEDIVLTLTLFEDREMIEERLKTYAHLFDDKVMKQLKRRRYTGWGRLSRKLINGIRDKQSGKTILDFLKSDGFANRNFMQLIHDDSLTFKEDIQKAQVSGQGDSLHEHIANLAGSPAIKKGILQTVKVVDELVKVMGRHKPENIVIEMARENQTTQKGQKNSRERMKRIEEGIKELGSQILKEHPVENTQLQNEKLYLYYLQNGRDMYVDQELDINRLSDYDVDHIVPQSFLKDDSIDNKVLTRSDKARGKSDNVPSEEVVKKMKNYWRQLLNAKLITQRKFDNLTKAERGGLSELDKAGFIKRQLVETRQITKHVAQILDSRMNTKYDENDKLIREVKVITLKSKLVSDFRKDFQFYKVREINNYHHAHDAYLNAVVGTALIKKYPKLESEFVYGDYKVYDVRKMIAKSEQEIGKATAKYFFYSNIMNFFKTEITLANGEIRKRPLIETNGETGEIVWDKGRDFATVRKVLSMPQVNIVKKTEVQTGGFSKESILPKRNSDKLIARKKDWDPKKYGGFDSPTVAYSVLVVAKVEKGKSKKLKSVKELLGITIMERSSFEKNPIDFLEAKGYKEVKKDLIIKLPKYSLFELENGRKRMLASAGELQKGNELALPSKYVNFLYLASHYEKLKGSPEDNEQKQLFVEQHKHYLDEIIEQISEFSKRVILADANLDKVLSAYNKHRDKPIREQAENIIHLFTLTNLGAPAAFKYFDTTIDRKRYTSTKEVLDATLIHQSITGLYETRIDLSQLGGDGGPAPAPAPAPAPGGTLNIEDEYRLHETSKEPDVPLGSTWLSDFPQAWAETGGMGLAVRQAPLIIPLKATSTPVSIKQYPMSQEARLGIKPHIQRLLDQGILVPCQSPWNTPLLPVKKPGTNDYRPVQDLREVNKRVEDIHPTVPNPYNLLSGLPPSHQWYTVLDLKDAFFCLRLHPTSQPLFAFEWRDPEMGISGQLTWTRLPQGFKNSPTLFNEALHRDLADFRIQHPDLILLQYVDDLLLAATSEQDCQRGTRALLQTLGNLGYRASAKKAQICQKQVKYLGYLLKEGQRWLTEARKETVMGQPTPKTPRQLREFLGKAGFCRLFIPGFAEMAAPLYPLTKPGTLFNWGPDQQKAYQEIKQALLTAPALGLPDLTKPFELFVDEKQGYAKGVLTQKLGPWRRPVAYLSKKLDPVAAGWPPCLRMVAAIAVLTKDAGKLTMGQPLVILAPHAVEALVKQPPDRWLSNARMTHYQAMLLDTDRVQFGPVVALNPATLLPLPEKEAPHDCLEILAETHGTRPDLTDQPIPDADYTWYTDGSSFLQEGQRRAGAAVTTETEVIWARALPAGTSAQRAELIALTQALKMAEGKKLNVYTDSRYAFATAHVHGEIYRRRGWLTSEGREIKNKNEILALLKALFLPKRLSIIHCPGHQKGNSAEARGNRMADQAAREAAMKAVLETSTLLAGKRTADGSEFEKRTADGSEFESPKKKAKVE

SEQ ID NO: 1070 - protein, 2091 aa, synthetic construct
MPAAKRVKLDGGDKKYSIGLDIGTNSVGWAVITDEYKVPSKKFKVLGNTDRHSIKKNLIGALLFDSGETAEATRLKRTARRRYTRRKNRICYLQEIFSNEMAKVDDSFFHRLEESFLVEEDKKHERHPIFGNIVDEVAYHEKYPTIYHLRKKLVDSTDKADLRLIYLALAHMIKFRGHFLIEGDLNPDNSDVDKLFIQLVQTYNQLFEENPINASGVDAKAILSARLSKSRRLENLIAQLPGEKKNGLFGNLIALSLGLTPNFKSNFDLAEDAKLQLSKDTYDDDLDNLLAQIGDQYADLFLAAKNLSDAILLSDILRVNTEITKAPLSASMIKRYDEHHQDLTLLKALVRQQLPEKYKEIFFDQSKNGYAGYIDGGASQEEFYKFIKPILEKMDGTEELLVKLNREDLLRKQRTFDNGSIPHQIHLGELHAILRRQEDFYPFLKDNREKIEKILTFRIPYYVGPLARGNSRFAWMTRKSEETITPWNFEEVVDKGASAQSFIERMTNFDKNLPNEKVLPKHSLLYEYFTVYNELTKVKYVTEGMRKPAFLSGEQKKAIVDLLFKTNRKVTVKQLKEDYFKKIECFDSVEISGVEDRFNASLGTYHDLLKIIKDKDFLDNEENEDILEDIVLTLTLFEDREMIEERLKTYAHLFDDKVMKQLKRRRYTGWGRLSRKLINGIRDKQSGKTILDFLKSDGFANRNFMQLIHDDSLTFKEDIQKAQVSGQGDSLHEHIANLAGSPAIKKGILQTVKVVDELVKVMGRHKPENIVIEMARENQTTQKGQKNSRERMKRIEEGIKELGSQILKEHPVENTQLQNEKLYLYYLQNGRDMYVDQELDINRLSDYDVDHIVPQSFLKDDSIDNKVLTRSDKARGKSDNVPSEEVVKKMKNYWRQLLNAKLITQRKFDNLTKAERGGLSELDKAGFIKRQLVETRQITKHVAQILDSRMNTKYDENDKLIREVKVITLKSKLVSDFRKDFQFYKVREINNYHHAHDAYLNAVVGTALIKKYPKLESEFVYGDYKVYDVRKMIAKSEQEIGKATAKYFFYSNIMNFFKTEITLANGEIRKRPLIETNGETGEIVWDKGRDFATVRKVLSMPQVNIVKKTEVQTGGFSKESILPKRNSDKLIARKKDWDPKKYGGFDSPTVAYSVLVVAKVEKGKSKKLKSVKELLGITIMERSSFEKNPIDFLEAKGYKEVKKDLIIKLPKYSLFELENGRKRMLASAGELQKGNELALPSKYVNFLYLASHYEKLKGSPEDNEQKQLFVEQHKHYLDEIIEQISEFSKRVILADANLDKVLSAYNKHRDKPIREQAENIIHLFTLTNLGAPAAFKYFDTTIDRKRYTSTKEVLDATLIHQSITGLYETRIDLSQLGGDGGGSSGGGGGTLNIEDEYRLHETSKEPDVPLGSTWLSDFPQAWAETGGMGLAVRQAPLIIPLKATSTPVSIKQYPMSQEARLGIKPHIQRLLDQGILVPCQSPWNTPLLPVKKPGTNDYRPVQDLREVNKRVEDIHPTVPNPYNLLSGLPPSHQWYTVLDLKDAFFCLRLHPTSQPLFAFEWRDPEMGISGQLTWTRLPQGFKNSPTLFNEALHRDLADFRIQHPDLILLQYVDDLLLAATSEQDCQRGTRALLQTLGNLGYRASAKKAQICQKQVKYLGYLLKEGQRWLTEARKETVMGQPTPKTPRQLREFLGKAGFCRLFIPGFAEMAAPLYPLTKPGTLFNWGPDQQKAYQEIKQALLTAPALGLPDLTKPFELFVDEKQGYAKGVLTQKLGPWRRPVAYLSKKLDPVAAGWPPCLRMVAAIAVLTKDAGKLTMGQPLVILAPHAVEALVKQPPDRWLSNARMTHYQAMLLDTDRVQFGPVVALNPATLLPLPEKEAPHDCLEILAETHGTRPDLTDQPIPDADYTWYTDGSSFLQEGQRRAGAAVTTETEVIWARALPAGTSAQRAELIALTQALKMAEGKKLNVYTDSRYAFATAHVHGEIYRRRGWLTSEGREIKNKNEILALLKALFLPKRLSIIHCPGHQKGNSAEARGNRMADQAAREAAMKAVLETSTLLAGKRTADGSEFEKRTADGSEFESPKKKAKVE

SEQ ID NO: 1071 - protein, 2094 aa, synthetic construct
MPAAKRVKLDGGDKKYSIGLDIGTNSVGWAVITDEYKVPSKKFKVLGNTDRHSIKKNLIGALLFDSGETAEATRLKRTARRRYTRRKNRICYLQEIFSNEMAKVDDSFFHRLEESFLVEEDKKHERHPIFGNIVDEVAYHEKYPTIYHLRKKLVDSTDKADLRLIYLALAHMIKFRGHFLIEGDLNPDNSDVDKLFIQLVQTYNQLFEENPINASGVDAKAILSARLSKSRRLENLIAQLPGEKKNGLFGNLIALSLGLTPNFKSNFDLAEDAKLQLSKDTYDDDLDNLLAQIGDQYADLFLAAKNLSDAILLSDILRVNTEITKAPLSASMIKRYDEHHQDLTLLKALVRQQLPEKYKEIFFDQSKNGYAGYIDGGASQEEFYKFIKPILEKMDGTEELLVKLNREDLLRKQRTFDNGSIPHQIHLGELHAILRRQEDFYPFLKDNREKIEKILTFRIPYYVGPLARGNSRFAWMTRKSEETITPWNFEEVVDKGASAQSFIERMTNFDKNLPNEKVLPKHSLLYEYFTVYNELTKVKYVTEGMRKPAFLSGEQKKAIVDLLFKTNRKVTVKQLKEDYFKKIECFDSVEISGVEDRFNASLGTYHDLLKIIKDKDFLDNEENEDILEDIVLTLTLFEDREMIEERLKTYAHLFDDKVMKQLKRRRYTGWGRLSRKLINGIRDKQSGKTILDFLKSDGFANRNFMQLIHDDSLTFKEDIQKAQVSGQGDSLHEHIANLAGSPAIKKGILQTVKVVDELVKVMGRHKPENIVIEMARENQTTQKGQKNSRERMKRIEEGIKELGSQILKEHPVENTQLQNEKLYLYYLQNGRDMYVDQELDINRLSDYDVDHIVPQSFLKDDSIDNKVLTRSDKARGKSDNVPSEEVVKKMKNYWRQLLNAKLITQRKFDNLTKAERGGLSELDKAGFIKRQLVETRQITKHVAQILDSRMNTKYDENDKLIREVKVITLKSKLVSDFRKDFQFYKVREINNYHHAHDAYLNAVVGTALIKKYPKLESEFVYGDYKVYDVRKMIAKSEQEIGKATAKYFFYSNIMNFFKTEITLANGEIRKRPLIETNGETGEIVWDKGRDFATVRKVLSMPQVNIVKKTEVQTGGFSKESILPKRNSDKLIARKKDWDPKKYGGFDSPTVAYSVLVVAKVEKGKSKKLKSVKELLGITIMERSSFEKNPIDFLEAKGYKEVKKDLIIKLPKYSLFELENGRKRMLASAGELQKGNELALPSKYVNFLYLASHYEKLKGSPEDNEQKQLFVEQHKHYLDEIIEQISEFSKRVILADANLDKVLSAYNKHRDKPIREQAENIIHLFTLTNLGAPAAFKYFDTTIDRKRYTSTKEVLDATLIHQSITGLYETRIDLSQLGGDGGPAPGGSGGGGGTLNIEDEYRLHETSKEPDVPLGSTWLSDFPQAWAETGGMGLAVRQAPLIIPLKATSTPVSIKQYPMSQEARLGIKPHIQRLLDQGILVPCQSPWNTPLLPVKKPGTNDYRPVQDLREVNKRVEDIHPTVPNPYNLLSGLPPSHQWYTVLDLKDAFFCLRLHPTSQPLFAFEWRDPEMGISGQLTWTRLPQGFKNSPTLFNEALHRDLADFRIQHPDLILLQYVDDLLLAATSEQDCQRGTRALLQTLGNLGYRASAKKAQICQKQVKYLGYLLKEGQRWLTEARKETVMGQPTPKTPRQLREFLGKAGFCRLFIPGFAEMAAPLYPLTKPGTLFNWGPDQQKAYQEIKQALLTAPALGLPDLTKPFELFVDEKQGYAKGVLTQKLGPWRRPVAYLSKKLDPVAAGWPPCLRMVAAIAVLTKDAGKLTMGQPLVILAPHAVEALVKQPPDRWLSNARMTHYQAMLLDTDRVQFGPVVALNPATLLPLPEKEAPHDCLEILAETHGTRPDLTDQPIPDADYTWYTDGSSFLQEGQRRAGAAVTTETEVIWARALPAGTSAQRAELIALTQALKMAEGKKLNVYTDSRYAFATAHVHGEIYRRRGWLTSEGREIKNKNEILALLKALFLPKRLSIIHCPGHQKGNSAEARGNRMADQAAREAAMKAVLETSTLLAGKRTADGSEFEKRTADGSEFESPKKKAKVE

SEQ ID NO: 1072 - protein, 2097 aa, synthetic construct
MPAAKRVKLDGGDKKYSIGLDIGTNSVGWAVITDEYKVPSKKFKVLGNTDRHSIKKNLIGALLFDSGETAEATRLKRTARRRYTRRKNRICYLQEIFSNEMAKVDDSFFHRLEESFLVEEDKKHERHPIFGNIVDEVAYHEKYPTIYHLRKKLVDSTDKADLRLIYLALAHMIKFRGHFLIEGDLNPDNSDVDKLFIQLVQTYNQLFEENPINASGVDAKAILSARLSKSRRLENLIAQLPGEKKNGLFGNLIALSLGLTPNFKSNFDLAEDAKLQLSKDTYDDDLDNLLAQIGDQYADLFLAAKNLSDAILLSDILRVNTEITKAPLSASMIKRYDEHHQDLTLLKALVRQQLPEKYKEIFFDQSKNGYAGYIDGGASQEEFYKFIKPILEKMDGTEELLVKLNREDLLRKQRTFDNGSIPHQIHLGELHAILRRQEDFYPFLKDNREKIEKILTFRIPYYVGPLARGNSRFAWMTRKSEETITPWNFEEVVDKGASAQSFIERMTNFDKNLPNEKVLPKHSLLYEYFTVYNELTKVKYVTEGMRKPAFLSGEQKKAIVDLLFKTNRKVTVKQLKEDYFKKIECFDSVEISGVEDRFNASLGTYHDLLKIIKDKDFLDNEENEDILEDIVLTLTLFEDREMIEERLKTYAHLFDDKVMKQLKRRRYTGWGRLSRKLINGIRDKQSGKTILDFLKSDGFANRNFMQLIHDDSLTFKEDIQKAQVSGQGDSLHEHIANLAGSPAIKKGILQTVKVVDELVKVMGRHKPENIVIEMARENQTTQKGQKNSRERMKRIEEGIKELGSQILKEHPVENTQLQNEKLYLYYLQNGRDMYVDQELDINRLSDYDVDHIVPQSFLKDDSIDNKVLTRSDKARGKSDNVPSEEVVKKMKNYWRQLLNAKLITQRKFDNLTKAERGGLSELDKAGFIKRQLVETRQITKHVAQILDSRMNTKYDENDKLIREVKVITLKSKLVSDFRKDFQFYKVREINNYHHAHDAYLNAVVGTALIKKYPKLESEFVYGDYKVYDVRKMIAKSEQEIGKATAKYFFYSNIMNFFKTEITLANGEIRKRPLIETNGETGEIVWDKGRDFATVRKVLSMPQVNIVKKTEVQTGGFSKESILPKRNSDKLIARKKDWDPKKYGGFDSPTVAYSVLVVAKVEKGKSKKLKSVKELLGITIMERSSFEKNPIDFLEAKGYKEVKKDLIIKLPKYSLFELENGRKRMLASAGELQKGNELALPSKYVNFLYLASHYEKLKGSPEDNEQKQLFVEQHKHYLDEIIEQISEFSKRVILADANLDKVLSAYNKHRDKPIREQAENIIHLFTLTNLGAPAAFKYFDTTIDRKRYTSTKEVLDATLIHQSITGLYETRIDLSQLGGDGGGSAGSAAGSGEFGGTLNIEDEYRLHETSKEPDVPLGSTWLSDFPQAWAETGGMGLAVRQAPLIIPLKATSTPVSIKQYPMSQEARLGIKPHIQRLLDQGILVPCQSPWNTPLLPVKKPGTNDYRPVQDLREVNKRVEDIHPTVPNPYNLLSGLPPSHQWYTVLDLKDAFFCLRLHPTSQPLFAFEWRDPEMGISGQLTWTRLPQGFKNSPTLFNEALHRDLADFRIQHPDLILLQYVDDLLLAATSEQDCQRGTRALLQTLGNLGYRASAKKAQICQKQVKYLGYLLKEGQRWLTEARKETVMGQPTPKTPRQLREFLGKAGFCRLFIPGFAEMAAPLYPLTKPGTLFNWGPDQQKAYQEIKQALLTAPALGLPDLTKPFELFVDEKQGYAKGVLTQKLGPWRRPVAYLSKKLDPVAAGWPPCLRMVAAIAVLTKDAGKLTMGQPLVILAPHAVEALVKQPPDRWLSNARMTHYQAMLLDTDRVQFGPVVALNPATLLPLPEKEAPHDCLEILAETHGTRPDLTDQPIPDADYTWYTDGSSFLQEGQRRAGAAVTTETEVIWARALPAGTSAQRAELIALTQALKMAEGKKLNVYTDSRYAFATAHVHGEIYRRRGWLTSEGREIKNKNEILALLKALFLPKRLSIIHCPGHQKGNSAEARGNRMADQAAREAAMKAVLETSTLLAGKRTADGSEFEKRTADGSEFESPKKKAKVE

SEQ ID NO: 1073 - protein, 2094 aa, synthetic construct
MPAAKRVKLDGGDKKYSIGLDIGTNSVGWAVITDEYKVPSKKFKVLGNTDRHSIKKNLIGALLFDSGETAEATRLKRTARRRYTRRKNRICYLQEIFSNEMAKVDDSFFHRLEESFLVEEDKKHERHPIFGNIVDEVAYHEKYPTIYHLRKKLVDSTDKADLRLIYLALAHMIKFRGHFLIEGDLNPDNSDVDKLFIQLVQTYNQLFEENPINASGVDAKAILSARLSKSRRLENLIAQLPGEKKNGLFGNLIALSLGLTPNFKSNFDLAEDAKLQLSKDTYDDDLDNLLAQIGDQYADLFLAAKNLSDAILLSDILRVNTEITKAPLSASMIKRYDEHHQDLTLLKALVRQQLPEKYKEIFFDQSKNGYAGYIDGGASQEEFYKFIKPILEKMDGTEELLVKLNREDLLRKQRTFDNGSIPHQIHLGELHAILRRQEDFYPFLKDNREKIEKILTFRIPYYVGPLARGNSRFAWMTRKSEETITPWNFEEVVDKGASAQSFIERMTNFDKNLPNEKVLPKHSLLYEYFTVYNELTKVKYVTEGMRKPAFLSGEQKKAIVDLLFKTNRKVTVKQLKEDYFKKIECFDSVEISGVEDRFNASLGTYHDLLKIIKDKDFLDNEENEDILEDIVLTLTLFEDREMIEERLKTYAHLFDDKVMKQLKRRRYTGWGRLSRKLINGIRDKQSGKTILDFLKSDGFANRNFMQLIHDDSLTFKEDIQKAQVSGQGDSLHEHIANLAGSPAIKKGILQTVKVVDELVKVMGRHKPENIVIEMARENQTTQKGQKNSRERMKRIEEGIKELGSQILKEHPVENTQLQNEKLYLYYLQNGRDMYVDQELDINRLSDYDVDHIVPQSFLKDDSIDNKVLTRSDKARGKSDNVPSEEVVKKMKNYWRQLLNAKLITQRKFDNLTKAERGGLSELDKAGFIKRQLVETRQITKHVAQILDSRMNTKYDENDKLIREVKVITLKSKLVSDFRKDFQFYKVREINNYHHAHDAYLNAVVGTALIKKYPKLESEFVYGDYKVYDVRKMIAKSEQEIGKATAKYFFYSNIMNFFKTEITLANGEIRKRPLIETNGETGEIVWDKGRDFATVRKVLSMPQVNIVKKTEVQTGGFSKESILPKRNSDKLIARKKDWDPKKYGGFDSPTVAYSVLVVAKVEKGKSKKLKSVKELLGITIMERSSFEKNPIDFLEAKGYKEVKKDLIIKLPKYSLFELENGRKRMLASAGELQKGNELALPSKYVNFLYLASHYEKLKGSPEDNEQKQLFVEQHKHYLDEIIEQISEFSKRVILADANLDKVLSAYNKHRDKPIREQAENIIHLFTLTNLGAPAAFKYFDTTIDRKRYTSTKEVLDATLIHQSITGLYETRIDLSQLGGDGGGGGGSSPAPGGTLNIEDEYRLHETSKEPDVPLGSTWLSDFPQAWAETGGMGLAVRQAPLIIPLKATSTPVSIKQYPMSQEARLGIKPHIQRLLDQGILVPCQSPWNTPLLPVKKPGTNDYRPVQDLREVNKRVEDIHPTVPNPYNLLSGLPPSHQWYTVLDLKDAFFCLRLHPTSQPLFAFEWRDPEMGISGQLTWTRLPQGFKNSPTLFNEALHRDLADFRIQHPDLILLQYVDDLLLAATSEQDCQRGTRALLQTLGNLGYRASAKKAQICQKQVKYLGYLLKEGQRWLTEARKETVMGQPTPKTPRQLREFLGKAGFCRLFIPGFAEMAAPLYPLTKPGTLFNWGPDQQKAYQEIKQALLTAPALGLPDLTKPFELFVDEKQGYAKGVLTQKLGPWRRPVAYLSKKLDPVAAGWPPCLRMVAAIAVLTKDAGKLTMGQPLVILAPHAVEALVKQPPDRWLSNARMTHYQAMLLDTDRVQFGPVVALNPATLLPLPEKEAPHDCLEILAETHGTRPDLTDQPIPDADYTWYTDGSSFLQEGQRRAGAAVTTETEVIWARALPAGTSAQRAELIALTQALKMAEGKKLNVYTDSRYAFATAHVHGEIYRRRGWLTSEGREIKNKNEILALLKALFLPKRLSIIHCPGHQKGNSAEARGNRMADQAAREAAMKAVLETSTLLAGKRTADGSEFEKRTADGSEFESPKKKAKVE

SEQ ID NO: 1074 - protein, 2095 aa, synthetic construct
MPAAKRVKLDGGDKKYSIGLDIGTNSVGWAVITDEYKVPSKKFKVLGNTDRHSIKKNLIGALLFDSGETAEATRLKRTARRRYTRRKNRICYLQEIFSNEMAKVDDSFFHRLEESFLVEEDKKHERHPIFGNIVDEVAYHEKYPTIYHLRKKLVDSTDKADLRLIYLALAHMIKFRGHFLIEGDLNPDNSDVDKLFIQLVQTYNQLFEENPINASGVDAKAILSARLSKSRRLENLIAQLPGEKKNGLFGNLIALSLGLTPNFKSNFDLAEDAKLQLSKDTYDDDLDNLLAQIGDQYADLFLAAKNLSDAILLSDILRVNTEITKAPLSASMIKRYDEHHQDLTLLKALVRQQLPEKYKEIFFDQSKNGYAGYIDGGASQEEFYKFIKPILEKMDGTEELLVKLNREDLLRKQRTFDNGSIPHQIHLGELHAILRRQEDFYPFLKDNREKIEKILTFRIPYYVGPLARGNSRFAWMTRKSEETITPWNFEEVVDKGASAQSFIERMTNFDKNLPNEKVLPKHSLLYEYFTVYNELTKVKYVTEGMRKPAFLSGEQKKAIVDLLFKTNRKVTVKQLKEDYFKKIECFDSVEISGVEDRFNASLGTYHDLLKIIKDKDFLDNEENEDILEDIVLTLTLFEDREMIEERLKTYAHLFDDKVMKQLKRRRYTGWGRLSRKLINGIRDKQSGKTILDFLKSDGFANRNFMQLIHDDSLTFKEDIQKAQVSGQGDSLHEHIANLAGSPAIKKGILQTVKVVDELVKVMGRHKPENIVIEMARENQTTQKGQKNSRERMKRIEEGIKELGSQILKEHPVENTQLQNEKLYLYYLQNGRDMYVDQELDINRLSDYDVDHIVPQSFLKDDSIDNKVLTRSDKARGKSDNVPSEEVVKKMKNYWRQLLNAKLITQRKFDNLTKAERGGLSELDKAGFIKRQLVETRQITKHVAQILDSRMNTKYDENDKLIREVKVITLKSKLVSDFRKDFQFYKVREINNYHHAHDAYLNAVVGTALIKKYPKLESEFVYGDYKVYDVRKMIAKSEQEIGKATAKYFFYSNIMNFFKTEITLANGEIRKRPLIETNGETGEIVWDKGRDFATVRKVLSMPQVNIVKKTEVQTGGFSKESILPKRNSDKLIARKKDWDPKKYGGFDSPTVAYSVLVVAKVEKGKSKKLKSVKELLGITIMERSSFEKNPIDFLEAKGYKEVKKDLIIKLPKYSLFELENGRKRMLASAGELQKGNELALPSKYVNFLYLASHYEKLKGSPEDNEQKQLFVEQHKHYLDEIIEQISEFSKRVILADANLDKVLSAYNKHRDKPIREQAENIIHLFTLTNLGAPAAFKYFDTTIDRKRYTSTKEVLDATLIHQSITGLYETRIDLSQLGGDGGGGGGSGGGGSGGTLNIEDEYRLHETSKEPDVPLGSTWLSDFPQAWAETGGMGLAVRQAPLIIPLKATSTPVSIKQYPMSQEARLGIKPHIQRLLDQGILVPCQSPWNTPLLPVKKPGTNDYRPVQDLREVNKRVEDIHPTVPNPYNLLSGLPPSHQWYTVLDLKDAFFCLRLHPTSQPLFAFEWRDPEMGISGQLTWTRLPQGFKNSPTLFNEALHRDLADFRIQHPDLILLQYVDDLLLAATSEQDCQRGTRALLQTLGNLGYRASAKKAQICQKQVKYLGYLLKEGQRWLTEARKETVMGQPTPKTPRQLREFLGKAGFCRLFIPGFAEMAAPLYPLTKPGTLFNWGPDQQKAYQEIKQALLTAPALGLPDLTKPFELFVDEKQGYAKGVLTQKLGPWRRPVAYLSKKLDPVAAGWPPCLRMVAAIAVLTKDAGKLTMGQPLVILAPHAVEALVKQPPDRWLSNARMTHYQAMLLDTDRVQFGPVVALNPATLLPLPEKEAPHDCLEILAETHGTRPDLTDQPIPDADYTWYTDGSSFLQEGQRRAGAAVTTETEVIWARALPAGTSAQRAELIALTQALKMAEGKKLNVYTDSRYAFATAHVHGEIYRRRGWLTSEGREIKNKNEILALLKALFLPKRLSIIHCPGHQKGNSAEARGNRMADQAAREAAMKAVLETSTLLAGKRTADGSEFEKRTADGSEFESPKKKAKVE

SEQ ID NO: 1075 - protein, 2096 aa, synthetic construct
MPAAKRVKLDGGDKKYSIGLDIGTNSVGWAVITDEYKVPSKKFKVLGNTDRHSIKKNLIGALLFDSGETAEATRLKRTARRRYTRRKNRICYLQEIFSNEMAKVDDSFFHRLEESFLVEEDKKHERHPIFGNIVDEVAYHEKYPTIYHLRKKLVDSTDKADLRLIYLALAHMIKFRGHFLIEGDLNPDNSDVDKLFIQLVQTYNQLFEENPINASGVDAKAILSARLSKSRRLENLIAQLPGEKKNGLFGNLIALSLGLTPNFKSNFDLAEDAKLQLSKDTYDDDLDNLLAQIGDQYADLFLAAKNLSDAILLSDILRVNTEITKAPLSASMIKRYDEHHQDLTLLKALVRQQLPEKYKEIFFDQSKNGYAGYIDGGASQEEFYKFIKPILEKMDGTEELLVKLNREDLLRKQRTFDNGSIPHQIHLGELHAILRRQEDFYPFLKDNREKIEKILTFRIPYYVGPLARGNSRFAWMTRKSEETITPWNFEEVVDKGASAQSFIERMTNFDKNLPNEKVLPKHSLLYEYFTVYNELTKVKYVTEGMRKPAFLSGEQKKAIVDLLFKTNRKVTVKQLKEDYFKKIECFDSVEISGVEDRFNASLGTYHDLLKIIKDKDFLDNEENEDILEDIVLTLTLFEDREMIEERLKTYAHLFDDKVMKQLKRRRYTGWGRLSRKLINGIRDKQSGKTILDFLKSDGFANRNFMQLIHDDSLTFKEDIQKAQVSGQGDSLHEHIANLAGSPAIKKGILQTVKVVDELVKVMGRHKPENIVIEMARENQTTQKGQKNSRERMKRIEEGIKELGSQILKEHPVENTQLQNEKLYLYYLQNGRDMYVDQELDINRLSDYDVDHIVPQSFLKDDSIDNKVLTRSDKARGKSDNVPSEEVVKKMKNYWRQLLNAKLITQRKFDNLTKAERGGLSELDKAGFIKRQLVETRQITKHVAQILDSRMNTKYDENDKLIREVKVITLKSKLVSDFRKDFQFYKVREINNYHHAHDAYLNAVVGTALIKKYPKLESEFVYGDYKVYDVRKMIAKSEQEIGKATAKYFFYSNIMNFFKTEITLANGEIRKRPLIETNGETGEIVWDKGRDFATVRKVLSMPQVNIVKKTEVQTGGFSKESILPKRNSDKLIARKKDWDPKKYGGFDSPTVAYSVLVVAKVEKGKSKKLKSVKELLGITIMERSSFEKNPIDFLEAKGYKEVKKDLIIKLPKYSLFELENGRKRMLASAGELQKGNELALPSKYVNFLYLASHYEKLKGSPEDNEQKQLFVEQHKHYLDEIIEQISEFSKRVILADANLDKVLSAYNKHRDKPIREQAENIIHLFTLTNLGAPAAFKYFDTTIDRKRYTSTKEVLDATLIHQSITGLYETRIDLSQLGGDGGGSSEAAAKGGSGGTLNIEDEYRLHETSKEPDVPLGSTWLSDFPQAWAETGGMGLAVRQAPLIIPLKATSTPVSIKQYPMSQEARLGIKPHIQRLLDQGILVPCQSPWNTPLLPVKKPGTNDYRPVQDLREVNKRVEDIHPTVPNPYNLLSGLPPSHQWYTVLDLKDAFFCLRLHPTSQPLFAFEWRDPEMGISGQLTWTRLPQGFKNSPTLFNEALHRDLADFRIQHPDLILLQYVDDLLLAATSEQDCQRGTRALLQTLGNLGYRASAKKAQICQKQVKYLGYLLKEGQRWLTEARKETVMGQPTPKTPRQLREFLGKAGFCRLFIPGFAEMAAPLYPLTKPGTLFNWGPDQQKAYQEIKQALLTAPALGLPDLTKPFELFVDEKQGYAKGVLTQKLGPWRRPVAYLSKKLDPVAAGWPPCLRMVAAIAVLTKDAGKLTMGQPLVILAPHAVEALVKQPPDRWLSNARMTHYQAMLLDTDRVQFGPVVALNPATLLPLPEKEAPHDCLEILAETHGTRPDLTDQPIPDADYTWYTDGSSFLQEGQRRAGAAVTTETEVIWARALPAGTSAQRAELIALTQALKMAEGKKLNVYTDSRYAFATAHVHGEIYRRRGWLTSEGREIKNKNEILALLKALFLPKRLSIIHCPGHQKGNSAEARGNRMADQAAREAAMKAVLETSTLLAGKRTADGSEFEKRTADGSEFESPKKKAKVE

SEQ ID NO: 1076 - protein, 2096 aa, synthetic construct
MPAAKRVKLDGGDKKYSIGLDIGTNSVGWAVITDEYKVPSKKFKVLGNTDRHSIKKNLIGALLFDSGETAEATRLKRTARRRYTRRKNRICYLQEIFSNEMAKVDDSFFHRLEESFLVEEDKKHERHPIFGNIVDEVAYHEKYPTIYHLRKKLVDSTDKADLRLIYLALAHMIKFRGHFLIEGDLNPDNSDVDKLFIQLVQTYNQLFEENPINASGVDAKAILSARLSKSRRLENLIAQLPGEKKNGLFGNLIALSLGLTPNFKSNFDLAEDAKLQLSKDTYDDDLDNLLAQIGDQYADLFLAAKNLSDAILLSDILRVNTEITKAPLSASMIKRYDEHHQDLTLLKALVRQQLPEKYKEIFFDQSKNGYAGYIDGGASQEEFYKFIKPILEKMDGTEELLVKLNREDLLRKQRTFDNGSIPHQIHLGELHAILRRQEDFYPFLKDNREKIEKILTFRIPYYVGPLARGNSRFAWMTRKSEETITPWNFEEVVDKGASAQSFIERMTNFDKNLPNEKVLPKHSLLYEYFTVYNELTKVKYVTEGMRKPAFLSGEQKKAIVDLLFKTNRKVTVKQLKEDYFKKIECFDSVEISGVEDRFNASLGTYHDLLKIIKDKDFLDNEENEDILEDIVLTLTLFEDREMIEERLKTYAHLFDDKVMKQLKRRRYTGWGRLSRKLINGIRDKQSGKTILDFLKSDGFANRNFMQLIHDDSLTFKEDIQKAQVSGQGDSLHEHIANLAGSPAIKKGILQTVKVVDELVKVMGRHKPENIVIEMARENQTTQKGQKNSRERMKRIEEGIKELGSQILKEHPVENTQLQNEKLYLYYLQNGRDMYVDQELDINRLSDYDVDHIVPQSFLKDDSIDNKVLTRSDKARGKSDNVPSEEVVKKMKNYWRQLLNAKLITQRKFDNLTKAERGGLSELDKAGFIKRQLVETRQITKHVAQILDSRMNTKYDENDKLIREVKVITLKSKLVSDFRKDFQFYKVREINNYHHAHDAYLNAVVGTALIKKYPKLESEFVYGDYKVYDVRKMIAKSEQEIGKATAKYFFYSNIMNFFKTEITLANGEIRKRPLIETNGETGEIVWDKGRDFATVRKVLSMPQVNIVKKTEVQTGGFSKESILPKRNSDKLIARKKDWDPKKYGGFDSPTVAYSVLVVAKVEKGKSKKLKSVKELLGITIMERSSFEKNPIDFLEAKGYKEVKKDLIIKLPKYSLFELENGRKRMLASAGELQKGNELALPSKYVNFLYLASHYEKLKGSPEDNEQKQLFVEQHKHYLDEIIEQISEFSKRVILADANLDKVLSAYNKHRDKPIREQAENIIHLFTLTNLGAPAAFKYFDTTIDRKRYTSTKEVLDATLIHQSITGLYETRIDLSQLGGDGGGGGPAPEAAAKGGTLNIEDEYRLHETSKEPDVPLGSTWLSDFPQAWAETGGMGLAVRQAPLIIPLKATSTPVSIKQYPMSQEARLGIKPHIQRLLDQGILVPCQSPWNTPLLPVKKPGTNDYRPVQDLREVNKRVEDIHPTVPNPYNLLSGLPPSHQWYTVLDLKDAFFCLRLHPTSQPLFAFEWRDPEMGISGQLTWTRLPQGFKNSPTLFNEALHRDLADFRIQHPDLILLQYVDDLLLAATSEQDCQRGTRALLQTLGNLGYRASAKKAQICQKQVKYLGYLLKEGQRWLTEARKETVMGQPTPKTPRQLREFLGKAGFCRLFIPGFAEMAAPLYPLTKPGTLFNWGPDQQKAYQEIKQALLTAPALGLPDLTKPFELFVDEKQGYAKGVLTQKLGPWRRPVAYLSKKLDPVAAGWPPCLRMVAAIAVLTKDAGKLTMGQPLVILAPHAVEALVKQPPDRWLSNARMTHYQAMLLDTDRVQFGPVVALNPATLLPLPEKEAPHDCLEILAETHGTRPDLTDQPIPDADYTWYTDGSSFLQEGQRRAGAAVTTETEVIWARALPAGTSAQRAELIALTQALKMAEGKKLNVYTDSRYAFATAHVHGEIYRRRGWLTSEGREIKNKNEILALLKALFLPKRLSIIHCPGHQKGNSAEARGNRMADQAAREAAMKAVLETSTLLAGKRTADGSEFEKRTADGSEFESPKKKAKVE

SEQ ID NO: 1077 - protein, 2097 aa, synthetic construct
MPAAKRVKLDGGDKKYSIGLDIGTNSVGWAVITDEYKVPSKKFKVLGNTDRHSIKKNLIGALLFDSGETAEATRLKRTARRRYTRRKNRICYLQEIFSNEMAKVDDSFFHRLEESFLVEEDKKHERHPIFGNIVDEVAYHEKYPTIYHLRKKLVDSTDKADLRLIYLALAHMIKFRGHFLIEGDLNPDNSDVDKLFIQLVQTYNQLFEENPINASGVDAKAILSARLSKSRRLENLIAQLPGEKKNGLFGNLIALSLGLTPNFKSNFDLAEDAKLQLSKDTYDDDLDNLLAQIGDQYADLFLAAKNLSDAILLSDILRVNTEITKAPLSASMIKRYDEHHQDLTLLKALVRQQLPEKYKEIFFDQSKNGYAGYIDGGASQEEFYKFIKPILEKMDGTEELLVKLNREDLLRKQRTFDNGSIPHQIHLGELHAILRRQEDFYPFLKDNREKIEKILTFRIPYYVGPLARGNSRFAWMTRKSEETITPWNFEEVVDKGASAQSFIERMTNFDKNLPNEKVLPKHSLLYEYFTVYNELTKVKYVTEGMRKPAFLSGEQKKAIVDLLFKTNRKVTVKQLKEDYFKKIECFDSVEISGVEDRFNASLGTYHDLLKIIKDKDFLDNEENEDILEDIVLTLTLFEDREMIEERLKTYAHLFDDKVMKQLKRRRYTGWGRLSRKLINGIRDKQSGKTILDFLKSDGFANRNFMQLIHDDSLTFKEDIQKAQVSGQGDSLHEHIANLAGSPAIKKGILQTVKVVDELVKVMGRHKPENIVIEMARENQTTQKGQKNSRERMKRIEEGIKELGSQILKEHPVENTQLQNEKLYLYYLQNGRDMYVDQELDINRLSDYDVDHIVPQSFLKDDSIDNKVLTRSDKARGKSDNVPSEEVVKKMKNYWRQLLNAKLITQRKFDNLTKAERGGLSELDKAGFIKRQLVETRQITKHVAQILDSRMNTKYDENDKLIREVKVITLKSKLVSDFRKDFQFYKVREINNYHHAHDAYLNAVVGTALIKKYPKLESEFVYGDYKVYDVRKMIAKSEQEIGKATAKYFFYSNIMNFFKTEITLANGEIRKRPLIETNGETGEIVWDKGRDFATVRKVLSMPQVNIVKKTEVQTGGFSKESILPKRNSDKLIARKKDWDPKKYGGFDSPTVAYSVLVVAKVEKGKSKKLKSVKELLGITIMERSSFEKNPIDFLEAKGYKEVKKDLIIKLPKYSLFELENGRKRMLASAGELQKGNELALPSKYVNFLYLASHYEKLKGSPEDNEQKQLFVEQHKHYLDEIIEQISEFSKRVILADANLDKVLSAYNKHRDKPIREQAENIIHLFTLTNLGAPAAFKYFDTTIDRKRYTSTKEVLDATLIHQSITGLYETRIDLSQLGGDGGGSSGSSGSSGSSGGTLNIEDEYRLHETSKEPDVPLGSTWLSDFPQAWAETGGMGLAVRQAPLIIPLKATSTPVSIKQYPMSQEARLGIKPHIQRLLDQGILVPCQSPWNTPLLPVKKPGTNDYRPVQDLREVNKRVEDIHPTVPNPYNLLSGLPPSHQWYTVLDLKDAFFCLRLHPTSQPLFAFEWRDPEMGISGQLTWTRLPQGFKNSPTLFNEALHRDLADFRIQHPDLILLQYVDDLLLAATSEQDCQRGTRALLQTLGNLGYRASAKKAQICQKQVKYLGYLLKEGQRWLTEARKETVMGQPTPKTPRQLREFLGKAGFCRLFIPGFAEMAAPLYPLTKPGTLFNWGPDQQKAYQEIKQALLTAPALGLPDLTKPFELFVDEKQGYAKGVLTQKLGPWRRPVAYLSKKLDPVAAGWPPCLRMVAAIAVLTKDAGKLTMGQPLVILAPHAVEALVKQPPDRWLSNARMTHYQAMLLDTDRVQFGPVVALNPATLLPLPEKEAPHDCLEILAETHGTRPDLTDQPIPDADYTWYTDGSSFLQEGQRRAGAAVTTETEVIWARALPAGTSAQRAELIALTQALKMAEGKKLNVYTDSRYAFATAHVHGEIYRRRGWLTSEGREIKNKNEILALLKALFLPKRLSIIHCPGHQKGNSAEARGNRMADQAAREAAMKAVLETSTLLAGKRTADGSEFEKRTADGSEFESPKKKAKVE

SEQ ID NO: 1078 - protein, 2093 aa, synthetic construct
MPAAKRVKLDGGDKKYSIGLDIGTNSVGWAVITDEYKVPSKKFKVLGNTDRHSIKKNLIGALLFDSGETAEATRLKRTARRRYTRRKNRICYLQEIFSNEMAKVDDSFFHRLEESFLVEEDKKHERHPIFGNIVDEVAYHEKYPTIYHLRKKLVDSTDKADLRLIYLALAHMIKFRGHFLIEGDLNPDNSDVDKLFIQLVQTYNQLFEENPINASGVDAKAILSARLSKSRRLENLIAQLPGEKKNGLFGNLIALSLGLTPNFKSNFDLAEDAKLQLSKDTYDDDLDNLLAQIGDQYADLFLAAKNLSDAILLSDILRVNTEITKAPLSASMIKRYDEHHQDLTLLKALVRQQLPEKYKEIFFDQSKNGYAGYIDGGASQEEFYKFIKPILEKMDGTEELLVKLNREDLLRKQRTFDNGSIPHQIHLGELHAILRRQEDFYPFLKDNREKIEKILTFRIPYYVGPLARGNSRFAWMTRKSEETITPWNFEEVVDKGASAQSFIERMTNFDKNLPNEKVLPKHSLLYEYFTVYNELTKVKYVTEGMRKPAFLSGEQKKAIVDLLFKTNRKVTVKQLKEDYFKKIECFDSVEISGVEDRFNASLGTYHDLLKIIKDKDFLDNEENEDILEDIVLTLTLFEDREMIEERLKTYAHLFDDKVMKQLKRRRYTGWGRLSRKLINGIRDKQSGKTILDFLKSDGFANRNFMQLIHDDSLTFKEDIQKAQVSGQGDSLHEHIANLAGSPAIKKGILQTVKVVDELVKVMGRHKPENIVIEMARENQTTQKGQKNSRERMKRIEEGIKELGSQILKEHPVENTQLQNEKLYLYYLQNGRDMYVDQELDINRLSDYDVDHIVPQSFLKDDSIDNKVLTRSDKARGKSDNVPSEEVVKKMKNYWRQLLNAKLITQRKFDNLTKAERGGLSELDKAGFIKRQLVETRQITKHVAQILDSRMNTKYDENDKLIREVKVITLKSKLVSDFRKDFQFYKVREINNYHHAHDAYLNAVVGTALIKKYPKLESEFVYGDYKVYDVRKMIAKSEQEIGKATAKYFFYSNIMNFFKTEITLANGEIRKRPLIETNGETGEIVWDKGRDFATVRKVLSMPQVNIVKKTEVQTGGFSKESILPKRNSDKLIARKKDWDPKKYGGFDSPTVAYSVLVVAKVEKGKSKKLKSVKELLGITIMERSSFEKNPIDFLEAKGYKEVKKDLIIKLPKYSLFELENGRKRMLASAGELQKGNELALPSKYVNFLYLASHYEKLKGSPEDNEQKQLFVEQHKHYLDEIIEQISEFSKRVILADANLDKVLSAYNKHRDKPIREQAENIIHLFTLTNLGAPAAFKYFDTTIDRKRYTSTKEVLDATLIHQSITGLYETRIDLSQLGGDGGEAAAKGSSGGTLNIEDEYRLHETSKEPDVPLGSTWLSDFPQAWAETGGMGLAVRQAPLIIPLKATSTPVSIKQYPMSQEARLGIKPHIQRLLDQGILVPCQSPWNTPLLPVKKPGTNDYRPVQDLREVNKRVEDIHPTVPNPYNLLSGLPPSHQWYTVLDLKDAFFCLRLHPTSQPLFAFEWRDPEMGISGQLTWTRLPQGFKNSPTLFNEALHRDLADFRIQHPDLILLQYVDDLLLAATSEQDCQRGTRALLQTLGNLGYRASAKKAQICQKQVKYLGYLLKEGQRWLTEARKETVMGQPTPKTPRQLREFLGKAGFCRLFIPGFAEMAAPLYPLTKPGTLFNWGPDQQKAYQEIKQALLTAPALGLPDLTKPFELFVDEKQGYAKGVLTQKLGPWRRPVAYLSKKLDPVAAGWPPCLRMVAAIAVLTKDAGKLTMGQPLVILAPHAVEALVKQPPDRWLSNARMTHYQAMLLDTDRVQFGPVVALNPATLLPLPEKEAPHDCLEILAETHGTRPDLTDQPIPDADYTWYTDGSSFLQEGQRRAGAAVTTETEVIWARALPAGTSAQRAELIALTQALKMAEGKKLNVYTDSRYAFATAHVHGEIYRRRGWLTSEGREIKNKNEILALLKALFLPKRLSIIHCPGHQKGNSAEARGNRMADQAAREAAMKAVLETSTLLAGKRTADGSEFEKRTADGSEFESPKKKAKVE

SEQ ID NO: 1079 - protein, 2100 aa, synthetic construct
MPAAKRVKLDGGDKKYSIGLDIGTNSVGWAVITDEYKVPSKKFKVLGNTDRHSIKKNLIGALLFDSGETAEATRLKRTARRRYTRRKNRICYLQEIFSNEMAKVDDSFFHRLEESFLVEEDKKHERHPIFGNIVDEVAYHEKYPTIYHLRKKLVDSTDKADLRLIYLALAHMIKFRGHFLIEGDLNPDNSDVDKLFIQLVQTYNQLFEENPINASGVDAKAILSARLSKSRRLENLIAQLPGEKKNGLFGNLIALSLGLTPNFKSNFDLAEDAKLQLSKDTYDDDLDNLLAQIGDQYADLFLAAKNLSDAILLSDILRVNTEITKAPLSASMIKRYDEHHQDLTLLKALVRQQLPEKYKEIFFDQSKNGYAGYIDGGASQEEFYKFIKPILEKMDGTEELLVKLNREDLLRKQRTFDNGSIPHQIHLGELHAILRRQEDFYPFLKDNREKIEKILTFRIPYYVGPLARGNSRFAWMTRKSEETITPWNFEEVVDKGASAQSFIERMTNFDKNLPNEKVLPKHSLLYEYFTVYNELTKVKYVTEGMRKPAFLSGEQKKAIVDLLFKTNRKVTVKQLKEDYFKKIECFDSVEISGVEDRFNASLGTYHDLLKIIKDKDFLDNEENEDILEDIVLTLTLFEDREMIEERLKTYAHLFDDKVMKQLKRRRYTGWGRLSRKLINGIRDKQSGKTILDFLKSDGFANRNFMQLIHDDSLTFKEDIQKAQVSGQGDSLHEHIANLAGSPAIKKGILQTVKVVDELVKVMGRHKPENIVIEMARENQTTQKGQKNSRERMKRIEEGIKELGSQILKEHPVENTQLQNEKLYLYYLQNGRDMYVDQELDINRLSDYDVDHIVPQSFLKDDSIDNKVLTRSDKARGKSDNVPSEEVVKKMKNYWRQLLNAKLITQRKFDNLTKAERGGLSELDKAGFIKRQLVETRQITKHVAQILDSRMNTKYDENDKLIREVKVITLKSKLVSDFRKDFQFYKVREINNYHHAHDAYLNAVVGTALIKKYPKLESEFVYGDYKVYDVRKMIAKSEQEIGKATAKYFFYSNIMNFFKTEITLANGEIRKRPLIETNGETGEIVWDKGRDFATVRKVLSMPQVNIVKKTEVQTGGFSKESILPKRNSDKLIARKKDWDPKKYGGFDSPTVAYSVLVVAKVEKGKSKKLKSVKELLGITIMERSSFEKNPIDFLEAKGYKEVKKDLIIKLPKYSLFELENGRKRMLASAGELQKGNELALPSKYVNFLYLASHYEKLKGSPEDNEQKQLFVEQHKHYLDEIIEQISEFSKRVILADANLDKVLSAYNKHRDKPIREQAENIIHLFTLTNLGAPAAFKYFDTTIDRKRYTSTKEVLDATLIHQSITGLYETRIDLSQLGGDGGGGGGSEAAAKGGGGSGGTLNIEDEYRLHETSKEPDVPLGSTWLSDFPQAWAETGGMGLAVRQAPLIIPLKATSTPVSIKQYPMSQEARLGIKPHIQRLLDQGILVPCQSPWNTPLLPVKKPGTNDYRPVQDLREVNKRVEDIHPTVPNPYNLLSGLPPSHQWYTVLDLKDAFFCLRLHPTSQPLFAFEWRDPEMGISGQLTWTRLPQGFKNSPTLFNEALHRDLADFRIQHPDLILLQYVDDLLLAATSEQDCQRGTRALLQTLGNLGYRASAKKAQICQKQVKYLGYLLKEGQRWLTEARKETVMGQPTPKTPRQLREFLGKAGFCRLFIPGFAEMAAPLYPLTKPGTLFNWGPDQQKAYQEIKQALLTAPALGLPDLTKPFELFVDEKQGYAKGVLTQKLGPWRRPVAYLSKKLDPVAAGWPPCLRMVAAIAVLTKDAGKLTMGQPLVILAPHAVEALVKQPPDRWLSNARMTHYQAMLLDTDRVQFGPVVALNPATLLPLPEKEAPHDCLEILAETHGTRPDLTDQPIPDADYTWYTDGSSFLQEGQRRAGAAVTTETEVIWARALPAGTSAQRAELIALTQALKMAEGKKLNVYTDSRYAFATAHVHGEIYRRRGWLTSEGREIKNKNEILALLKALFLPKRLSIIHCPGHQKGNSAEARGNRMADQAAREAAMKAVLETSTLLAGKRTADGSEFEKRTADGSEFESPKKKAKVE

SEQ ID NO: 1080 - protein, 2088 aa, synthetic construct
MPAAKRVKLDGGDKKYSIGLDIGTNSVGWAVITDEYKVPSKKFKVLGNTDRHSIKKNLIGALLFDSGETAEATRLKRTARRRYTRRKNRICYLQEIFSNEMAKVDDSFFHRLEESFLVEEDKKHERHPIFGNIVDEVAYHEKYPTIYHLRKKLVDSTDKADLRLIYLALAHMIKFRGHFLIEGDLNPDNSDVDKLFIQLVQTYNQLFEENPINASGVDAKAILSARLSKSRRLENLIAQLPGEKKNGLFGNLIALSLGLTPNFKSNFDLAEDAKLQLSKDTYDDDLDNLLAQIGDQYADLFLAAKNLSDAILLSDILRVNTEITKAPLSASMIKRYDEHHQDLTLLKALVRQQLPEKYKEIFFDQSKNGYAGYIDGGASQEEFYKFIKPILEKMDGTEELLVKLNREDLLRKQRTFDNGSIPHQIHLGELHAILRRQEDFYPFLKDNREKIEKILTFRIPYYVGPLARGNSRFAWMTRKSEETITPWNFEEVVDKGASAQSFIERMTNFDKNLPNEKVLPKHSLLYEYFTVYNELTKVKYVTEGMRKPAFLSGEQKKAIVDLLFKTNRKVTVKQLKEDYFKKIECFDSVEISGVEDRFNASLGTYHDLLKIIKDKDFLDNEENEDILEDIVLTLTLFEDREMIEERLKTYAHLFDDKVMKQLKRRRYTGWGRLSRKLINGIRDKQSGKTILDFLKSDGFANRNFMQLIHDDSLTFKEDIQKAQVSGQGDSLHEHIANLAGSPAIKKGILQTVKVVDELVKVMGRHKPENIVIEMARENQTTQKGQKNSRERMKRIEEGIKELGSQILKEHPVENTQLQNEKLYLYYLQNGRDMYVDQELDINRLSDYDVDHIVPQSFLKDDSIDNKVLTRSDKARGKSDNVPSEEVVKKMKNYWRQLLNAKLITQRKFDNLTKAERGGLSELDKAGFIKRQLVETRQITKHVAQILDSRMNTKYDENDKLIREVKVITLKSKLVSDFRKDFQFYKVREINNYHHAHDAYLNAVVGTALIKKYPKLESEFVYGDYKVYDVRKMIAKSEQEIGKATAKYFFYSNIMNFFKTEITLANGEIRKRPLIETNGETGEIVWDKGRDFATVRKVLSMPQVNIVKKTEVQTGGFSKESILPKRNSDKLIARKKDWDPKKYGGFDSPTVAYSVLVVAKVEKGKSKKLKSVKELLGITIMERSSFEKNPIDFLEAKGYKEVKKDLIIKLPKYSLFELENGRKRMLASAGELQKGNELALPSKYVNFLYLASHYEKLKGSPEDNEQKQLFVEQHKHYLDEIIEQISEFSKRVILADANLDKVLSAYNKHRDKPIREQAENIIHLFTLTNLGAPAAFKYFDTTIDRKRYTSTKEVLDATLIHQSITGLYETRIDLSQLGGDGGGGGGGTLNIEDEYRLHETSKEPDVPLGSTWLSDFPQAWAETGGMGLAVRQAPLIIPLKATSTPVSIKQYPMSQEARLGIKPHIQRLLDQGILVPCQSPWNTPLLPVKKPGTNDYRPVQDLREVNKRVEDIHPTVPNPYNLLSGLPPSHQWYTVLDLKDAFFCLRLHPTSQPLFAFEWRDPEMGISGQLTWTRLPQGFKNSPTLFNEALHRDLADFRIQHPDLILLQYVDDLLLAATSEQDCQRGTRALLQTLGNLGYRASAKKAQICQKQVKYLGYLLKEGQRWLTEARKETVMGQPTPKTPRQLREFLGKAGFCRLFIPGFAEMAAPLYPLTKPGTLFNWGPDQQKAYQEIKQALLTAPALGLPDLTKPFELFVDEKQGYAKGVLTQKLGPWRRPVAYLSKKLDPVAAGWPPCLRMVAAIAVLTKDAGKLTMGQPLVILAPHAVEALVKQPPDRWLSNARMTHYQAMLLDTDRVQFGPVVALNPATLLPLPEKEAPHDCLEILAETHGTRPDLTDQPIPDADYTWYTDGSSFLQEGQRRAGAAVTTETEVIWARALPAGTSAQRAELIALTQALKMAEGKKLNVYTDSRYAFATAHVHGEIYRRRGWLTSEGREIKNKNEILALLKALFLPKRLSIIHCPGHQKGNSAEARGNRMADQAAREAAMKAVLETSTLLAGKRTADGSEFEKRTADGSEFESPKKKAKVE

SEQ ID NO: 1081 - protein, 2096 aa, synthetic construct
MPAAKRVKLDGGDKKYSIGLDIGTNSVGWAVITDEYKVPSKKFKVLGNTDRHSIKKNLIGALLFDSGETAEATRLKRTARRRYTRRKNRICYLQEIFSNEMAKVDDSFFHRLEESFLVEEDKKHERHPIFGNIVDEVAYHEKYPTIYHLRKKLVDSTDKADLRLIYLALAHMIKFRGHFLIEGDLNPDNSDVDKLFIQLVQTYNQLFEENPINASGVDAKAILSARLSKSRRLENLIAQLPGEKKNGLFGNLIALSLGLTPNFKSNFDLAEDAKLQLSKDTYDDDLDNLLAQIGDQYADLFLAAKNLSDAILLSDILRVNTEITKAPLSASMIKRYDEHHQDLTLLKALVRQQLPEKYKEIFFDQSKNGYAGYIDGGASQEEFYKFIKPILEKMDGTEELLVKLNREDLLRKQRTFDNGSIPHQIHLGELHAILRRQEDFYPFLKDNREKIEKILTFRIPYYVGPLARGNSRFAWMTRKSEETITPWNFEEVVDKGASAQSFIERMTNFDKNLPNEKVLPKHSLLYEYFTVYNELTKVKYVTEGMRKPAFLSGEQKKAIVDLLFKTNRKVTVKQLKEDYFKKIECFDSVEISGVEDRFNASLGTYHDLLKIIKDKDFLDNEENEDILEDIVLTLTLFEDREMIEERLKTYAHLFDDKVMKQLKRRRYTGWGRLSRKLINGIRDKQSGKTILDFLKSDGFANRNFMQLIHDDSLTFKEDIQKAQVSGQGDSLHEHIANLAGSPAIKKGILQTVKVVDELVKVMGRHKPENIVIEMARENQTTQKGQKNSRERMKRIEEGIKELGSQILKEHPVENTQLQNEKLYLYYLQNGRDMYVDQELDINRLSDYDVDHIVPQSFLKDDSIDNKVLTRSDKARGKSDNVPSEEVVKKMKNYWRQLLNAKLITQRKFDNLTKAERGGLSELDKAGFIKRQLVETRQITKHVAQILDSRMNTKYDENDKLIREVKVITLKSKLVSDFRKDFQFYKVREINNYHHAHDAYLNAVVGTALIKKYPKLESEFVYGDYKVYDVRKMIAKSEQEIGKATAKYFFYSNIMNFFKTEITLANGEIRKRPLIETNGETGEIVWDKGRDFATVRKVLSMPQVNIVKKTEVQTGGFSKESILPKRNSDKLIARKKDWDPKKYGGFDSPTVAYSVLVVAKVEKGKSKKLKSVKELLGITIMERSSFEKNPIDFLEAKGYKEVKKDLIIKLPKYSLFELENGRKRMLASAGELQKGNELALPSKYVNFLYLASHYEKLKGSPEDNEQKQLFVEQHKHYLDEIIEQISEFSKRVILADANLDKVLSAYNKHRDKPIREQAENIIHLFTLTNLGAPAAFKYFDTTIDRKRYTSTKEVLDATLIHQSITGLYETRIDLSQLGGDGGGGSEAAAKGGGGGTLNIEDEYRLHETSKEPDVPLGSTWLSDFPQAWAETGGMGLAVRQAPLIIPLKATSTPVSIKQYPMSQEARLGIKPHIQRLLDQGILVPCQSPWNTPLLPVKKPGTNDYRPVQDLREVNKRVEDIHPTVPNPYNLLSGLPPSHQWYTVLDLKDAFFCLRLHPTSQPLFAFEWRDPEMGISGQLTWTRLPQGFKNSPTLFNEALHRDLADFRIQHPDLILLQYVDDLLLAATSEQDCQRGTRALLQTLGNLGYRASAKKAQICQKQVKYLGYLLKEGQRWLTEARKETVMGQPTPKTPRQLREFLGKAGFCRLFIPGFAEMAAPLYPLTKPGTLFNWGPDQQKAYQEIKQALLTAPALGLPDLTKPFELFVDEKQGYAKGVLTQKLGPWRRPVAYLSKKLDPVAAGWPPCLRMVAAIAVLTKDAGKLTMGQPLVILAPHAVEALVKQPPDRWLSNARMTHYQAMLLDTDRVQFGPVVALNPATLLPLPEKEAPHDCLEILAETHGTRPDLTDQPIPDADYTWYTDGSSFLQEGQRRAGAAVTTETEVIWARALPAGTSAQRAELIALTQALKMAEGKKLNVYTDSRYAFATAHVHGEIYRRRGWLTSEGREIKNKNEILALLKALFLPKRLSIIHCPGHQKGNSAEARGNRMADQAAREAAMKAVLETSTLLAGKRTADGSEFEKRTADGSEFESPKKKAKVE

(The sequence listing continues in the following parts.)